United States Patent Application Publication US 2004/0166519 A1 - sequence listing, part 3

SEQ ID NO: 5665 - DNA, 86131 bp, Homo sapiens
gggacaaggtttgggaaagtttgctatcagccccttgtaagattaagtcttcttaaatgcaaggttcctcaattctgtgcagtgtccacgtggacccacccacataccatgagctgtgggaatgggaagaggggtaaggggaactggtgcccacactgactgctgggccctaagtaatgaagccctaggtgtctaaccgaggagtgccctgtcttctgctagcatctgtgaaattgtgggaggttacctggttcgttctcaagtagagtaaatcttcagcccttcatagtccttgacaaagcgttgagaaattgactagtgagtgactcaaactatgcagtaaataatagtagagagcatggtgtactaacaaaacaaaaacccatttctaaactgagaagtttgtaatccatccagaaccattgttataatgagctcttttcgcttccaaatagatttgcaagaacttgtattgagtctatttttaaaaatatgcattatactctgaacactgaaaaggcagagttttctaagtattgattcctgtgtcattcaattgtgagagcatttgagtttcaaaaatgttttcaaatgctcctgtaattttccttgtggggtggtgggaggagtgaaagtttactttcactgttggtaaaatgtctaggaacagaaggtctgaattaatagcctagttcctgcaatagcaatgattataagggtaagtttgagaacataaaaggttcaggatcctaggctaagcatgatacgtatgttaaatgagtaaactgttttgaacagagttgagcacatagtaagtgcagcataaatatttcttattcttatcattaccttatctcattcaatgaaatacaaactcttgtgttcatctctcagagatgagaaaatcaaggcttaaagaggtcagtaatttgcccaaggacagtggttagagtatttttggctgcaagcaatagaaaatgcaatgaaacactaatgttaattgttttacgtagaaagaaattcagattggctgccttatcagctctcactatgatcaagtagcctggttcctttctgctgttttccttgtcatcttcagtggatcagctatcacactggacaagcttctcacctcatagtcacagggtggctgcaagagcccaacctttcctagaagttgcctctgcagatttccccgcatgtctcatcagtcatggttgggccacgtgtccacccctgaagtgatcccaggttccagagaggaaaccaatgttgagcacacaaatacatttcaagtgctgtcctacacaaaatcagggatctgcccacgaggaagaagaggcggtggagcttggaaggtatgcaaccatggctgagactgtaagagccacggtggaactccaggttctgaacctcaaaggttccactttccattgtgatgaaagcatctcaggactgcactgcccagcttggcagccacagcctcacatgaccactgagcacttgaaatgtagttaatatgctaagaaagcccatttaaatttttattttcaacttacttaaattcaaagagccacaggggtctagtggctcctgtattgacagcacagggccaccttgttagtggcatcatttataaccctgggcagcattgctataggaatagccatatcctgtaggtctataatgctgtagaaatggaatgtgtggtgcgaatgaaatttaaaatttaagtagccacggtgaaaaaaaaagagaaacaagtaaaattcatttcataatatgctttatctctatttccaaaatattatcatctcaacatgtaagaaatataagaagtattcatgagatattttacattcctttgttcatcataagtgtttgagatcccatgtgtgtctgacacagcacctgactttgaactcaccacatttcgagtgccccatagcccatgtggccatggtttagagatttcagaaagcattcatggaaaattctctttcctgatcctcattcactatcctgggaagtggccagataaggaagcaaggcccagaagggcccagccagtggctctcagactccagagtcatcgagtccctcactcgagggcaggttaactcacagatggctggcccccaccctctgcatttgccatccagcaggtctgggtgggtaccaggatgcggattcgtaacaggagaggctgatgctgccagtctgggtccacattttgagaagcattcctccaagggtcccacccacgctcataccccagtaagtagatggctcagaattgaaatccttgctttccatcttacatctcattctctttatatgcacaaccatgaagccaggttgctaagacagtctgaaaacaactaccaaagaacagaggtgctgctcatggttaccccagtgtgctgcagcccctgtcctccagacagtgacagcagagtggacctaattttgatactttgtaaacattggaccaatgtgacctatcctagtcccgtgcctttctctggctgacttttcttttatctcatctgattgtgggttcaatttatttaaaggaaaccatttaatgaaatcttaaggaagccctcacctttatatttggtttaacagttgagtttttggggtacagctgaggtctctatcattgcaatgtctagggtgtccctgaagttcaggtgggaatctgaagacactttcctgatccacgcaggcgacttcagacaatgtcctacacttagccacgggtaaatcatgcttttaatatgctcaatggcagaactggtcaaagccactctgagctgctgagagcacttcagattattttccacaccagcaggcgatagaagtggcattcagggactgctgtcattgctgctgagatccaagactcctcttggtgcactgtgatttgcagggaaagctgtgtctctctgacttgcaggccagaggttctgaagattgcttgaggttgcaagtacctccaagcttgagcagcagttttgaagtgtggagatgggaggtgagttattcacatctctaacaaaggagctgctgcttctggcttcaggaggggctgagaggcccctgattcactatctcatcactgggctggaagctccacagggatcagttaggcctgtgggccatgctttcagcacttggaggagaagatcccttagactcagcctttggctccatgccactcttgacaatgtacagggaagccacttggacctgatgctggagtttaatcaacagacaaggaagaggccccagtgtgtactgggcaaaagaacgggacgggtgtgctgaaaagcgtctcataaacagactttgttttcctgtgttttaactcagcgtgaaagtttctctaggtctcctctcctgggggagaaaggtagcggctggtttcctgttccattgcttctttagtatcctgagagagaacagccatgggcacccagctgccccagcctcttcctgtcccggggccccgaggctgcccttcagcggtctccagcttcctgctcctgtaagcaggggcctctctttttggctttcctgacatttctcctgacctcttctgctagccctcctgaacgcacagtaatatctgtacattgcagttggtccccaggctgctgcctctctgtctctccatctaatgttgcatctgtgcactttagaagtacccgggagccttcaaaatatttggatgcctggacaccactccagataattcagtcagagtctctgaagacagggcccaggcatccctgtgtgaggccttcaggtaattccagcatacagcctgtattggaaagctctgtattgaggatgaggccctcatgctgcagagggggcctagagcacagggaagtaagttcctggaagcactagctgtttatcacatagggctaataaccaatggggacagtcgtgcatgcttctcttcttacatgctagcttactatgcttggaggcatacacatgtgtatggggagaggagggcagaatcggggagcattaggagaaaaacctaaagtaggcacaggaaagattccaggggctcacacatgaggcaggacaagaagaaatactttctcaggaaagggaaggggccgagtgttcaatgggcagagaggacagcagaagagaggagaccaggaagacaagatagcccccagcacttccacactaagccctggaaaggctatctgcagaggagccacctaagggtcttcccaagaccagggttaaagggaaaagcccctaaactcctcttccctcccaaatctgaggttgctcttgttcccttccaccaaaggatggcaccaagtagaatgacaaaggtgccatctccttcctctttctcagggaagggtctctctcttaaggacaaagatgtgaaaggtctctctcttagggacaaagaggaaaggacagaccaacctacagagtggaggagtgctagaccaaatcctcccaatacatctatttgagtagcagagactggagacagtggttgaggtcaactatggggctgcactggtgctgatcatgcccgtgctcccatcccacacctggataaacagcagtgggcagcttcccccaccccccagtcttagaaaggcctcctccagttgcaacaggactccctcctccccatcgctgtcccagccacccagcggaaagctgagaccccaccccccaggtggccaattttagacccactaaaggcctttctgggctgtactgggggctaaagggggccaccatcccacagagaaggggccaaagacagccaggatcctaaaagtcagagctactttaagaataactttcccaggccaatccccagttcaggaacgttcctgtgccctgtgccagctagagggactagggctggagccggcggctgctcctgggtgtccagtccaggagccagtgaactcactatctctggagtttagcagaagaagggtaattccaggccggaacccctttctttcccgacctctcgaccacagtcctccccaggcacattttagtggccagggatggagacccgcggataatgactgaaccaggtcacagggtgaaggttctgagatgtccggctcccgtagcttctgccagttcccgagggagctagcacaggcttggccttctttggtggcatctctgcctccacctgtccgtctccattccttgtgcccatagcacctcagctgctcggacacagaagttaaaaggtccggcatctgcacttgtccagagtgggttggggagcagagaaaggagtggtgagctgtggggaaaactggacatcctgacagacctgaaattcaccaagccgccagtggaagcctcaggttccgcctctataaaagggactcagccatgtgcaaggatgggtcgtcgcgaggattaaagggcagggtgaggggatgtcaagtgcaaggcaagtggtccaagcttccaggtggtccctgaccagttccgggcacatctttacccaaagggaggactccgggacccccagccccgccgccgcagaccccctgtagcaaagcagggaactggacctcaaagggctgctggggaagacgggatctgaatagaggtctgaaggaaagaagccaggcgggggaccccgggagggccggacggggctgggggtgctgttgacactggagccggactggagacctgggaacctggggcagagtcggcagcggggagggggcgaccgaggtgggaaaacggggcggggccggagacgactccagggctgggtgaggcgctgacccccaggagctggggtgccgaggggcgcgggccacagcggtgcgagccagtcgggcgcccgcgcggtggggcgcgcggcgcggggattggcgggcgctccccggtgcccgcagctcttcagcgtagccgggaagagccgcgcgtctgcgcgccagcccccgccctgggcccgccgcccgagctctctggcgcagcgctagctccgccgcgctcagctgccctgcgccggcacccctggtcatgagcgccccctcgacgctgccccccgggggcgaggaagggctggggacggcctggccctctgcagccaatgccagtagcgctccggcggaggcggaggaggcggtggcggggcccggggacgcgcgggcggcgggcatggtcgctatccagtgcatctacgcgctggtgtgcctggtggggctggtgggcaacgccctggtcatcttcgtgatccttcgctacgccaagatgaagacggctaccaacatctacctgctcaacctggccgtagccgacgagctcttcatgctgagcgtgcccttcgtggcctcgtcggccgccctgcgccactggcccttcggctccgtgctgtgccgcgcggtgctcagcgtcgacggcctcaacatgttcaccagcgtcttctgtctcaccgtgctcagcgtggaccgctacgtggccgtggtgcaccctctgcgcgcggcgacctaccggcggcccagcgtggccaagctcatcaacctgggcgtgtggctggcatccctgttggtcactctccccatcgccatcttcgcagacaccagaccggctcgcggcggccaggccgtggcctgcaacctgcagtggccacacccggcctggtcggcagtcttcgtggtctacactttcctgctgggcttcctgctgcccgtgctggccattggcctgtgctacctgctcatcgtgggcaagatgcgcgccgtggccctgcgcgmkggctggcagcagcgcaggcgctcggagaagaaaatcaccaggctggtgctgatggtcgtggtcgtctttgtgctctgctggatgcctttctacgtggtgcagctgctgaacctcktcgtgaccagccttgatgccaccgtcaaccacgtgtcccttatcctyagctatgccaacagctgcgccaacccyattctctatggcttcctctccgacaacttccgccgatycttccagcgggttctctgcctgcgctgctgcctcctggaaggtgctggaggtgctgaggaggagcccctggactactatgccactgctctcaagagcaaaggtggggcagggtgcatgtgccccccactcccctgccagcaggaagccctgcaaccagaacccggccgcaagcgcatccccctcaccaggaccaccaccttctgaggagcccttcccctacccaccctgygtggccacctcccaaggggtgggcaccattcctacagccccgaagactgcatctcctgaatgctcacctaagctccaccacctgttccttccagcagcccatgtacctgccggagagtgtcagaactcttctgctgctctcctctcccctgcactctggctttcaaaaggatgcttccatatgggtaggactccyctggaaactgggctaggatattaatcattcctgaacctctggctgttcttcaagggctgggaagcaggaggtggtgagaaatgaatggtccctgtgtgtgactccttacagccactgcttgggagaggactcaagaaggtggagggaggtagcacccttcctctctgcagacgctctgccttgtggtgggagcacagcttgtacaggagagaggaggaaggaagatgcccccaggcacctgccctttatgtctcttcctgagctcttgttaagtgagacttatgttaacagcctggggcacttacttccctccccactcacccccggcctgggaataacatctgcttgctgtcacaggtgtctccctgagttgccctgagctgggagcagtcttcctgtgagtagaaaaggtttggagagacatgacatggggtttattgcaaggcataaaaccaggtcagtaataacaaagcagatgataaaaacttcatctagctcctatgatgtaattttttttccctgatcctttgatgtgggaacatgagaactcattaaggcagcaatttatactgtggtggtgagtgagagaggagccatgggcrggaaaagctgaccagagagcagcgagggatgggaaccagcccaggttttggatagaggaagcagcttcatcaccaccccctattttagaatgtcatctttcagtaaaacatcagccacattagatattaacatgtaagttgaacacaataaaaggccgtatctttgttgcctgatgtgttaaccaaaggataaattatctttcccaaagggaaagagcttaagaggagctctaattctgctttctgataaaagcaggggaggggacaaaggagaacttggaacacttatgttagcatctggtgtaacaacataggaacatgtatgaagtttgggggaccccacctggcttagcattcagagactacctctgggtttaaccggcctgattctggatgatcattctggtggtatggggaagatggtgtggggagggggagagacagccaaaggtcaacaccctatgcccttcagagtggtcagcctcacagaccactctgagagaatgggtagccatgtctgtactacatactggagacatgactgtggaatggaagtttcaaaactaagtcagagaaccctctgatcctgcaaacacacatgcacacacacagagacatcaaccatctctaatttgttggyacccaccagggataccttgggcatctgaagtcagtctccatgtctgtgggtctcgtgtaaccataactacttggagtttttwaaaactgcattatttctttgttcctcagtgtctgacaatgcctgccaggatgggcactgatgaatatggttgaacggaactccaaggaccacccaggttgatagtagtgaggtgaggggttcacagcactggcagtggtccccagggcttcttcccagcttgtacgtggggttgggggtcctttctttagtctctcagtgatcagactgggcaaactctctgakaagcaagacagggcayctaccaggagtcttggcaacactagtgtgtggctgcycagattagcatggaataagacacattctatttagaaatgtcagcctttttaacttagttgatgaaggttgaaggagaggcagcttcaggtgatggaaagaaaagtctctgagaggcaggacacctcagcctcagctaccccgtgagcagtgatttaacctctctaagcctcagtttcccacttggaatatgtgccaagggaggttcgagttttgagctcttcccagctgtaaactctgcattggcagagacaccgtggagacacgcgaatcaaatggtgggagggcaggagatagcacgcttctctgcttagtcctccttccatcaccactggaaaatgagcgtgaacactgcccttgaccctgcagtcataagtcatgcaggtggtggcggggtgggggtgtagggtgagcctacccgctgctctcttcttyagcttcagggccttttcatttcccggcagcaacgaggtgcactgagcacttgtcggggctgtgtttggagcccatcaacagtgctrccagctttagttccatcaaccccaggcttttgtaacaactggttgcatgaaaccctcccttgtagtttgtgtacagaagactgcaatgaattgaagycatgagacatacagccaggatcctgaaagccaccaacatatgtcacctgcctgggaggcttgcttcgatggtcatcttgttctgcctgctaagaccaggagtcacagctgttgacatcatggtgaataaaaacattttctgccacaggtagaaacagcctttgctcatccctccatctgtcagagatcttgctttttcttttacaattgtctttaatgtactgttccatggcaagccaggtgttccattttcccagatggtcagggaagatggtatttrgacatgacaggctgtcactcagcaggatacttgcccagtttgtcagctctgatctgtgagcaaagatgcatatgagtttcacactcatctgtgaagtattggcttcactttcattaaagtcatcatagctggcattccttagatgctagaggtggatgcaaaggatcaactaaatatagcacgttttggcrgcactgcctcagaaaccagacatgaatcctagcaaatgtgggcattgacactcttctctgagaggttggaggtagtgaattacccccatctcccacattctcattccataagtagatgacagcatagcctcagattccttaaggacaaatgttagaatcctagggctgtgttttctgagacagctccaccatggtgtacaccatcagccagcagcacaccctggaaactgtcttgctgactagcatgcatgggggtatacatgtggacagttcgctgagtgcttctctcgggtggtgcaacaggtttccagacaaaacgatgagtctacaaaggcagcttctgccttcatggagcttggaggttagtggcaaaagacaggcattaatcaaataagcacagaaatgagagtacagttctaaacctaaataagcactgtgcaggaaaggaatgtactttctaagagatgatgataaaagaagttgcccatgactcagagcaggctttccccaggaaagtggctggagatgacctcctctgaagcgtacctaggcattaactaggaaaggaaggggcggggcacaaggtgttcctgtaagctctaagcagagggaacagcatgtgcaaagagcttgcagtgggaggcactgaagggctcaatgtgaccaaaacacagaccacaggggcgtgtgaggcactggcaggcacatgagcaggagcctaatgccttctatgccacctcaaggatgagggctgtgtcctaagagccaggggtcagtggtggcaggctctaatgaggggcttgggtctgcctagtaagagaagcctatcaaaagctttggggtccttgtgaaattgaggcttaacatgcctctgcttttcagggaggggttggcaggatgatcatgtccttctttccaactttcatcaactttatatgaactgaaaggcagggacctcaatcctgtgaaggaagggactttagtgcctaacagtgggggcaccttctgaaatgggggagaacttatgtaaaaaaatgcctagaatgggagtattgactttctacaaagaaaaacatgtggcttcctattgtcaaaagacaccatgagcatccacctgccgtaacatagcacttgaaatgactggatttctggggctctgcctaaagagtggggctgccaaaggtcagcactcacccagtgtgaacgtgtcgtagatggggagaaagaacaaattgagaggcacacaaaccaggactgagttccggctctcccacttccagcccacagyggcccagggaaggctgcatgactgtgtggagagggcagagcaacagtatccacctgcaggtgcacagtgacacacaaaggccatgttcctggcccaggggaggaaggtttaccattcaaatggtgactacttcatgatatagaaggaggaagagggagttggtacacagttgggtgtcttttttttccatttttttttttaatcaggctttcattagtgttctgaagaggctgtaatttctttttaatctatttttaattggagtataatttacatatggtagagtgttctctttytagttgtacagttctatgaattttgacatgcaaatttttacattttacattttacaattttacattttacattggggcaactaactgttgccccaatcaagatcgggactgttttggtcaccatctacttccctcttagtggctgtgatttgtggccaaggaggaaggacacagacagcatggggaggacctgaggaggtacagaattggagatggtgctatccccaaatccatggaggccacctggttataccatttcccgagttcatccccccagactaggagacctcaaccaatttacataggaagctatagccctcttgaccttatggatctgaaaagaagtatcctggaatctagacaccacctggagaaactagagggttgagtatgtccctgggcaagctgctaattccataatgacttcgtgatcctttactccaagcactggagagagggtgtggattccactccaagctcccttccgccaaacagagcagagtgctcctcaagatccagccgcatcccaaaagcaccatttccgtttgtcacgggcctccaggcagcttgctgttgagtttgctcrtgtttatcatggccgtatcctgtgctgtggagagtcatagacaaattaaacagtgaaactgggacttgccccatgcccttttcagactttccattctcctggcactacccttgggtttctgcatgctacctttttggaggagggggaaaatacatgaagaaagactggagtcaaaccctggcaaaggctcgctgaaaatggggatttgggattatatgagcatttcagaacagatttattaaaagagggggacaatgaacaaggcgtaggatctccaaagagtctgtggaaggtgggatccatgttcccaaaggatttaaatcgaaacaaggcagkaggcagtgggaaaaggggaggaattagggagaatgtggaaaagcccctctcctctttgccaagtagaacaaagctttgctggacaacagcggggtaacttagcatttaggtacggcattagcaagaagtcagaaagaagatttgagatgggcacagaggtgctaacctctaaccaaaagcacagaggttatattgccaggcgttgaatatgcagaagataagtgggttttgtcttaggataatatcggtattaaaatggctattttaagagaagatttccttcaggcagagatccaaggaaatatctggcctgtggcccaggtggcataattgtcacagaccccagctttgactcttggtgtttctcattggatccctgaaaccctctgctctctgctccccctctccagtgggcgtaaccttgagttaacccatccccagggttcttttgtctttcacaatcacactttcaaaacaccctgaaaaggatttcgattctattagcatctgatgttaaaacaatatttagcttcccttgtgagaagaaatcagttgtttgcctacatctgaacctgctaaccaaaaaaaaaaaaaatgaggaagggaacactcaaaacaaaaagagatatcactgaacccagggcattcattctggaaaagaaagaaagaaagaactgggcattgtctgcattgttttatgaagaaatgcttctaaagctcaggagatgtattttgggtacccccactcagctataaccatgaagaaaatgtgttttcatgtattatttgcaacctcagttttccttgaatagatgatataataaggaatcgcattcaacagagaatagcaagtgactccagaaggtaggaggtgggggatcttctgtcccctggccccatccacaaccataatgtctctcaaaggaatgtcacctacaggaacttccctccgtacctcctgctggctctgttggggccagagctatgtttctctttctcctctgggccctgagaaatggagaagggcactctggagcatgttcttcctcctccgagcctccttgggagaacagcggagggagtctctgtcccctgtacttgactaagccttgtgagaagggaaaataagctgaagccttcgaagctggattttagagtgaccgagtgttggagctcacttctcacctggcacaaaaatcttcctgtttaagctatgatrtagatgcctgcaaatccaacattacagttcctctagcattgacaacattgctccaagcaactgcatcttcccttgatggaacagtatccactttgtgcaaccttgagtttgcccgtaagacactcatgattccaacacagcttttttctgtactcatttatgcatctaccagttcactggcacacaagtaaacagttattgggtatctaccatgggccagaaactgagcttatctaatcttcctggaaaccttgtgaggcggcactgcttgaacccgtcttacagcctttgaagggtcatgtggtgcccgtggccatgtgaccagcaggtktcaggctggggtcacacccaggtgtgtatgctgttcacaccacatatcagccctgcggggtgcttacagcggaaattgtgcaggttcctgcccaagagggacatgtaaatacatctagaagtagttgttatcttcccaaacaatgcagtacataaattgaatcccagtgcactctcatcaaaactccttgagtgcccccacttgcacccagaacatttttcaatgtcactctttcagtctttttttcagtgtctttgacctacagcccctacagtcatctcccactgcttgtatctctctttccacctcttcagctgccttgcagcccacctcaccttgttcactatgcccagtccgctccaccagggctcttcccagtacagggcctttgcaggtgtgatccttcccacctggactgcttcccctccagtttgcatttgacaaacccctccttccccttcaggtctggtgttaagtgtcagcttgtccaggaagctccctctagtcctccactctaaatcctgccttcctcgtgcgccttttcagagtgtgctgtgcttttcttcccctgcacttatcactgtttctaagttaagtacaatttgggggtgatcagttgttttgcatctttctcccctgccagagtctaacttatatggtagggacttgtcattgtgcctatcactatgaaaggcacagagtaaatgctcagtaaataattgctgaactaatctaagaaataggtgagaactggaaaaaaaaaataacaaagtcatttgacttaaaaaaatgcattctgtttactttaaaacagcaggctaggaaaaacaaacaaacaaacaaacaaacaaacttgaatgctggcttatccagaaataccaccttggctttcttgccccggacttttgtgctatgaaatttcaccagcaactggtccctgggagtctccctcagacctggatgtccaatgatgtgaacagaaagcagagatcacacaggttgacccatggctctggtttcacaaggtctatcctgattttaaatkctcagggatagtttttaaagctaactgatttgtttatgtggtcctggtatctttccctgagaggcactatggctatttagcgttttgagaatctcaagttcagatgagacctataaacagaactgctgatcccccaggcagcaggaagtgaggaggacagggaagctcagggccccgcacaactaatgtcctggggcccaagtgctgcatgaagggtttttscctctaggttttgaaagtgtgttttggtcttccagtgttccttaagaaaatgcccctcttctggaataagaagaaatcctaacgcaatgaggccctacaagtcagtttgacagtgactgggagcagactcttttgacaaacagaaggctgggtaacagggggcgaactataaggtgtcactgtctcctctggtctcccagccccatttatctgcacctgtcctgcccccatttgtgtagctcttccttcacaaagacttagtctgctacttagggggagcatggctcagcttgttatctccatagggcactgtgcatggagcttccccagcacacacacacacacactaaagccattacttcttctgcgatggatgtcaaaatctccaacccggtcttcacaataatcagtcaaactaaaactcatgagttcagcattatccagacatataaagcatctgaatatttgcctggactctacttgcttttaatttcttctttaaaaaatctttccgagccctgcatattgcattcagccagccctaccaccttagaaaagtgagcccaagaaacgtgtgcattgaaaagatsatgttgttaatctccaaaagagatgagaatgatttcatactggatgagacgtttagaaatgaatatttgaatgagagccacaaactgagacccttcatgactacagtgaatttggatatctcgcagaggagataatgccaaaccatacaccggacacacagctgggattcgccagatgccccaggaagggtttatttaattcattccaacaaatgatcctataatgcatttatgcatttaaaagcacagagacacaagtcctcatatatgaagttgttatggttacagaaagaaaataaatatttgtgcacacrgagatagcatgaaatcattctacagtgaaaataatagcctctggaaaaagctttgaaaatcagagatggtgccaycaccagacaacacaagtgctggggtacagggcagccctccatgcatctcatagcatttgcatggtttgtgagccccatttaatgacataaaatgagggcactgagggaggaaaagtgaacagacacacaacccgagawcacattgttatttgttkattttgtacaagtgatgtcataagcaaggattttgcctgtgttctagattatctccaataaataaataactatgtacaaatattttgagtttacaaaatagaagaggaaaacctttgtcttacaaaagttacatttctatgatacatttatttccatacactgaagcaggatttcattcctagcttagctgaaccaaagaccttgcagaccctgtgtggcagtgtctagagctgtgtacctagccttttctaccaaagagcaaagctacacaaagaaaattcctcagtttcttgaaaataagggcctgacttggcctgctacttataactgatctatatttcatgtattccagaaaattggaagcagtctggaatggttgtcctcaaattactgagcagacacaccccctgcagatcttgttaaatatagattctcatgaactggatggggtggagcctaggattctgcatttctaaccagctcccatgggcagggcagcttccaattcttgttcaggggccacattccaaaaggcctctctgaaatggtagaaattctctgaggacctgattaaggctaggccctaattgggcatcctccaggatccattcccaagctcccaattccacaagaccagtagagctggttttattttggtctaccagtgacaaggaacagtgacagtcaattgctaattggcatgaatcatgcagtttgaagctttcttgaactgtctcctgggaggtgtttgtctcttctctcaatctagagcaaccttctgaacattttcaacactgtcaaaaataagtaataataacaaaaaaggaaattgcataagaagattagcaacaattaccatttttcagtacaaatcaaaacagcaacaaaattcaggctcactgtttaaaagtaaagataaatacctctttgggtgtaatttctatgacagtccagcaacatcaatttaayaccttttacatctcaacctttgtttaaaattattttgctctgggaatctgaaatttcaggataaattagcaaatctggtgaaaaagcaaatggccatttttatttttagtgtttttgtttctgtttcatgtaggggttctgtctgagcagacagctaagagcaaaagaagtagggtcaggcacaggtagggtgactcaggtgagttggcccagttcctgggaggagaaaactaggaagaatggggaataagtggggcttgcttcataaatgtgagagggctaggaaaaaaaaattcaccaagatagtttacctgtcacatgacaagtgggagtttgtagagagagagagaccggagagctgtgcaaagtggatactggagacatacaggtaagaacaaaggaaacaaacaaaaacctaaatacttaaaaaaaataaatattttagtcatccctagcccacgaggtcaaggtctgcccagaaggctgccgaccaataacgctcaccctcctgcgccyggtagtgaggacctgggacaaatcgcagtctgtgtcttcgttacaaaattgccatcattgcccagtggtccagtgacgtcacggaagaggccgaggctcattctcctccctctaatcaccccctcgccagttagccatggaatagaagaaaacagcttggggggtgcggggagggtcttctccagctgtmatgccagctaaggtgctttggtagcaaagctgggggtgaggaggcacaggctcctggacggagccaggctcctggacggaggccgctcagagtctctgcggcgtccgctcggtccgcacgtgctgcagcactacctccttggaaggggccgcgcacttgtactccatcttggccctggcggcgccctgcttcttgcgcaggtggcagaggagcgccaaaagcgccaccaccaggcacaggctcgcgatggagatgcctatgagcaagcccgaatgcacgagccccacggccggaggagtcaaggtggagccgrgcgtcgggctgggcggggrctcgccagagccgctgtcgccaccgtmcaccttgccggagtcacagtcggtgccaatgtggcggrcaagggccgagtcgggcccgcagatgcactcgaaggtaccggggaggttgtggcacaccccggagcagaagccgccgttttcgcactcgtcgatgtccgtgcagatgaaaccgtcgtccaggatgtagccttcagggcactcacagctagcctgggtgttggggtcgcagtcggctggacaggcagtctggttgcaaaacatctggcacytgtgcggctcgtggggaatgggcgcgaagccctcggcgcagacgcagaggtagctagtttggttcaggggctggcactggtactcgcagttggctctgaagcacgggtccacgggctccacacactcgccgtccaccaggtcgtagttagggtagcagtggcactcgaagccaccctgtgtgttgacacagcgctgcggacacggactgggctccagtatgcagtcatccacgtcctcgcaccggtgttggtcggccgccagccggtagccggtctcgcacatgcacgagtaggagcccggctggtcggggttgggaacgcagaagtgctcgcagaggtcgttgcaggactgcgtcgcggatgcggtgcaggagcgcccgtctgcctgcagggcggcgccggctgggcactggcagcggggagccccagggatcgcattgcacgcgtgctcgcagccgccgttctccacgctgcagtcccaagcgcccggcgcctccctggcccagtgcccctggaccgctccgggcggcgcggtgcacattagctgtaagccgaggggagccaccgcggcggagctgcccaccggcagcgcctggaagtccgctccgcgggccgcgaacggggtgccgtaggtgatcgagacggcggcagccgcggcgccgggctccacagccagtggcctgcaggtggctgggaagtggaactcgcagaggaagccatcggscttcacttcgcactgctgctcctcccagatcggctcgctgggcacagtggcctcagcagcggagacagcgacgcacaacgggccgcagaggggagccccattgaggtcgagccgtgcccacctgctatagctggtgttgttgtctcccgtaacccactggaagccgcgcaggggcccgaggcgcttggggtcgccgcagccgggtggcagctgcaggccgatccagaggcgccggcggccaacgccgscgtcgccgttcagtagcaaggaaatgacatcggcagccaccgaggagcgcactgtcattaggtggccccgcagtccgtcgcagatctgactggcattgaggaaggtcgyggggcccgggtagagcgcgaagcagtcgtgctcgacgcactggctgccacccggctgcggctctgcgggtgcggggaaccccaggcyggccagggccagcgcgccaaggaccaggaccccaagcatgttacccaggcgcgccgcgtgcaggcgccggggaaagcgcgggcactgcgacagggcsgtgccggagcagaggggcacaggacgccgatggcgacagcctctcctgtccgtcccagcccagacacttcttgccgctgcgcgcagcccctgcgaggcagcctctgacatgcggatcggccagggctcgagtttataagtgcccggccctccctccctggacgttcgggaaaaggaaggaagtgcctggtgggaagggctgatgccgcatactcggattgctgggttctctggccgcccttgcgcccgccctcgcgcatgggatcacctcgccgggatgagtaaaccctgccctggcgcagggaggttctcgggcggggccgacaggggcaggcgccagggaaggccagcacccctgtaacaagacgactgtccccgcccaccactcgggcccccacgcgtgcagccctctttcatctcttggtcctcctttctttcttttcatacatgttacagccacttccaaggaaagcctggattgcaagagctctgggaaccggagacttcagagaagagggctttgaatggggagtgggggaggtggtgcacargacctgcaagacgctgggaggggtgatcggcaccaagggcactttgggaggacctgcctaggacgtggacttccccgaagacaggatcgcaaggagagacagctggatcctgtccgcggccaaggtgcctggytcaggaaaccagcggagcgcgcttggcctcacaggacagtgggtgtggctggggtgacggggcagggtggggaagactggcctaacaccagcgccctctgccccatggctggccagggacccgcgagtccctggacacgcactggccaacgccagaccccatctcatcgggtggggaagtcgcggggacactgtcagggcgccgaagtccggacccggctcagaggcggtggcaggtgaattgctgcggcgccgggtaggggcgggcgcgtgggagcgagtcagcctggccagtttcggcccagcttccgaaggatggtgcttcttgcaccccaacagagtggctggcaaccccccaggggagcgcgcaggatcccagctgatcccacccgggtcggctaaggaggtttccatttcgtccagagtccgaattgatacccacgtgcatagaaacgccacttgctcggcaaagggcactgaagagccaccgtcctgtggatgggcagggtggggggggggctggaggaggacatgggaatccgtcactttcgacctcttccggtggttcacttaccgggaatgcggaagagtgggtctccccctcgggtcgcccccataatggtgagaggcaaactgtttaaaaacacccttgcctctctcctctactgtcctcacaacgagcgccagggggcggcgctgtcgagctctaaacaaagccaaggaagttggagaagtttcgggctaaaaagggttaaggtgtaggagcacagagtcytccttctggggttggaagctccgttcccgggcagctcagcgtggattccgctgcgttcacctcttgcctccagggcccagtagatcctgggctttaaacaagaacagagagtatggcgtctgccacgtgcgacagacacgcaccggtggggtgggccgggctggactggactgacctgcagtgaccaaacgggtggggcgtggacactctgaaagtgaaaaaggcaagcacgactgtcccgccgcacactccccagcgccttggggcagagagcctccaaacgtcccgctgagttgagctcttcgctgggaaggccgccccagcacccaggaaacgaaggagctgctggacacgggggtctgaagctcccggaatgcacacagctgcgcctcccctgacgcggascccctgggaagaggaagggaagagcggcagatagcacagtagggcttgtccggcgggagcagtcaagctgtggctgcctaggctgaatcagggggtcgtgactccggtgcacagcctgcctacgcgggacgcaaaagcagggctgcctgcggtgccgccatgggggtgagggtggagcttcagataagggcaggaacctcgttggggcactgctgaaaggtctcagaatgtggggacaattcccagagtgaatgagacaagagagggggacaggatcggttacagaatcagaaaccagtgcaaagtgaaaatgtggggtccattgttcaattacaaggattcaagactgtgatagcaaagtgttaaacaaggaatgaggccctgggggggtgatgagagggcccttctgaacctgccagccctaaaagccactgagggacattcaaggatcagatctcaccccacaccaggctggctgagttcttggatggattctagctgattcaccaacacaatgtttcactggacgtcctacacaggtccacttgcacccattgctgattcttgcaaagaaaaaaaaagtgtgagaacagccccaatagctgagtccactaagaactcagtgatgtctgtgaaacttggatcaaccctatatgaggaggtgcagatgttggatgtttctgtattagaaagaaactagagcaacaacagatagaagcagagcattgtcccatggggggtaccacagtgtctgggttgccctacacaaggatgggtggacatgacccacttggctttcccacctgtaagggctttacccmtgrccctcaggatacctttgccttgtggggcctgccctcagccgctttgtttttcctctccagccaataccttggaggctttgcatattttagactaccttctggtgactgaaggtcccctgtctgtgttcttgccccatccctatcttcctatctgtgccccctgcacaccagggtgggccactccttcctatccctttgcagataacacatccacttcccaatgcttggcccagttcctggcccagcrccctcactctggcccaccagcagacttgctttactcctgaaacagctcccttgaagaacacccatctggtcctaaatactgttgccaaaatcttgttttcagccatccttctagaagccttggtgccatttgcacttgtgacccttcaccattctcaaggctcctcctccaattacttttgagacacatgttttcctcccttcctctcctgtgagccttggggaggcccctgggatcctcttgtaccacccactagagtggccattctcaaggttttgctggtggtcttcatcatctctttacaacccaccttttggtgaacttacccattcccctggcagtgatagcagtgtccaaggagattggggagggagtattctagaagggacccttaccccatctttcccagtatcaatagttggtccactgaggttttaaaccatgcacttgcctttgactttctgctctccttcatccactgcctagtttttgtgtcttgtttcccctgatcactgctcctgccttctcaatttatgctgagacagttgggtccccagctcttttccttgctgcttatctctccagctctccaccgtggctgaggctactctgatcctcatactccctcagtgctgctcccacccgctgggagagcccatactctttcccctccgcactgaagatgctcgcgatagtgcctctactctgtggccacagatgagaaaatttgcactcaaggggctatgctggaatttggacccagagcctgcaccccttgcacctcacaaggcttcaaggaccagtgttctgctggtctccatgaatgaggaaacatcctggcaagggaggctcctgctcactgtcagagaagcaccttgtccgctcatctccaccctgtagttcatgtctctccctctgctagcaacattctcgtctgccaggctcttcacccactgaaatctttccattctttcaagtcccagttcaagcttccccatcagcaagttttctgaataacccaaccagaactgatctgtctgtgattcccatagacaggtcgttctctcagctctttagtactcaccactccctccctgccctgtacctaatcatgcatataccacactttttgctgcacttakactccagattcccacacatttttgtatccccttacacctaacagcacgctttgtaactagacagtgcccagagcttattggagcacctgtggtagatgtttctttgtcctctccagggtgattttctcacattcacctgcaaagacaaggatgggggacctcagagcctcagggtgaattaagagtgtggactttggagccgacttggctgcactggagacccagctccggcattcacaagtttttgtttattgttaagatttgactaataacccctccccrtgtagctcagtttccttgactgtgtaatgggaatagtcccwccttcaaagtgttaggatgaagattaaatgggttatacatgtaaagcatttagaacagaggagccgtagtcagctctcaataaattttagcaaaaaagaaaacactcaagtccctagaatttggattcggcatctgattgtattcaatatccagcatggtttcttttccatggtagggactcaccaaatgtctgttggatttaatttgttccagccaagcatttctaccactaataacaataagcaattgtgaaaaaaaatcagggatggaggcatagggaagaaattgaagcatgtcctgtcttaggcttcccatctgccctagagacatccatagtgactgtccccattgcccaggtgtggaagctgaaggccagagagaatcagtgactctccaatgtcacacagctagtaagtggtgaaacaaagattcaccggcctgtggtaaggatgaaagaattacaatgtggagtatgtctgagcccccattttgccacatactggcckacttggctaagttatttcaatctctggtgttctttcccaaaaactggagatataatatctaatatgtaggattagtgtaaaataaaactctttcccaaaaactggagatataatatctaatatgtaggattagtgtaaaataaaacagaaaatgtacatacagtgactattacttttcttggaagacagcagctgtttaacaaatatggttgttattactgctatatataaaaaaaaaagctttatcaaagacccctgtggtcactggtagccatccaggaagtcttgctttttayttatttattgactgattgattgacttttgagacagagtctcaaaatcggtagcccagactagagtgcagcagtgttatcatggctcactgcagccttgacctcccagatcaagtgatccgcctatctcagcctccagagtagctgggactacaggtatgtgccatcacacccagctsatttttttcttttgtgtgtgtgtgcagaaatggggtctcactatgttgtccaggctagtctggaactcctgggctcagacaatcctccacctcagcctccaaaastgctgagatcacatgcatgagccactatgcccagccaagcccagctttttagatgggagtttctgcttgatgtctgtggaggaggctggaccaactacctgggcagtgaacagacttcagccatttttattgaaagcaaacatgtgtgaatgttgttagaacacagatgaaaaggagtccacagacagaagggggccccagtggcattgtgctgaccccatacataccttagccatatttataatacactaacaatactaaaatgcacacataaaaattaagtctctatggctatgagcaatatataaattcaaggatggaaaaataactgtctgttaagcaaatgttatctaataactgcagcacrttagagcaaaacaagtattttccaaaattttgcctcttactcaggctttcttaaagaaacagggtaaaagtggacaattgtttgttggtctattctttagaatagactttattggtctattatttgtaaaagaaaatatgtcgcatatccaaaaaaccataccactaatatcatactcaatggtgaaacactgaaagcctcctccctaaggtcaggaacaaaacaaaaatgtcttctcttaccacttccatttaacattatgctggtgatttcagagcagttagttatgaaaaggaaatttaaaagtccaggctggaaaggaacaaataaaactacatctatttgtggatgatattaaccttttttgtatatggaaaatcctaaggaaaacacttttttaaaaaactaagaactaataaaggagttcagcagttgcaggatataagatcaatacataaaaaacaattgtatttctgtataacaataaaaaaatgaaaattatgaaaacaattccatttataatagcatcaaaaagaataacatacttgaggataaatttaacaaaagaaatgcaaaacatttgctcttaaaactacaaaacrttgctgaaagaaactttaaaaggcttaaataaatggaaagacaccctacgttcatggattggaagacttaatatgattaaggtggaaatwtccccacaatttatctacaaattagatgcaatctctatcaaaatctccgcttttttctttgcagaaatttacatattgatcctagcattcacatggaagttcaagggattccaaagarccaaagaaatcttggaaaagaaaaaaatatgaacacttacttcctgatttcaaaacttaccgcaaagcaccagaaccaaaacaatatagtgctgggataaagacagacacgaatcaatggaatagaattgagaatctaaaaataaccctcacatttgtggtcaattgatttccacaagggtgccaaggcaattgaaagaatagtctcttccacaaatgattctggaacaactgcatatctacatgtggtagggtgggacctctacctcacatcaaataaaaarttaaagaaaaatggtcaaaacacttaaatgtaagattaaaactagaaaatccttagaagaaaatataggtgtaaatctttgtggccttcaataaggcactggtttcttaaatatggtacaaaaaacacaagcaatccaagaaaatgtagataagttagacattatcaaaatttaaaacttttatgcttcaaaaaaaaaaggtggagacaagccacagaatggragaatggtaggagacatttacaaattatgtacctgataaggtctctctagaatatataaggaactacaagtcaataattaaagacaacaaacccaattaaaatgtgggcaaaagatctggatagatatttctcaaaagaaggtatataaatggccaatatatcaggacacctgagtgagaagacagatcctgtgcacatggaaagatgctcaacatcattagccattaggggaatgaaaattaaaaccacaatgagataccaatacacacccactaggatggctacaatcaaaagacagagaagaatcctcagatagtgctgatggagatgtttactggtgcaaccactttagaaagcagtttggcagttccccaaaatgctaaacaacagttaccatgtgatctagtaattctacttctaggtatatacactcaagaaaaattaaaacatatttgcacacaaaagtttctatacaaatgttcgtaataggattattcttttttttttttttgagatggagtctcgctctgtcaccaggctggagtgcagtggtgctgcaatcttggcttattgcaacctctgcctcccaggttcaagcagttctcctgcctcagcctcccaagaggctgggactataagtacacgccaccacacccagctaatttttgtatttttagtagagacggggtttcaccatgttggccaggatgatctcaatctcttggcctcataatctgcccaccttggccccccaaagtgctgggattacaggygtgagccactgcgcccagccccagtagcattattcttcacagccaaagagtagaaagaacccaaatatccatcagctgttgaatgaatgaatggaatgtggcatgtcctgtccatataatgaaatgctatttggcaataaaaagacatgaagtactgattcatgcacaatcttgcaaacattatgctaaatgaaataagccagtcccaaaagtccacatattatatgattccatttccatgaaatgtccagaattaacaaatctagagagacgaagagtccattagtggttgcctagggattgagagtaagggggaattaggaaaagactactaatgattgcagggtttctttctggggtgattaaaatgttctagaattaatttgcaaaactctatgcgtatgccaaaagccattgaattatacattttagataggyaaactgtatgatgtgtggattatatctcagtatagctgtttttaagaagaagaacatatgttcccccagtgaatgaagcatgagagcttaagtgatgaactgccagtggacctctgagccttttcctgcagccgggggcttattgtatgaggaaggatagaatacctatagctgtctaccttgacacagaactttggatctatcatctattggatttccatggagccaaaggaagctygggaatgcccagtgatctattcagggtcagtcatccagggtggcctactttgagagcaaagagaattttgtgtctagcagattcatgggacactaccttggtcttctcactcaggtgtcctgatatatcccctcctctcaagaggtgttttctgagaaaagtggaggaccacagaaaatagcaagagagccccagaggctgcctgctgggcaatgtctctttctgraacatgtatctggctggacctggtaatctctgctcaggccaataggtggtgagcaagagatgaacaggcatttgggccatgggtcctctggcagttggttgaagcccacggacccctttctagaataatattttaaataaatgtatcaaataaaactcacagaattacaaaggaatccagtcatattgaaatgaaatattaaaatctcaaaaagtagcaaatatgtgatatcaaatataagtgcttcttttgggatattttaaaacacaagttctcatggtgcgccacctaaatgccataatttcaaagtggtgatcaatgtaaacaatattttgagagatctgtgacaactgtaatgtggtctgtgtctgtgatttacagcgatgacagtctctggtcctgctaacactgctctcggtatttaccttgccttttcttttctttccttttggaaggaaaggatatgctgtttcaggtgcagattagtgaaaatatrgaagtaatgttttctccattcaagctgatgagacccctgaatgaagaactattcacttaaaagaacacagaactatttcggtcagttcaagtagaagcctctagaatgttattgtgtcaaggtgcgttttgccatgttagactctccctttattttctacaaaatatttgttcatagcagattatatttttattgaaaacaatgcatatttgaaagaaatgctcttacactcagaaacactgtccttggaagacaaagtcctcacaaggaagccaagaaatccacaagtgttgtttgagaaacgtcaactgtgcttcggctgttggcacacatctcctgtgggataagttcaggccttaaatgtatgcaggacaagaggcttaaaagtgagcatgtgcagagaacaaaacctatttaggcaggaaaataagataattggaactatatattttaatgctattttacagaagtatattataatatattctttaaatgcatgaaatgtgagaaattgaacaatgaaaatatmtatcactaatataactgcaaatatttagtgcttgcctttaattttttgtgaaaattagagatctgaacattttgttagcacagtaagtatatttaatatacctattatcaaattataactgatagatccagtggatggaaagctatggaagtaaacacacctaatatagaaagaaatactacttatggtataggagatatatatatataattgttacagtaggtagctagtcaggcctgagcatggcaggagagggctcctccaccaccaggaatgtcagrcaaccatcagatgatggtcaggcagttgttaactgtctttctaaaataatttgttgcagccagtgccagggaaagcagtctysctatcaatagaagaaacctcaaactggggatcagcagcttccagataagatctcaggagctgggtaagtgggctcaagcttgtgcattaagatgcaaaatgacagagtttaattggtatatgaccttctagggacatttgactggcaagggaagaatgcttgaagtgagcatgtgtacaactccagtaaacaaactgwgctggyaggccactgagcatgtggacagcccatcccaagggaagaatcaggggagaaaggatgcaagaccccagaagtatgccaacacataaaaccccaagtgaaaaagtcaaaccacgcacttgtatttcaagttggccacttggccctcttccaagtgtactttccttccttcttccctgctctaaagctttgtaataaactttcaatcccgctcgaaagcttgctagtctctccttctgcctctcagctgaattctttcttctgaggaggcaagaatggaggttgctgcagacccatatggatttgctgctggtaacatcattatctctgagttgaagcagcatgatttttactttcttctctttcttatattttctacatgcatttattttataagttaaaggctccactccttcattaaaaaaaggtaaaattattttttgataattgaaaattagtcagttcaaagtaatgtggctggtaatacacatcgcatttttgcagtctcttgcaaaacagaagctattctgactcccttgtagctcactaattttcaagaatttaataaaaatctgctgcctgaaagagccgctcctgtcatcttgagaaggctggggtctttgcaccccctgagttcagtgattgcttccccaaaaacacatttcacaagaggatagactttatcacatgggttcagccgggctgtgtcatagagacccatcccaactcaccccrtgttattaccagtgaactactgagatgctaaatctttggcttcttggtttgagttgtggaaggacagataaacaaaagtgcctgctaagacccagatatctggaggaattctgtggatgccctagagcaaggttgacgtgcygtgtctgtcaagggcaagagagtaaacatttcagctgcaggcctttcagcctctgtcataaccactgaactctgcctttgttgtgtgaaagcagcaagcctggtggagccccacaaaatcggttatctactgccagtagcaaacctccccaaaacttagtgatgagagcaatgaatattgaaaccctggttatctgaccaagtcagtattggacaaatttgcacagagatcttttggtgatttgcagaagctggtgcaggcagacttcttattttcatcaatatctagctccatcaggactgaaaactgcagactagctactctagacttctggtggctgagaacaagcctgcaggatggcttgacagctctgggtaaactgtctgagaacatcttcagcttgggcagaacagccttccaggaatgaagatgtcacagagagcagggtgctggagagggctttactctgaagtaggggcggccaatatttgatcccatcattcagaaatccctcttctacccacaggcctggcagtgactgaggctccatctagctctgggagaagaggaagggagtggcttcccactgggggtgcctcagacctcgcttacctccacccatagctggtccacccaccatgggtgctcaaaagtagaaggaaggatggggaaacattcagtccacgtccaaatcatcgagaagacttttcagattgggaataattccgaagccagatcccagcaaggcactgccaaaaaatggctctctggggtttattttcctttggaaaggacttttgggacatacggcaagagggagctttctgggtcccttaaagggccctgcaggaaagaagggcagtgggacgcattgtctgttctccatagacaatagggcagactgcttcctccttgggactggtagttacgtttatgtttctgacaaccagctggcyactgaagaagcgtggagccaacagctgcaagggataattttggcagcatcacccacggtgcaaatttaaaactccagctggttctactgcaagcagaataaacacaaacagctgataataagtaaattcagaacttgaaatatgccagagacactttatagccctctgttttctcctagtgtgcactctttgtgctctcatcctgtggtcttgagcgtgaacatcattttcatattttatcttgctatctaaaagttttatttatttgggaaataagtaggctctgaatctggggggaaaatagttgtcaagaaccaaatatttggcttcctgtttcccagaaagtgtttgctgctgtttccatttctggcccaacatttttccagagttgaaaatgtcatttaaatgagtcagtccccggggctcagaagcaatgataaagatgtggacatggccccagaacgttggagcactgctgcctctggtggactgaagggcagctggcattaaaaacaggatgttcctgctgtgatacaggcagaggaagaagaagggtatgcaaaccaaggcagtcccctgcagccttgcccctcagtgtgtggtcccagaccagcagcatcactgcacctggtagcttgttagaaatgcacaacctctgaccccaccccgacctcctgcatcagaatctgcctgttgacaaggtcttggggaaaagggtattggggaatttgctgcacacacactccgctgggcaacccaacggcctcaatgagaccagcctgcacaggattctacctgccttcccctaccttccaccacagtttcaatgatcctcttaggagtatgaaaaaggagtggccaagattgtcagcatcagcttttatcttctctctgtgaacacatatatcacttaccaacttgtcagaaaggcagattcctgggccctaattcaaacttcctgaatcagaaactctggggattgggcccagccctgtgggttttagcaagctctccagggcattctgatgcacaggtttgagaaacaactggctcattgtatgtgaggcatgaatgaagtggcctccsaggctctgctcacatcctcactacccycatctcttcctcctgggctttccaccttgggtcctggctctaccaactcttccttggatcctgaatctacagtttctacctgcatgggcacaagtatcacaaaccttatcctgatgggatagtggaactccaccttcaagccaagataaatgtaatttgtaaaatttttgcacagacaggaggtgcagaggacattgttatcatgaagctgaaagtcatgcaataggatggaaaggaggaagactgaaggaatccaagatgctaaaagtattaagaattcatagcccaacctcatactgttgggctatgagtatgtcaacctcatactgttttctgcaaagaaacagagataataagtgctttaggttttgcaggccacttggtctgtgctgctgtaacaggagaccagccgcagaccatatataaacgaatggatgtggctgtggtccaataaaactttgtttacagactttgaaattttcataattttacatgccrtgaaatatttttcttcttttgatttttttctgaccattaaaaaaatgcaaaaaagccatttttagctcacgmaccatacagaaacaggcagtgggccagagtgggcctgcaggccatagttttccaaaccctgccctacaaacattaataaagaaaaaaacttagaagatgcaggacttgcttatgaaaacttcctctacttcaaaaaagatatatatagagaagaaaaaaacccaaccactaagaagcattgtattcaaatgcaagagacaatggtgggaaragccctctttgtcttgtttctgtccattgtggatgtttcttgtcactgttgtggaattatggtgagtgaaagagagggcgttaagaaggaagagaagagaaaggaaaagcaaaatacagtgagtatttaggaagttgtagaaggcaaagtaaggactgaaatgaccacaagcttcatattacaaggagagagaaaaatgtggttctgttctttcagttaaagagaaaaacgcttccaccttactccccaatagaaccacagatctcagagttggcttggctgagaccaggcctattggattcttggcttccggtatcatgcagcttctggtaagtcaatgtgtttgacattcctccacactctagactccccagctcccaaggaaggaacaccacctttcatcttccaggtcatttcattctgctatgaaggtgtttccatctcaaaaattggtagttcatataaagcgggcaaatgggcgccatagtcaccaccttacagacactgcactcatttacacaccattttgcatacatttgttctgactgctcttcagtgagaacttcattacttttatattacagaattgttatacttttaaaaaactttaaatatcggtcatttgtagtgagcagcttagtattttccgtgatggagtgtaatagttttccattgctgctgtggttaaaaacaacacaaacgtatcatcttagagctctggaggtaagaagtccaaaattggggcaccatcagggctgctctccttctggagaatataggggaggatcctttccttatctgttccagagatcacctttatttcttgacctgaggctcctagctccatcttcaaagccaagagcatacacagcatcttctcacctctctctctgacctctgcttctgtgtcacatctctaacccttctgccttgatattccatcttttaaggaccctgtgattgcattgggccaaccaggctgagtcatagaggcaaaagccaataaaggattaataacaaaaccaaagggaaaaaaatcctttgacagaattgccctagcatgtctggtttagcacgtgagcaaatacagcatttgggctgcgtcttatgaaatcttaatggcttgtgaatgaaatgagttaaaactatcaaccatctctcgctgaactgagcttagtgttcccacttaagaaattcatttctgaattttattaaatttttaaaatctcactaaaactatagtcctgtctgctgatttctagggtagatggccctgatgatgtaataaatcctcttcatcaagaatgtcttggtcatttgtatttctggcactgtagtcctcacagtagagcatcggtcctttgtcatctaaacaaaactcacttggatttagcagcaagaactttaaggactctgattgtcggggctgtgatcctaagcttgaaaggatcagtttattagcaatatctcacactctttttttttttttcatgttgagcagtagaatataagagatgataatgaggaaatggaaattaaagacgtgtgcgtgtgccactccctgcagattcggtttataccatgsctccaggagtcacagagcgttggacacagcaggatgrgtggtctgatcccagctatttgcagcccacacagtgatcagggrattctttattggtcacttttttttctttctctctaccaattaatgttccttgttcttgatccacccctttgagccaaacaaccattgaaaagatggaaacatcattttccatgaaagtacacatcttgaaccctgttataacctgaaacagaaaatgtaaaaagctgctgtcagttcctccttcagtttcagagtgcacacaaagccctactgtcaaacttaaacaatgtttatagtgaaaagaaatgattagaagcaggaaggcaccacagggagtaacaatccttcatgtttggagggattttatttgctttagcaatctgatggaaggaaaagaaaattcccattatcaggaacatcgcccatcggagtgcctagtaataaaagtgtcagcaccaataatgttattaaaagaaaacactttctaggttctgccacctacgtgttgtatccctttaaaaggaagcacagtggatagcacagtgcctgtagaggctgagctggacgtggatttgtttgccttgaagctttgtatcaacagtatgggcacctcagctctgaattttctgataaaatgaggtgtgcacgtagagttcatggcaatagtgaccttcagactcattcttcttcagatccttctttttagctagatctacaatggcattccttttcccaggaatgcgattcccaggctggccaaactcatgttgccatgtattamcccccaaggcaaatagcaaagtttcctttgaagacaataaatacatagtccatgggctggacaactggaggtgttttggaaagttctttttattttcagcaagatatggagactcactttccttggatgagtataaaacatgaaagcagttattctgtagatgtctaatggaaagctctagaatctctaccacatttcttggtgccagcatttgcattttttggctatttattggaacttggttgcatgtcattttttgttcatccatgccattttctgactatttactttgtgctaggtgccatattaaggacattaagcacattacatggaatcctcacaacaaattatttttattatccctattttactgaagatgaaattaatttaggaacagtagcctggccaaggtcatggggcagcagtgaagccagaattcaactgcagggctgtgtaactctgacatccagcatgtaaccacatctcaatccctgaaatgatttaagcaaaaggaagcaaatgagaagaaatgtgtgctctttatagttttatgcatcatgtgtgggtttgcctctgagatgtgtcaaggccctgttgaaacagtcttgtgagatgttgcttccgaaagacgtagaagcacagctgtgtgttgataatagtcccaaactggtaacacttgggtgttcatcagcaggtaaattgatacacaattgttagtgaagctgctcaggggaattctaggagcaattaagagtgaacgcacatcctatgatgtgcaaatctcaaaaacattgcacagcataaaagcagctttacataaaacagtatattctgtctgatttgaattatatgacgtcattaaacaggctaaataatccatgatggggggaaatcagaacagtggttgcctctagctggggagaaggtaaaattgagaagggggatggggaaacttcctagggtgatggtccgggtccttatcttgacagggtgttgattacacagatgtctgcatttgtcaaaactcatggaatgacacacttaaaatttgtacatttaattgtgtgtaaatcttatctcaaaagaaaaacataacaaatatcggcctctagttaatgacatgggttgacatgtttagagggatgtgtactgatgcctacaacttactcaaatgcatcacaaataagctgtattgatggctgggtggatggaaagttgtgacagaagtcaagtgacatattaaaagtgtagaatctagatggtgttcgaatctaagcggtaraattctacctaggtagaatccacacagctgttcaccgtttgtaaatttttctagcaaaatattaggaaaaagactttgcttatggagtccaggctcttttctctgtgaagctgcatttccccaaatgtcggggagacccacctgccctgttaaggaccagcggtgatctcaatctgacactgccacagtgaatgccacaggtgttctgtgccagtcagtgattcacccttgtcacagttggggaatagtgaaaggaagccttgaggggagcagtggaggtggccacggcccacctgcccagcagactgatgcccaccactatcctctctggagacaagtttggaataagagcatgattctgaggagtcagacagacttcagtttcattcctggttctgacagctgcttgctttgtgaccttaagcaatttgttgaaatacatctgagcttctatttatccatctgtgaaatgggcacaacgcatagtggctggcacaggatggaggacggtccttagcacaatgctaggcccacagaatatgctcaagcacatttcctagaaactgaagggcctgtacaggccaaaaggcctgtagcccaaaagcrgggtttgactgtggccatctctaagaaagaaatgtagtcagatgattcaaaggaaaatgggtaaaagaaaaaaaccaaagctgcaagtttaaaaagtcartgctcaggaatgatgagaggaaagtggtcttggaacacacaggggtgaccactccttcatgatgtgtgtgtgttttgatagaggtcggtataattagagatattcatgatccccaaaggcctccttatggggtaggggcttaaagacattttccctactcttggcccttccccactcaccctccctctgaccccagggcccataaagctactggagccttgtgtttggggctcagtcaatagtgaaaggaccccaacaacctgaccctgtattggtgcactacagttccatgggcaaagagaaacaagaggggtcagcattttctctggttgagactattgcttgtaccatcgcaataagtgattaaaggctttaccagtactttcattttggctcattgttgctttaattggctactccaacacctgacagctcagctctctctctctcctgctcagctgaactcctgatactcaacagaggaattaagatgcaatagtaaaatatacataaaatttaagacagctattctgcagaagactctccagagacaatgaaaagaccagccacagactggaagaaaatatttgtgaaatatatacagtctcagatggggataccatctgagaaatacatcgttaggcaatgtcattgtgtgaacatcatagagtacttacacaagcatggatggcatagcctactacacacctaggctatgtggtatggcctattgctcctaagttacgaacctgtacagcatgttactctactgawcagtagaggcaattgtaacacaatggtaagtattcatatrtcttaacatctgaacatagaaaaagtatagtaaaaatmcagtattataatcttatgggatcatcttcatatacatggtttgtcattgattgaaatgtcattatgcagtgcatgactttatctgatgaagggctaatatccaaaatatacaaagaaaccctaaaactcaacaataaaaaaaacccatataaaaatgggccaaggatttaaatgaacacctctccaaaaaagaggcacaggtggcaaagaagtattgaagagatgctcaatagcacatgtmattagggaattgcaaattaaaacagcaatgagatatcactacatacctaatagaatggctaaaatccagaacactgacaattccaaatgttggcaaggttgtagagcagcaggaactcattcattgctggtgggaatgcaaaatgataaacgctttggaagatggtctggcagtttcctacaaatctaaacatactcttaccatccagaaattgcactcttaggtatttactcaaatgagtagaaaaattatatccataaaaacatctgcacatgaatatttatagcagctttactcataattgccgaattttggaagcaaccaagatgtcctttgctaggtgaatggataaataaacagtgctctattcagacaatgcaatattattcagcacaaaaaagaaatgagctatcaaaccatgaaaatgtttagaagaaacctaaatgcatattattaagtgaaagaagccaatctgaaaaggctacatattctatgattccaactatatgacactctagaaaaggtaaaactatggagacagtgaaaagatcatggtttccaggagttgggagggaagaagaggcagagcacagaggatttttagggcagagaaacgattctgcatgacactgtgacagtggaacacatcattagtcattacatgtttgtcaaaatccatgaaatgtacaacagtaagaataaaccctaatgtaaactttgggctttagttaataataatatgtcaatattagctcatcaagtttaacaaatgtaccgcaccaacatgagggaaaccaaattatttctcccaaaatattgagggttgttcagctaaaaatgccacaagcacagggaagcacttggcctcggccgctgtttggctgacggcagcacacaagcccttccttactgaagacagcactcgcttcccagcccagagagggcatcagcaggcacaagagacrtctggaagggggctytactatcttcccagatcttcctgccttttaaaagacaagaactgctctcctctttgttttgtcactacataggatttatggctctttgctgaaatactatttaaccaaggacccctaagccattgccttcagaaatacttttggactggccgggcacggtggctcgcgcctgtaatcccagyactttgggaggcagaggcgggctgatcacgaggtcaggagatcgagaccatcctggctaacacaatgaaaccccgtctctattaaaaacacagaaaattagccgggcgtggtggcgggygcctgtagtcccagctactcgggaggctgacgcaggagaatggcgtgaacccaggaggcagaggttgcagtgagccaagactgygccactgcactccagcctgggcgacagagcragactccgtctcaaaaaaaaaaaaagaaagaaagaaatacttttggactaaggcttcccctgtgtgatgggtactacataaattaataaacttctgcttgtttttcttatgttaatttgacatctgttttcaggagagtttctcacctaataacgtaaaaaggaaaagaaaggaaattatgttttctctcccacaactgcaagttgttgaaacatcttgcgggatgggattggaggaggcatatatgggaattttctgtactttctacctaattcatctgtagacctaacgtttctcaaaaatgaaattataataatttaaaaaggatacttgaataaccccaaagaaaacaggaaaagagaactgaaaggaagggaaggaggaggaggtggargaggaaggtaggaaaggtagaaaaagaaccgaataacaggcctaaccccaataaatgctgattctatctacgaatacttctaaaacaggccaaacaaatctgtggtgatagacagcagaacagtgtttgtctatggggtggaacttgattgcaaggagcataggaaacttactaggggtgatggatagttacacatcttgaccaaagtgatggttacaatggtatatacatttatcaaaatgcattaaattgtacagttgggattcgtacctttctctgcatataaatcttacttcaactttttaaaaaggattaaaaatgcttccttggtgagcgggacttctgtgtgaggcctgtaggcacagcagccatgctgtaggcacgaggatgcaagccacatgctcgctggtgcggaggaccaaaagaagaaatgcagccgaaagcagctgcagcagccctggctttcccacctctgaatttcttgtcatgagagaaaaataagcattatgttaaccaggctttaatatgcacaggcaaatttactgctaaatattataagtttattaacatatttagatataagcaggaccagaataacatacctagaacagatactgattttcttgcattcatgtaataatcatttaaaattcatatctgctttaygcgaatagatataaacatagagctaagtgctcctacaagatgaatttttagtaggctaaacagcacagctaaagtctcttatgaacctcatttccccaacatatctttcatctctctctctttttggtttgtttcttgtttgttaagctaatgggtgtattaattccatcccaatgtgactccaaattttgaaattataaggcccaaatgaattattttttctttgctcaaataggatacatacctcatctgaagacaattcaacatataacaaaagttaatgaacggcatttcactgcagtcacaaacccattaagcatcaaatccaggcgctgtgaacatcaaagaagtcaaactgggcaactggtctctcctgtgcaatgggaaaacctcctaatgaagggccatgactttattgttgacaccgattccacttcaaacttggcgtctgcaatctctgccagaagattttccgaggttgtttttaagtcataaagttaaataacatgaaatgttgtctccatagtaaaagatgctttcctaaaactgaagggcctctagccaaaagacctacagccaaaaagcagggtttggctgtggccatctctaagaaagaaatgtagtcagatgattcaaaggaaaatgggtaaacaaaaaaaaamaaagctgcaagtttaaaaagtcaatactcaggattgatgaaaggaaagtggccttggaacacacagaggtgaccgctccttcatgatgtgtgtgtgttttgatggaggccagtataattagggatattcatgatccctgtggtgctttggtgggaggtggaggaggacagtcagagacagatgtcttcccagtctccagtgctgagcagaggatttggtaaagcaaccggcagtggataaagtgtagaaagtacaaaactaactccagcccacaatagtcattcactttttgataccactgaaatgacgaagtcaaaagcaatcatgtttcccacttctagaaaaatattcaggtcacaatttgtaaatcttttgtttaatttataacaatgattagcagcatttaaaaatcaactttattgaggtttaatttgcatacaataaaatgtacccattttctgtgtggtctaaggagttttgacaaatgcaaacgcccatgtaaccaacacccaatcaagacacaagtatttccttcattccacgaaggtccctcaaggtcttttgctcccaaccctcacccccactctcacataaccattgaactaccatccatcactgcggattagttttacctcttctagaatgtcatagaaatggaatcakgcagtgtccagctaattttgttcctttgtgtctggctttcttgctcattgtgtatttcagacgcctgctccttttccttgataagggatatcccattgtgtgcatgacccacagtcttcacccagctacctaatgatgaatgtctgggttctttccagatcgaagctgtataaataaaccttgtgaatatctatggccaagacaatgtagatcatggcttcattcccttaaataaatatctaagagcagaattgtcaggttgtacgttaagtgtatgtttaactttctaagaaagaaaccatctgtttttaaagaagttataccgtttacatttctattaccgtgtgcaagagttccagttgggaagtagcctctgagcaggtcgggaccatggggcgatttgcacattcccacttcccttcctctcctactgcattcaaacacattgctctcaccaaggcagactggggatagccacgtggggggactgtgagggtgcgttccctgggatctgccctcagagcaggcaaggcaggtctcaggatgcacaatctttctgatcagagggcttttgagtagttctaccccagtgtgtgtgtgcgtgtgtgtgtgtgtgtgtgtgtgtgtktttggggggtacatacacaagcccaagtaagtttgtttgaacatattattaaaaatacccatattgcttaacactctgcttttcctatctgaaactggctgagaggcccactcatctccccactctttgctggttgacactttttcaattgcagttcctattcatgtctaatgggaggcagggaagcctagtgattaagagtgagagtgtaagatttcattcatctaattcaccactcatcttctctctgcctcaatttccttaactataaaatggagatattaatactacctatttctcaatagcaaatactattttcccatttggtacatagtaaaaggtcagtgatttttttcctcttcattgctttaataacatatgtggtataaaataacatatccggggtcttgtatttaaaaaatcttttgaggcttgactgtgagcaaggcacaatacagatgtacccgttgctcttgagtgccttacagtctctcaggaagacacaagtcatgtagccactgacctatcatgcaaggaataaagtgataaaagccagcagaaaactcctgagagagaaatccatccccatggatacagctcctcctggggaaatggaggcatgacctctagaggcagggaggactgtctgcactgagtttagaggacagctgtgtgctggaggctgccagtgctcaacaaatcgtgcttgcacttttcactgtgctcaggtgaagtacacctgccagggcctgcatctgtacctgaaggtttccccatcctaagtgtggaaggccactttgcccacatgtgtggtcatctggaagtgctgggaattacccgccaactccacccagggcagccctctactcattaccaatgggtatctacacaccactcccttggctttcagatgtgatgaccctggcatgttttgcaccatttcccaggatttctacagtgatgtcaccacttgatgccattaccactgttccctgtgcttcccagtgaaccacaggatggtgagtccttctctcaggctctgtttctgggagctggagtgcaaagagccccagaccagctggatatggcggccacaattcagagcagcaatagtgaagacttgagtgcaggccgtgccatgagctggagacaggggacaggtggcagatggtggaggaagaggccctggacagcatcgaggctcacacaggcccaccaggagggtgtgctagcccaccctacctggtacactgctccaacccccagctcagtcatgcattccacatgtgtttactgagcaccacagtatgccaggccctggtctagaggcctagggtatatcagaaaccaaaagacaaaaaagtgcccctgttggctcttacattctagtaaataaatacagatactaaataatcaatcatagtgtacaaacagaaatcataaaccagggtggaaggtgattggtgttttggaaaaacagtagagcagagcaaggatcgctgggagtgctggagagaaggcccagccttatagcccactgggagaagataggtacaaagtgaggaaggaaagaaccatctaaaattgtttccaaaataagagagtcaagacaatgaacaagaaggtatactaacaagaataagagaagatcactcaagaccaaatgaagcagcggttctccaagggcggttcctggaccagcagcatcagcagaaatgcagtcttgggctccaccccagatcggccaagtcagaagctctgagggaggggttccgttttaaggagccctgcaggaggttccagaggattcagacacatgctcaggttcaaatacagctagaaggaaatgccctcctgtgctgggaagagctcacctagtgcaggcgggaccagaaaggaaccacacctgcaacctgaagcgaaacctcagaactcaacagagaataagaaaattgccaaagcactcggggaaaaatggaaaagaaaaagaaggccgggcgaatcccagcactttgggaggccgaggtgggtggatcatgaggtcaggagttcgagaccagcctgaccaatgtggtgaaaccccgtctctactaaaaatacaaaaaaaaattagtcgggcatggtggcgtgtgcctgtaatcccagctactcaggagggctgaggcaggagaatcgcttcaacccgggagacggaggttgcagtgagccgagatcacaccactgcactccagcctgggtgacagagcgagactctatctcaaaaaaaaaaaaaaaaaaaaaggaaaaaagaaagaaatggtccatgaaagaaaacacattatttgacatcagccttctcatcagtaacaacgtatgcaagaaagcaaaggctggatatctccagagttctacaggacaacagtttagagcctagaaatctatgtctaggtgaggcatcattcaacttgcggaagggaaaggcatttctggtcatgcaagcatgaccttctcagaaaaagacacaactcaaaacaaaacactcccgtgataactgaatccaacagtactgggaatcagaggtgaagatgagaaaaaatcaacaaaaactcatggcatccaagtaggttttggttgtaaaaatgtataacaataaaaaaataaaattcagatgcaatccaggtgggcagtggtgtgggaatctgggtaacctgagaggacaggaaatagaaataacagattgctgggtattttggggaatagagggaggagatagctattaattaacacaagacattaatagaagatataggctttagtatgtgaggtgaaaaagtaagactatttgaagaatacaaatagtctatatcaattccaaaatattaagggaaaaagtagatcaaagaaaacttaatcaatctaataattgacgagagagaggctagaaatcccaatgaatcattataaatggaacatataaaataagtcagtacaaatttattagtaaccttaatgaatgtgaatagattgaattctcccattaaaagacaaagacttttgattgaataaaagaaaaaaaaagtgaaatccagctttgttgtttacaagagacaaacatgaagtgtcaccagaargctgaatttagggaaaaaataccagatattcatcagatgcagcagaatgaatcgggtatatcagttgtaaagtcatatataatataatttgaagtgaaaaggttcaaaaaggtatattttttattggtgaaggaygaaatctgccaaacacatattagtcccttcaccacgcggctgtaaatagaagacaaaactggtggaaatccgaggagaagctgacgaagccacagccatgggggatgagggcctggatggaggccagggcatgaggacttgcaggacggatgagaaggaaagcagacaagggcgtgacaccccgacaaacacacgygggacaggaggcagcgatttcaacaatgaagtaaaacatttgtgatataacgtttttgggaaagccagaccctggagaaagaaggtagacgtcccaattattttcttccacctcacaaatttcattatttcatgatacttgaacacagtaggagccccacagagacaggtcacaggcttggcttcagaycttacaatatgaactatgtggacaggcgtaaggccagtggcagaggcaagcaggctttgcaggaaggtgacaggagggtgctgggcctcaccaaggccagcagaacgaagtggcctgaaattcgcaccggcacgccctgagaaactcagcccttccttctcaggctccaagcccagctttgtgagacctgattgtgaccaccacacctgggacattcctctacccccttttgtgttctctctctctcttctctccctcatctctccttccttctctttcccatttattcattccctccctaccattcattccttcccattcattcccttctttcctccctccctccctccctctccctccctcctccctctccctcccttcctccctctccctcccttcctcccttcctcttttcctcccttccatcctttcttccactcagttgaattctatraaccaattttaaccacaagagaacatcatcatccaagttaatcacgacaaacctcaaatagaacccaactaccagaactcagagagggacaaccgctcatggagagtttggtggtggttctcctggggactcaggagagggcctgtgcctgagctgcatgctgagcacccttaagtcaatcacagttccggaaaaatgattgcacttgatctataccttttactctctctgcctctttcttcactttttcactgttgagctgttcataatttcctctgaaaagggagagttaggaggcattcagaggatctgaagggtaaacccattagtcattctgtttctaagcacctgtaatgtcaaatataattcagggaaaggctgactccgacttctctggttttcaagtttatcatctctgctctctgtatctcctcttgctgaatatacacaagagtcagctgagaacttgataggctcactcaatgcatgttcaatcccacagaaggtacatagtacatgtctgagtctctcattgtaatctgcattttgtctgatgatagcaacacaaatgtactctgcattgtgcaatagatatgtgtgcaaattaatttttcttggcaaattatttgtttgcgaatgatttacctagcatttaagaaattttagtgagatagcaaaagtcaccaaaaaatgtaaccatcacaagttggtgttttctttcataggcttttcctaaattgagaaacactggcctcaggtgttccagtacgacacagaaggatgttagaactgtgtgtgcttgtgggtgtgtgtcttgtgggtgtgtgttgtgtgtgtttgtggatgcatatctctgtgtcatgcatgtgtgtgtttatgtgtgtgggtgtgtgtgttgggggaacagccatggttgttcatatcgaggaataayttccaagtgtatgttgttaatgaatagacttctaacaggatcagctgcatttaaccctaaataatggatatttattgcaagtgtcctgtaccattagcataacagagcagaaccctttgttcttcttaagtcctgtgcctttgccacagccttttgcacaatcttaaaagcaggctgactcagaattgaccaccatctgctgttcctgacttggaatcaccatgagatttgtgcagccaaacaaccagcgatctgatctgcctgtccaattagttaaataaactgaaagggctttgctgacaaagtagtgataaatgctccaatgataattatagaacagtgttttcacatcgcatccattggacatgtttaattctgcgccaggcatcacccatgtaatttacaagatgcagagaattaaagagtgatgagggggccatggatgagtggactcagctgccatggacactgggcgcagtgcagcccagccctctgtattccatgtccccaagggcagcacgctgaggggcagggtacacatttgctgaggtaatgaaggaaggcagagcccagcgccccctgtcgcctccagcaggtgcaggtgcagaaactcagccacaaggtaccttctttttagcaactctttgaaaggggagatggataaatgtaatgaccttgaaagcaagttctgccaggtatttcgagttgtcgtgaaatatattaaaacaagttcacaatcaatgkgtttaagagtttattaggataggcacataacagaaagctcaaaggacaacaaagctgcaccttcctaaaggctgaccctcaaagcaccattttgttagaactcaraggagaagctcgatctctgagccttccctcctcacagtttgggaaacatgcacaggatgaaggtaaatcctgcataraaatcttgtaattccagaattagtcaaacaaatttgaaatacacacatttaaaaatacttacattctcatttagcrttcatgaagtgattactgacatttacaattacatctgacatcacagagcaagcctttgcagggatctaattcaagcttaagccaaatctatgcaaagaacttcagctcagaggaatagtgggcaaaatctgctgaaaagaactgcttgccaccttgcagataagagcaacagcacaataaagggattccagagcttctacctaaaatagaagggcattatctacaagaacagaccaaaacacaatttatttttaaacaagcccttcagtgagtatttgtctcaggaatctagtatgaaaatagtgtctttgattagtgaatatatggagaattcggattatcatctctatttttagttgagaaaatgcacaaaccatatagatttaaaccatgggttttgcagccgaagtagagacagatgttttctgggatcatatctcagattcccaagctaaagctattgttcaaggtgayggaaatatgtagggggcattaaaccattttgcagctgctagaaagctgtgttttcctgttttcctgatttagacaatggagaagctaagaagagaaataataggaaaggctttcctatgttagttttaaaaagactgtgttatttttaattcaatttttttttgtcaaatctcatctctgttctcctagttttcacagaaatatttacaggaataaaggttgaaacaaaagtacctaatgatcatctccatccatcgaaagattgctcagggataagacactcaaacaagggcttgtgatgaggatggaaaagacaaagcaacttgaagagaaaaaaaaattcttttaaactcagttcatcctgcaaaatggacataacacatgcatataaaggtttgactttttaattccacttttttgcctgatcgcagggaagatggcatgtggctggcccttcctgaagccttgctcctccaccactggctaacagacaggcctccaggtggccttgcaaggccgacagtgaccgcagcccacttccccacatccttaatcagagcctcatgcagttcatccccacattacccaaacataacgtcgtagtgctacacgtagatgtgttgcatcatgatgctatggcaatgacgatgacgcttaggtgtgtgggccaccgaaggcagagaccagatgtggttggtcttgcctggaagccaagctgttgagcaggggtggagtccctctacagaggatgctcaccaagttctaatgcattgtcgataactgtcctgccctggtttttctgcattcctcagattatctgtgggaattgtcctcctgcatcctttctcaaatgacaaagaagaaagaaagagcagtgatggcacctgaaattcaggaatgagtaggcatggcgagctgggtgtgtgagatgttctctctttacattgtctgctttgagatgtgggatgaggggagggagagagttggtcctgaatatattcagttttttccaagagtctcccagaattattgacctatttggacaacaaatcttcattgtcttggtgtccatctccaagtgaaaacttcccccgtccccatggccctggcttgttctgctgctgaacaggtcacctgggcagaaacactgtgtctagcgagaagttagcaggtggcagggtgcacctctccccatactgtgacccttggattccccactgtgccacgcccgagcaagctggggcccctcaggacaaggacgatttgttaatggcctcttggccggtgggcatttgtttacccactactgtagccccaagatcccccaaacaagaatttccatgcttcaaagtaacagcaaaaataaacaggagaataaagcacgtgtttgagcccagtggtttccatcagakgcacaacctgagctgtctggttgggttgctggctctccccccgtggtgggagtggtgtgcaagagaaagcaccacccagcaggagagggacccagcctgccagggaaggttttgaggaactggattctttatcacccatttctccccttgtgggttccacagaggggttccatgacctccctgttgttgagaacagggctgcattcagagaacagacgatgggcctgggctgtgagagcaatcagaacactgtgaaaataggagggctcgttggatcccaggaatcatacacagactgcgttggggctgtgggaagccaaggacagaaatgtctccttcaccccaaatgataagggcaaggattttcaaggcccagagggagaaatgttgcatttgcatttatttaagtgctgatgttggtcagcagcgcatccagccatgtctttagaatcctctgaatggccagacagatggctgctctccacaccacagactgcccagcttcacacatcacctagagtctcgtggccaaggaagttttgccaaatggacacagcctttgtctcccttaagtgttaaacaccagagttccaactgaaaactggagaccatgagatgactttaaaaagaagttccaaatgccccatcgagccgcacaaaacctccatctttcctttcacttcccctgcccctttagttttctattaaaaacaatctgaaccatagcatctatatttcaaaactggcaasagtattaaccctgcaccttgtggcccttcaaccrctccagagtgtcacctcagagaccgatgcattgctaaggcaaaaccagaaacacccyttctctgaggctttggggccttggagggagacacatttcctctgtctgttctcctgcacagtggtggtaaaaagcccacaggagacatgaggcctcccagagatactcaggtaacttctagtgactctgaccatcggtgacccccaggaatgtgttccagtgccccaggcagaatggtgccgtgtctstgtgtgtgtgtgtgtgtgtgtgtgtgtgagagagagagagagagagaaagagtgcacactatcgactacattatcatagggagaaatatttgcaaatgtaacttttaaaatgaggatataatttaaatggctttgagcagtttttgctgtaaaaatgattttagttagtcatctctttccctcttccttccctccttacccccaattttaaggaaaagagacagagaacaaaagttccttaagcaaactgcctgactagctccctacttggtgtgtgcgccacccacacttcaggatttaaaatctcaggatgctgcatcaactgtggactatgaactgtgctaaaatgctttaaaatgacaactttcaaaacacagtgcatcatctcccgttcacacatcctttaggaaacagcctgatggaactttctgcagggcttcctctgtctgagctcggagcactggcattccgggcaggatgaagtggaggcggggccacaggcagggtgtctgaggcctgccctggctcaaagacaggttgtccttgaatttgtttccttgttagtgttgatcacatccgtagtcaagtgtgtggtaacctcagtacatttggatgaattaattcaagtatctgtgaacaaatccctggcctctctcgccctagccccgtagattatgtgacttcacaaacacctgtaatgcacttcaagcaacttttctcatatttttcaagcttcctttgcaaataaacccaaggctattagaaatgtaagaactaaagaggcacttcctgcctccttgccacctaagaggttaattgcacttctggccattctggaggatgtcaacagtatcacatttagcaagacttgtgctggcgaaatggaggaatgcaaatgtaaagaaatgtttccagtccgaacatgttccctttgaccaaaaaaccagatcttcttacctaattgaataattaattgatttagttttcatcctaggaagagaaacaaatcatttcaatcctaatcagcatgagcaactcaccttttcctcttagatggtggaagtgagcagagaagatattcaggggagccccttagccccrgcctcctcacaccctgatccggaattggtcacattggaatttgaaaagggagggggagtaacaatcattatagagtcacgaaatccccaccgtggcacgccaacacacagcttccacttcaggaacatcaaacacccgtagaaaatacctgcatgttccaaggggcctttaaggaggagacttacaattgtttgctaagattccagtccagtctttcaaaaaaatgtgggtgcccctttggaatggggagttcaaagctctgaggatggtggctggtgwctctagtgtctctagggccmcctcactttcagcagtctgtcccaggtgtcggactatgggaaacaaaacagacagcgttggaagccatggcgcctctgtgcctgcacgtccccaccttgggagagagccccacgtgcggccgtgctgcagatgggcagtatgctctaagggggcccgagtgcctggcgtggggggaggttgaggggtcagctgcaaggaccagggtgtgtctgcccacaggaaacctgggcytgctcttgctgccacctctttgtactgtagtcagtgcccccatgcctgcccatcccctcccccggtcactcagggccccctttacctgtactggttctccatggccctgctctcagctcgctctggaacccaggagtaactgtctgccgcattctggggcttcttctccttcttctcctccctcttcgctctccgcttgcgatagaccagtagccccagagccagggccagcaggagtaggatggccaccacggtgcctaggatgtagaataaaagcagcttttgcccgtcagtgccatygttgttttgtgyggccacggaggagtccccacctgcaggctcctgggggccagaggcagctgtggcgtgatggatgctgggctccctccagacgcctgrggacccactgggggccagcatcttgagtggggcagatgtgatgggggcgtcagatgacagcgaaggtctacttgtggtgggtgtagccttgggggtgccctcggggccccttgtgggactggctgttgcagcrcggggcacggtgctcccttctttctctcctttgtcctcctcatcggggggcccagatggtggtcccagagacacaggccccatggtgcaagagaccccatttggggccagcacccagcctggcaggcagccacagtggaaggacccttgtgtgttgaagcacaagctgtcgcagagggggccccccgggcccacacactcatccacgtcctggcactgagtcccgtcctccccggccaggacgtagccctcctcacaggagcagtgaaatgagccatctgtgttggtgcagccctgggcgcaaggcgagcgacccagagcacactcatccacatcctgacaggccccctctccaggaccgcccggctcatagccaacccagcattcgcagcggaagcccccaggggtgttgacacactcctgggcacagggggagtcctggcattcatccacgtccacacagtccagctgactcgagtccagctggtacccttgggggcagcggcacgtgtagtttttcccatggggtcccaggacrcacgtggcccccccacgacatgggctggagctgcaagggtttcgagaggcacaggtcaccaggtcatccagcagccggaatcctggtcggcagccgcagaggaaggagccatcccccccttcaaagcagtcctggtggcagcccccattgttgaagttgcagccatacttggggctgacacagagggggcccgagctgccccagtcgaacacatcgggggccttctccttgcacaggaaataatgactctgagtctcgtccttgtcaccttccccacaggctacattggccgcagaggcaaagggcacagcctccaaggaggaactggtggtctggaagggggtggtgtaggtcacctgacctgggccccccagggccagaggccggcacatgcctttgaagctgaacttgcacacgaagccctcaatgttacttccgggggagcctgggctcccacasgggccctcagaccacttggggaggcggctgggaaggagcggctgggacaggtccagcagcagagacacacagcgcttggagatgcacgagttccggagctccttgtgccagttagagtaaggcgtgtcctccccccygcccacccagctgaagcccttcagcggcagactagggtccaggcacttgcccttctctcgctggagcccaatccagaacttgctcatcctcgccgtcagggctgcctcccgcctcaggagctgggccagtactcgctggacgtgctgggcctcctccttgctcttcacagtggccaggttgcccccgttctggttgcagtggttctgggcctcggcagcgctcagcttgcccgagtgggccgtgtagcaggcggtccccacgcagaccaccgcctccgtgtcagctcccgtccccgccccgggctgggtcaggagcagcagcagcagcagcagcaggcccatggaggtggccatcccggtctctgtgtggccctctgygggaggcgagaagcccagcggcgacaggagcttctatctcggctcccagctgggccccaaggggagctgaggggtgagctgcagccactccggcgcagagaaggacacaaaggctgagggctttccacgtycccctgacccaaggcgcatcctgtactgttgtacttcttatttctcaccggatgttggggcttcctgcaatgaatagttctctgactcctgctgccttcatcacggtgctgttgttcataaaaggagtcaggcagctctgccgggtccctggctcagcactgtggaaacagcgacggggggaagacgttacagccccgagatactgccggcttgattttggctccattctctttctcatggcatgaggagcctcggaggcatgccatggagtgagcaggggctttgggggctaggaactcgaggaagctcccttagtaacccataataaaattccactttggtttgcaaaccaccaaaagagaaaaaaaaaattctgagacttaagacacaaggccatggatggttataattttcagccttttttagaagcaaactggactttccttttgcctagctcatgttctctgttgactttgggagccttttttcttttatcctcccatcgtgaaccttaaatagacaggcattttttaaataggatacgggtcgtgggaatgtctgggttttcaacataatgccaagctcctcgataatgttaatccaaattgggtgaaatttggcagttctgggggtttcatagtggaaatattgcattgtgaggtgtcagggtcacaaaaagcatcagaaagaaaatgaaaatgtgtccggcctcgtggcgcagggcttgcaggctcacttcccccggctcaggattcctagcaagggccggaaatctgggcagggagcgggaatcgaagcccgggcaggccctccygcgacaccgcgactcggcaaaagccagggactcacagtgtgcttttcctgcagccacagacctttgctcattggttgggatcccccaggaggggaccctgagacaggatttggggagactagtttatgtgggaggggaagtgaaacagacaaggaggaagccaacccatgatgacttgctgagaaggtgaccctgggctgctggagccagtgccaggaaactctgggggcctgaggggaccacacctcagcaccatctcagctgagggagaggctccactgctctccaagtcccctgtcattggtagcaggctgtatctctcactttgagagactgactataaattctakccctgcccagtgaccaggggtctctctcacataaaacttgtttctatggacagacacccttgtggctctcgtctgacccatgtccagtttattcctatcaagacagccacttcctaagagatccctgatgggaggagagttgggttggggtgtgggtcaggggagatgcaggaggcagcacaagaagacacaggaarcaacacaagcaccgtgtcacttacagatcccagggagagggcagtgcaccccacggggccagcaaaaagtggggagctgtctgggtcacaaacactcacctggaggggggtgaagggagagagagagacctgggtcctaagcctttattggggtccaggacgtttcccaagcaggtttcccaaggggacttctcactggtgggtttagagcaaacagacacgggctccgtggggtccctgtggctgagaggtgggcatggcrgcatgtctgggaagtccctgtggggtgtggagtcactgagaccatcaaatgggctgtatctgcctgtcccacagggaaatggtcaccaggaggtgggtgtacaaggcagatatctgggttggccgcattgaggaactgggagggggtggagccctagacaccgtgtcaagagcaataaaccctgcttctggtaggagagggtccaaattagattcaaaatggatgcaatgcacaattataagaattctctacacagcggcaactctttggtgctctgcactgaccgtgagggccccaggggaagaagcgccacggtggagaacacagtgaacgcctgtggacccggcaccagcgaccaccacagtggcctccatggagatgttgagttgtcccgggggctaggagctcgctggctccccaagggacaaggaggcatctctgactccagctggatacctcctaagaatgtgccttaagtccttgcattttagcaaagatatttgagacattttgggaactctccatagaagccaccagaccctccctgtgccccttcattcatccatctgtttgtccatccacccatctaacawttgttgattaagaccctgctatgcactgagtgaggcactggattccaggaggggatccctgcctctgtgatcctggagtcctgttagagtggacaactttgaacaagtcacggcactgatggctttattgcaggcagcacaggggagcggggaggtcgtggttgatacaggggtggcatcctgactgggggatgggcaattaggagagactcctctggagaagacaggcagtcaagccggaatctaaaggagaagcagctcagatgtggaatggtgtcgggatgggggaacagcatgtacagaagccctggggacagagagtgagtgaagggcagggagaccaaagcccaggcagtgggagggaggatgcaggggaagatggagccctgtgaaccccagtaatgaaggcttgaggcttcgtcttgaaatccacggggaaacactgagggctggcatgaggcctacatgtggaaggggactggtcagtggacccaagcagtgggtgggggggccctcagcaggtggccgcaggtttccaggctgtggagtccaggtcagatgttctcggggctgggtggaggtggggggaagggcaccgggcacgcagaaggactgcatggctcctgccgggagctggggtcctggaaggctgtgtccgctggaggtacctggttctgagaacacaggggattgcctcttggggctcagggtctcccagaccccctgtccttgtgacctgcctcctcgggacgctaagtgtgccaccagagctgggtaagcagccagctgtgaggggtccagggaaggctggtgtccctggctcccagtcaatatagctggccatgcatttgagtttggcaagggtcagtcttgttctctgcttgggagaagcttcatttctaagggtttatttacaagcaggtaacttcttaacattctgtaaaatcaattctgcagccctagcatccactcatagcagggagccgttctcgtggtctaggcccctgtttgtgcagctcggaggtagattcctcagaggtagattgtgatmtgcagcattcgctcagcattctacttagttggtgcttaaggatatgggctaaatgagtgactttcagcatgttagccactctgacccccagatctttgtcaagatatcttctttagctgtaagttattcatcttccatgtgggaactttcaaaccaattactgttcacttagccaagtgatgacatcttaaagaagaaaatgaactagcaagacatatactctgttttttatccattaaccttggaagtatttgtaaagcaccaacagtgagaaagactatgtaaaatgcagaaactgccttgccctgggggtccttggattttactttattattttcagtaacttggttaactcagccccacttctcatctataaatgcagaggtgggaacagggcctctggaaactttcttgctctaacattaataaaagtgaaatcatgcttaactctcccctctggaattagggagaaagcaagttgggaagagagtggacactgagaccattgctgagccctcgacatactgcacatgtaagcaaacctctgtctaaactgcacacacccaatttcatcccaaattgacccgctgactgccaagacacagggtagtttcctattccttgtcccccacatctgacttccactgtgtcccttcaccctttggctgatccctgctgggctcaggtgggttaattcacctgggacacttacagctaggttctctagctccagccccgcccttctgtgtccgctcccacctataggggacgctccttagaggctgttcaggggattcgtagaggctgagggcatggtgcttcgacctcaggggaggatgaagagcttgcttttcctgggagggatttggtggagttttacaaagaatttaagatagtctgaatgcaaactttgagggaattctgcacctcacatactaaattccccatggatggtgtttcatcccattttatttagagagcagattataccagacctctccaaggaccgatacttaaacagcaggaatcagcagaaggagatggaaaaagtttttctcggcagatctttggacggaagccacgttaggtgttctagaaccatggcgagcctaacagcatggcatgtaccctgagcaaaaggctcctcaccatttgtgtgtattctgcagtctttatgagtactctgagctttctttttaaattgccttaaaaatttactttgcacgatgctggaatggaatgttctgatctcaaatatggggcgagtttaatctcagttatttgggagcagactaattggtttgtggatcattcaggcatccrgcctgtctttttcctttttttttttttttgtaactaaaaattaaattaaaaagggaaacaaagcacactgcgtatttcctggcataacatggtatatggtagactcacaatgagcaacagtggcacagaaatggtggaggaaatgaaacagaactggagtcactgtgacctgtcattctatgggaccacttagggattttgtgttcaaagtttaaaacagaaacagagtgaaaactgtgagacctgatatttttgtttgtcagtacagattttagttcatacatgaggcgcttaacagaatttgaataacatttttgtaaaattgaaatttgtcctttattaatcgtttgctttaaaacttaaaaaactaggaaaatcactaatattgattatgacatgatgatttctgaaagtyattgtgttgtacagaggtgaggggtgctacaaggttcaccctgggcacaaagatgccaggattgctgcaggcaaccccactcgaggacacccgtctgcccttgggggaggctcatcgattgaccatctgtcctgcattgagagggatagaggctgggggcagtggctcttgcctataatcccaacaatttgggaggccaaagtgagtggatcacttgagcccaggagttcgagacctcatctctacttaaaaaaaaagagaaaagatgagtggagtgtggtggtgtgtgcctgtagtcctagctactcggaggactgaggtgggaggaggattgcttgaaccaggaaggcagaggttgtagtgatcaagccactgcactccagcctggaagatggagccaggccctgtctcaaaaaaaaaaaaaaagagagagagaaaggctggaacctgtctgcactgggttacaatcccactctgtgacttacagctgtgtgactaaggtcacgtctgagccactctgtccactgttatatggtacagctatctgtgactccacaccctcagctgtctccgactctcacagggctttgtgagggctaagagagtgcatacctaaaagaagctcagaaaagcacctggcaggaacagtgaattcctatcacaccaggacacggtggcctgagaccaccctgactctactcccgcaactggaactggggcctcagccagttgctggctttgggattgggaccaacactttcacttcttggggccttggtttcttagtttacaaaacagggaggataagagtcatgatgccgctgtcctgtcagtgggattaaattaaaagaggtcctagtggtaagtgcttcctgcaggggctgacacgtggccgacatcagtggacaacagtcatgtcaatctgattgcaatgagcagagacagagcccacacccccagggcccatccctgccaaggcaaaaatgaaaaggagtaaaacctcccttatgtttgctggagacacggagcttgtatttttcaaaaacttccctggctttagagtgtttgtttggatcctaggctgggtaaacattcttcttagagtgttattgatttttccacatttagtaaatagtcttctgacataattaatcatgtaccatatttatagaaaacttggctgggctgaatgttgtttttgaggttaacttgtgctcacctcttgacactggccgtgataagcaaaggctactcaccagcctttggaaagagataaatcatggagggaaacagagttttcagcaggatcgggttcacacatttgatctccagggacagctctgagcatgaaatacaagtctctaaattatgctcacacagctggtgtggatgatttcaggttccatttgacattaacagcatcctcagtgattccagtaagttgtcgtaacaatttagccatatttagacaatataatttgatagaaataaaaatgatctatttagcctaacttgtcaagatctaattcttcagaaaaatgagaacaatgacatcacagttgtttgaaaagaagtcatttaatttgaatagataagcctgcttttccgggaaaatttaatttcctttgggaagctgactggggaattctgaagattcctgaggagtatagactacaactggaaaggaagacctcacaagcactggttgagaaccctccagtgctaggtgtatttaggtccacacccaggaacccttgggatgagggtttgcaaccagggagactgtccaggagcaggaggaagcgctgggtctcagcccagtctcccaaggccaggactgctgcctttgccttgccgcatctcagtgggcatccccaagctccactgacttagcacaagatgggaataatagyccctatcttctgtagtttcaaccactagtcaaaatgtgccacttactagccacgtgcccctgggcaaacaccgttcctctctgggcttcagtttccttacatgtaaatggtgtcacatccacagaggcatgaggattaaatgagatgactcagtaaagcgcttggcatagtaggtggtaagtctgtggttccacgattagtggtatgaatacaatctcacatttactgaataacagttctaatgattatggttattatttttgccctaggtgattctctggcagggaagtcaccaggaaccctccagaaggaagaaatgtctagcatgtcctaggtccccgcacccttgcaaagacccagagatgaagcaatgctggatagaccccacctgcacacagagaagaaaggctgctggagagacatcatcagaggagagagacagtggctctaatccaagaatccaggcaacrtgtgtagggctcagggtggcatgtgtgtgttttcatgcccagcaccaggacctgagcactgagagctttccctacctgccatgggatcctggtatcaaggtgttgcccgaaggtttcagcaccatgtggtcaattgtccatgcatctttatgccaatctatcatccccgctgctgggtcccagagccattcaagttggtctgaggcattcagggcttgccatctcccagtgggcacaaggcagctcccctgcaagaacacttcccagctttgatgacctaaccctccttgctggggtgcagataaaggacacggcaggtgcactacctctgtaaccctcactcaaatatgccagtctgtgggctcatatgccttgacctccaaagcacagacatgccagctgggcataagctgggacccctttggaggggagccagaagcattcagagccatcagcaaagcagagtctgcctctctgcagggagctgtctgtggagctccctgtgtgccctgatggtaggattcaatcgctccacagaaacctggaattctccctgttgtcctgaactgtgagaagccaagtcctgtgttttagatacaataccatctgaattctgctctcactgctggcccatgttctgtggcttcagccgagtaattcmactctccagggctctttgtcatccatctgtgagagccagtcygggcagagaaggagaggagcagggcaagctgagaatgcagcccatgatgccgccccgattatggtgtttcctcactggacacgtggatgaagcgtgctcgggttttgacatctcataaagaatgagctgacagaattgggtttgattcagtcattttgaaaataagcgaagttgctttttgatatcctttttgtcgaaaatgacaaatagcttgcctttgtgtatacctgcctcgtttctcagtccggatatatctgtttcttaggaagtggggggaccagcaggaggggaggaacatggctgtctcatggccccagcagccagagaaagcccccaggtaggtgctggctgtgacatcaggtccccgtgcactaaaatagtggggagcaaggagcatgggtagggcacatgcccagtctgcccctggtgaaatgacagagaagagcccttcctagttaggcattcaaatcacgactggatcccccaatacacaaaggcgtggttgatgtttccatgccagatcctagcacggaaagctgttcacccaataagcgtccacccacgcccccacttctggcctgttccactgatgaaggtgcccgtatatgtatctgtctgcccatagtggggtttctttgcctgcttttattttaccagtggctacatttcatcatccagcttcatttcccatagaagttctgaatgttgtctggttttcctcgaaactatgartcacactgtgcacgccctacctctctctagcattgtaagaaaagcactcctctgtgcaggacacaatcctgtctactgcccctgagagccctggttcatctcgtccctccattccagttccttctagaaggtaaaagttggaaagtgacctgagcccagtgcgggacaatatggcagtgctcttcaaggcctccgctggaacatcttgtgtctcccaagctggatgctgtgcctggtcattggagaaagtaaaggcaaagcctcaggacagcttccagacaccagtctcttcatcgggacgaggtcagctgctggctcccaggttgggtccagctcttcatcatttactattagacccacacagtgttttaaatatttcagtgaattgtgcatatttaagaaatgtgagattttacagaaagatttgcatttctggcttttctaaaaaaaaaaaaaaaatcaaagtgtcttgcaatgctggcaaccagcccaacgtggcaatcagtgcctgcattagcttcctccttagtgccgccaggctggctcctgcagccctgggagcctcaacatcactaaatacctataacacaatagcctatgcatcttctatcgaaagtcatgacagttcttcaaatgaaagttagctgggaactatccaggattctccctataccaagcttgtccaacctayagctcaagggcccatgaggcccaggatggytttgaatgcagtccaacacaaattcataaactttctcaaaacactatgagatttttttggtgattttttttttagctcatcactatcgttagtgttagtgtattttatgtgtggcccaagataattcttcttccagtgtgacccagggaagccaaaatattggacatcctctttataaagcagggagggtccttctaattgtaacatcttatgaattcttgaagactctacaactgttactctcccttattcttcttaagaccagctccactgtgcacctgatgctagtaagcgttgggacgtgctgggagactcccctattcaggggacaaccctgacagatctgagcaatgatgacatttctgtccccagctgacaccyggctcaggagggacctggctcaggagggacacagactggcccatgtggcataagggaaagttccatatgcttctgggaaagtcccccttgctcttaaacagagactggagaaatggccagcctgtcctctgagtgatcttctgagggctggtgtgcaaagctgctgtggtcaggacaagctggctcagaaaggtggcaaaaagagggcaggagctcgggtccccaaaagcctcctggaactgtgggattcaccaaacctgaaatgatcccacctgagacttcttatatgaaattattctcattcttaattgtttgagcagttatactttggttgttacttgcagccaaaagcattttctccagacttctgagtcctaaaaatttcattctttgacayaagagctgacccagaggccctgaagcccctctcaggcctgcagagctttggtctgtttgctgaatcagattcatatctacacaacagttctagggccaaattctgctctcccacactcccacccactcatattggaagacagaagagtcttctagctgaactgtttctggtgaaagagtagccttccttcgcgggcactgacactgagggaagcagctcagtggctacttccacctgcagatattccaggtggtggctcagaacwgctgacaaccatacctggggaagactggcctttatttttctggttgttcatactccaacagctagcaccgtaygttggggtccaatgaagcgagcagcagtagatggcatggccagggcaaggcagacacgctggagcagtcgggaaacctggcatctacacccatgcactggcaccctcaccttcctgtttcccgtgggaacaaagtgggcggcaaatgcagggtgagatactgggtcacttcaggctccaacttgcagaagctgtttcagacccacaaygggagcaggctgcatcttttgcctactcaggataaaacgtgacactgctgcgtcatacagagatagttctgcatggtttcctaagaaaggcaaagccagaatgcccggggactaccagcattttacctgagtaattaccatgtgagcatgttatcttcaggaacaattttgctgtgctttaataatttatctctgagctaaaaaattataattgaaaatgataagcactttcacgagttgggttgccacactgcaaaaccaatttattgcacagaagattataaaacacatttccattcaactcagtctcaagtgatgggcaggttggaggggctacagaaccacagtagtattaggaaactgcacaactcgtataccaaataaaagcatcaaggatatgggggcagctggaaagcagccctgctctggttgagggttactgtcgacatctccctgtaatacagcaacctgattcctaaagaaacagatacagtaggcacttcactcaaactaatgctctcctcagcccagggcaggggagctcagccacaggccaggtccagcctcagctttgccagatccttgcacgggtcatggaggaggctcctggacccgtgcaaggatctggcaaagctgagatccaggccagcacagcccagttctctcctcctgctgcagccaggctctcagcacgtgcattcwcccccactgctttccatctgcccacttcttcattcatggctgtcctttctgcctctctggtgtcctggggctgctttcacgtcggcctcctctgacctctgcaggccaaccacatgggccccatcagtcctctgctccctgaccctcaggcatccctcctggaagtgtccagtgtgtgggcaccaggtggtccacattccctgggcctcttccctgctctggcctccacagggttccctcctgggccctgtctctctcctgcccaactcaccgctgctcggttgcatccactccccacatgtctcctactgccccatctcgcggcctcacagatgtgcctgtccacatcaggcctgtcctttcatctcccaatcagagcacccagctgtccactatttcccagaacatctcagagtcaccaagacccaaactactcycacttcctcccccagtccaccatccgtccagtgatccacgacgtgcaggcggcatccttcctcccaccttcccagcctctagggatgatctggctccawgccctgggccagtcctctttttccccgcccatgccccacctccaccgcctctcacatgggtgggcacagcactggtgtcctgaccagcccctggctccagcctcatcccctatgctccatgctgtaaggtgagatcatgttgaaatagaagcctgatcatttgttttcccataagcacacacaccacagtgaaatgctgctggggcttgccattgatcataggataaaaatcagatttttttttttttttgaggcagtctcactctgttgctcaggctggagtggcacgatctcggctcactgcaacctccgcctcttgggttcaagmgattctcctgcctcagcctcccaagtagctgagattacaagcatgtactaccatgcccagctaattttttctatttttagtagagatggcatttcaccatattggtcaggctggtctcaaactcctgacctcaagtgatccgcccacctcagcctcccaaaatgctgggattacaggcatgagccgctgcgccaggccaaaaatcagatttctaacacggccctgttagccctgggactttggtccttcttgttttcttttttctttttttaattttttttgagacagagtcccgctctgtcaccaggttggagtgcagtgacgcgatgtcagctcactgcaaccttcgcctcctgggttcaagttattctcctgcctcagcctcccgagtagcagggactacaggcacacgccaccacgcccagctaatttttgtatttttagtagagacagggtttcaccatgttggccaggatggtcttgatatctggaccttgtgatctgcccacctcagcctcccaaagtgctgggattacaggcgtaagccaccgtgcccagcggatccttcctattttcatgtccacattccccagccacagttctgtgggccacccagtccttccacaaggccaatacacacacacgcacacacgtgtgtgaacatgcatgcagactgrgtgactgatgaactcttttaactgcattaggccttggggagctttgcccatctycccactgtagattcagcctcctggttacatgctctcactgcaaacctctcaaccttgctcctcttcctcccagaactgagcatagtggtaactttgtatatgtgaaattgatctcccarcagtaaactgtgagacagtcagagctggaaactcatccctcttgtctattgctggctccctagtgcctgctatagggagcaagtgatcagtaactmcttgatcccagccatacatgggaatcacctggggtgggggacaaaccatagtaccaagccccattctggaccaactatatcagacttgctgtgrgtgaggcgcacgcgcacacacacacacacacacacacaggtgattcttacaccagctctgagaagcactgaggttgggaagtgagaggtggagagcttgctagcatgaatattgatgtcacagcgtgaatcttcactgttccttgttcctttccccaaggccaaatagaagagtcccagatgttctaactagctttatttccccaagtgtcagcatttggccagcatgcctgaagatctagaaactgcagcttctctgccacatacagccaatgcttcaccacccgccttgtgcagggagagcaagcctcagctttgcctgtacactgtgctgtgcacaccagrtccccagcataggacagtaacagcacaggcactgcaggggacttcagggaggcctgaatggccctggacccccagcccagacttctgtgcagaagagttaagagttattgagtgactgcaacctaaaggatatttcttctttaggtcatttaactacactaccagcttcttgaagccaggggctgcgtctcgtggaccttattgtctgctcagcaataacacagggcctggtgctttctgacgaatccacacacatgcactgagtggagctgcgctcasggatgagcacagctgcatctttcacggaggctgctttcctgtcagcttgcatttccctggatctctgtgtactgtggagtacagggccttgggctgagcccaaagcattctgagcaaagcatgcatgtatgggcatgtatgggaactaggagttctaaaygctttcccttaccctgtccccttaatcctcttaccaacctgcaagacaggtccttccacagtttcatgtgagatgagtaacggcagttttctcagctgttaggcaagctgatgccttgccaagctcaaacctggaagactgatgttgaagaagcaaggagggttgaaagagccatgagtgaacaaggagccaggagtgatggggagccagtagtgatgggggagccagaagtgatgggggaggagccaggagtgatgggggaggagccaggagtgttgggggarccaggagtgatgagggaggagccaggagtgatggggagccagtagtgatgggggagctaggagtgatgagggaggagccaggagtgatggaggagctaggaccctaacttatacctggagtagaaagagtagggacatgaggaggagcatccactgaaggagtttatgttcctttttgacctgatgtgcctccagaaatggagcctgacagaaacgggaatctgcagccaaagtcctttgccctctcttggtcaggctttgctgtattaattccatgttcatgcaaacatctgtgcatgagtgtctatgacaactgtattcacaatagccaaaacctagaagcaacccaattatccttccacaggtaaatggttgaaagtggctcatccatactctgaaatactactcagtaatacaaagtaatagattgatccacacatctacctggatgcgtctccagagaattatgctgagtggggcagccataaccagaggttcatgttgtatgcttccatttatgcaataatcttaaaatgatattctatcaattctttcaatggagaacagactaatrgttgtcaggggttaaggtggggtggagtcagggggcaagtgagtgtggttaaaaaaggacagcaggagtcatcttcatggtgacagacatgtgccgtgctctgcgacagggtcagtctcctagtggtgatagtgttccatagctttacaaggtactatcacaggtaaaactgggtaaagggtacatggaatctttctgtattatttctcataagttgtatgtgaatctgcaaatatctcaaaataaaatgttttattaaaaaaaaacaggagagattctcagggcagaagtttayttatacattgcataagaactagatgcaagtggctttgtcacctgttcgctgcagggaagtcacacccgtccaaagggccaccagcatccacctggatctcatgaaccaaaggccagtgctcattgcccagccccgcaaagctgaggtgttcagtggggccagagctgcaggccctgggaggggtggggacaagctttgtgccaagaaggtgcaggaagccatccagcagggctttgayggtgcagtgggcactatagcytctaccatcctaagaagatgctggaactgtcaacacaatagccagtcctctgcaggcgctgtctccagaaagttctgttaaaatgtaacacactacagaagcaaaggaacaccattaccatcataacatcagggatctgcagcacttcctgtaasagcctatacactaaatattctcagcttggcaggccactggtctctgttgcaactatttaagtcyatctttgaggcttaaaagcagccatagacaatatgtacagcaatgggcatggctgtgttccaataagaccttctttacagaaacaggccgcaggctggtttggtccacatgctgcagtttgcccacccctcccattattttatatgatgtttttgtagtttgcggggcttgttggccccagccaccactgagggtgcatggatacctcttagcaggttcagaggtggacctctctaactgaagggaagcatggggcagctgagggccggataagagcctggggttctgggaagggtgctgaagaccagcttggatacccacactggccctgtcaggggtccttagagccagatgggaataagctaaaaatggggtgagatgttttagccctcagtattgatgtcaacggtgaaggtgtctgggtctttctccccctcatgccagctaagggtatgttaattcaccctgaatctgcccaggtcaatgttcaagactgtgcaccaggaaaggaaaacacttcatggagcaagaaacccagggctggcctagctatgkycctaacagagcactcactcctgcccagtgttgctggaaaatcaggggccgattgaaagcgccttccctgggttgtgtgacagtgagctctcaccactagacaatgggatctttatctgccttagggattttagtaaaggtgatctttcacagtcttgccttaaggcaaaatcgagccattgttctcatgccttatttcttcaaaaccttctgcccaggccgggagcagtggctcacgcctgtaatcccagcactttgggaggccaagacgggtggatcacctgaggtcgggagtttgasaccagcctgaccaacatggagaaaccctatctctactaaaaatacaaaaaattagctgggcgtgatggcacatgtctgtaatcccagctacctgggaggctgaggcaggagaatcacttaatcccaggaggcagaggttgtggtgagccgagatcgcaccattgcactcagcctgggcaacargagtgaaactctgtctcaaaataaataaaaaaataaaaataaaaacaaaaaataaaaataaaaataaaaaaaccttctgcccagctcttgcctgcatctggatagaagactcctggagaaacaaacagtagaactcacagaccatgttggctaccaagttccttctctaaagcacacgaagacattgggaaatgactcaaatgccaggaaggaagtttaaaaaaaaagtggaggagctcatttaaaagaacaaaaaataatgacaggcaagctaaaataacaagaaaagatatgacatcagctcagggttttttttttcctataaatgatgccaactcccactcagaagagttggagttggagaatttttccttggcgggtaggggagggaatgtgtgcagatgctttctgtgaaggtgggataggtgacttcctctgtgcccggttacctcgcatatgtcatgcccagcagccgggggaatcttcaccagctgaacccatcacataaccagctcctagatcaagaagcagaacattctctgctccctagacccccgggtcattcccccaggctccatactccccgctctgacagcagcgatggtcacgttgggctgttgagcatccatgcatgcagggtgtgtgctctttgtatctggcgtctttgggcaattcatccgcattgtgtgtkgttgcaggctgttcatctcactgctgagtattccactttgtgaatatgccacggttttgcaaatctattctgctattgatgagatttagatggtttccggattttgttgtgcatgatttgagggagacagagaagggcccaccactccctgtgatccatctgagttttctgaaaggcttccctccaggcaggttgctttgcaggcatcactctcaccccactgttcttagccaggggagttccctgaggggcctgcacaaagttgttatcgactccccgacactcaagcaccaggggcctttcatcccagcagaagggagaggagaggtaactggggcacgttttgcgccttcaccattgtatgtctgagtcatgatgtctttacaactcctyagaggtcctccgcatgcaattccctccaawccactsacaggcagcctgaagacctggttaggtaccgggtttgggataaaatagacarccttgccctcaaggagctcacagacaagttaaaaactccaaaaccaagtttgattgatgtaatgccagaaaatgtagccagagtctggcatgcgagagtagcgattgagggtctctctcagggaaggaggggaaaggggtgtagcaggaaattagaaattagtagagaaatcaaacttgcttcaagaaatcttaagtgaccgactgcactagacatttattacatggaaagaggagtcactgagtaatggtattggtgtagaatcaagtaatgattgtgcacagrattctcttctctttgtggttcattgaattgttgtgacttttatataatggcctgcagaataacagtgcacctccacaaaacctcagttcagcctaaagggaggctttgttgaagtgaaaaggtgtttttgaattttcctgttttctttggtttatgcgctgagtgctgattcccatgtctggtgacttgtcactcctcgatgaacagaaactaccagagacaggagtgggccaagggagttggcgactgtgaggtgaggtcggggtcctggggaggagggtggagggtggagaaagaataaagaaagaggatgtgctggttaacattgagagttctgactaacacagagggtctctgtgctgatttgctccagataccacaggaggtggccctgtcagcctggaaccggcatcgggagtgcccgtgggaccatttgattgacactttgctcctccagttttctgatcagaccgtgacttttrgctgtgatattgtccaggcctgccaaagtccactatggatgccaggttcagggacccattctgccctgcagttgacccttgtctcctgctcaaccctgaagcccctgcagtgtgtatagaccctggacccactgggctccagcactgcctgtcacacccctgcaagccaggtgaggctggctcaggctggtgaggaagtgcttgtgaggagagccagggctccaygccagggtaagagtaggaccaggaacgatgtatttggttattgacttttcctgcttcctgagctttataacaacacggggaagagggtcctgtgatcatctcaatttacagacaaggagactggggtatgtagagaccaagtttttgtgccaaggctgtgctcaaggtgagattcaaactccaggctctttgacttccctacactgcctgtgccgcaacctcgggagcagaaggtccggaaatgtggggcaagaagtcaggggccggggaaagagccaatgtggtcaccattctgctggaggtgggtctccaagtgtctcagctagcattgccctcaaagatgctcagcaagttctttcacagtaagaaatttcagagaaactccaaggagcttctctggaagagaacatctggggaatgyctggcttccatgcacccagcccagtgctggttgctagaatgcatagcaatgacctatgagcagtgggcccagcaaattattaactacagcttttcaggaaaaaaaataacccatttgtatcatttgcctctttccgtggtataaatacctccaccagggtcagcttcagtctccycatgatgttgtggagcatggagcagggaggaggtgtgagcagcctgccgcggaacaggaggctccacagatgcagataaccttaagagcacasgttgcagtaaaaatcatcaggcatgcaggttttactatttattattttaaaaaatataatttacttacctgtaggtttacaaagtttatttttaataatgactgtgtttaagaaccagcttgtgagattcctggaaatttcacaatctgctcttgcaaacaagcctaagtcagcccaggccggctcccgtacaccaccaggtgtgaggcctccagctctggaaatctgggcagagaaggggtagcatgaaaagaagtcagggttaaccctgtttaaccctggtgcttagttacaatgcctaagcatagaatgataaaaccttcaaacgttagtgtcaggggatgctgggcaatcactggttctacccctgcaggtagaatggaggayttcagttcaaccggccagctacgctccaagcctaatatggaagtccaatgttttcttctgctggtgtggtgcagggcacggatttcaggaagtttgtcaaattgtttattctatgagaatcaagagccaggatattgtgtcagccttgcctgwcagctgttgtttatatcacactcggctcctgtctctgggcttctttgcagggccagcttcgccttgctgggtgccctgccattctgctgtcagtggagcactgctgaccacaagaacaatcgagcaaaggctgtgctgggaggtgctggcaaagcccatgagagaaactagaaaaattcatgtttcatagacccagagcctctttagagtttcacgcacagaaggacctgccatgtgagcagtggggctgcatggcccagcctgagtgctttgctctaagctgacctttggggtcgtgcactgtagtaacttagggctgcatccatcctgcatgaggctgctttcctcttctcaaatattacttgtttaaaacctactttcagaaagacaactagattaggaatcgggaatgctgtgttatcgcaaagctggtagcaattttaaaatcttgaaagaagcttgtttccgctgtgagcctcagtattcaaatatacttgtttaaggtattaaagctctagctcactgatgctataagagtaaaaatggcaagatgtgaacagatttttaacactctgtgtgttaagatctgttagtcaccctcagcctcggcattgtccacatctacatcatctgctttgacctggagcaaacttattgactctccaaagacctcatttttctcaccttgacctggtgataacccatcacttggaaaagcttttgtgggttacatcagtttccagcaggcacatggctattagggggactcagcctcttggggataaaaagcaaagcaacttggagagttcatggcgccrtggggctgcaggaaggaaggtagccctagccttcagccccagaactggctgcaggtgaacaatctgaagacaatcaagtccagactggatgtcagggtcccaggggtcatgtggtggatgattagagaccagagtttggaggagttatgccaaatccccrgaagcatggaaatcccccacctctgccgaatgttactggattgtgagctccctgccctgcagctggtcagtgaggctcccacaaatcagtactgacaaatccacatccaaaaagcccactcatactttgtagctcttgtacattatttgtgatttaaactattagtttctctccctggtttaaagaaaggtgcttggggaattttggataactgaatacctgccatccctagatggtactcccaagtctatgagaaagggaggttttaagagaccagaccaggcctaagttgatctcttacaccggagagtgtgatagagttaggggttttgtttgcatgcttttcagttgtgattttaaaaccacctacctttctctcacccatagtcttgatacttgatgtgaggaataaccagaagaagtcaaccctgctaacgtcacatggcagggcacacaagctggtggctgtgttattttccaactgaaaaatcatttataaatcattaatatatggattccaccarggatacatacaaaaaaaaatggtttagatagaggagcctactcaaacatgctcaagcctgkgtgcagacatagactcactcattattaaagcttaccctggaaagagccacgtgaatctttttgggaacaatcatcccatgctccagctggagggaaccggaggcctttttcttcggccttttgtttcacagatgcaaagaaatcagatccagaaaggttaagtgacttgaccatgttgaaacatccggttagcgacagaagccaaactaaaatctaagttgtatgtgtgtgtaagtgtgtgtgagtgtggtgtgtgtgcacgtaggtgcacaggtggaaaatctgtgtgtttttctccagatcctcgctcttaagagagtccattctaagacaatcatcttaattacaaaatcagtgttctgcattaatatcatgaaaccattattgaaacaaagtagagtattgtaccaattcaacaatagtagtatgattaggtaaactgtcatgtaaacacatgatgtgttatgcatcaattaaattatgttggcaatgagtttgtgcatatacaaggcaatgtttatctttaaacattcaagtaggagaaacccaagatctgaaactcttcagagtaacctcaactatatctaaaactttgcagaaacctgatgacctgcctgcagtgagcctctctgggtagtagactatggatgactttttggttccaaaaacatctctgtattaaagtacaattcctaaactggaaggaaaatgggaaggtgtaactagaagcttgcatgcgggctcctgacctggagcaatttggtgactttgcctgttttgcagctctggtcagcaccttggcacatccagggaccagaggttgcaagaggacctctttcttacaaagtcagcagttttgttccatgtctggcatgagttcagccacacaaggatggctctggggttgaaagtccccttttctggcttcctccggtgtgctttactgacctacctcagagaccacatgtggcccttggggcaggttctcaggcaaacgtctgccccactccttgagagagaaaatgggctcccagtgccctggactttgaattcctttgtgtttacttccccaaagcatcttgagaattcacaagcttctaggcttttgctgtgacctccagtgggtttagaatgcaccacgcaccagagaggagaagccaaagggtggatgcgatggtttccagccctggctttggcgtccagtgggaaccgggcygtctccccctgctttcccctttactgaactttagtgtggcttgtggtagaatgcagtcagttcaggctctgtggccacctgctgagtaaagactggaccctctcctgaggtccaggcaggccatgggaaatttgagttatgttcattaaacaatggcaatctctgcttttcattttcctgacttggagggacttgctggggcaggcaacacgcccaaggtatttgttagcaatcacgatatgttgtatggtgggctcggccagatatgggaggaagctgaagtcctccatgctgctcaaaccaaggacactgcccaccgccccaggactgtacaataataaacaagtccttccactgaacactggggtgggggaagcagaaggtgaagctaattttaagtgtccaggaacttatttgaaacaatcttgacccaaactgttctgaagttctgtaggaaattgcatctgctatgaattgtggagttggagctgtctagaccaggatggagggatataggcagagtgatgggtatacgcaaatccatggaggagaggggtgccaggaccctttacaccccaggagggcacatgggaaggagggtctggtggagaggaagctgaagagatggctggctgtgggtgtggagttcagactctctccaagtgcgtgtgtgttttgggccaggctgggaggggcaggcgtgacttgggccagctgtcctccaagtgagctccccatagtagcatctgcagcatggaggatcttgttacaaatgaaagttccggccaggtacagtggctcacacctgtaatcccaacactttgagagcccgaggcgggtggatcacctgaggtcaggagtttgagaccagcctggccaatgtggcgaaaccctgtctctactaaaaatacaaaaattagctgggcgtggtggcacgcacctgtaatcccagctactagggaggctgaggctggaaaatctcttgaatctgggaggcagacgttgctgggagctgagatcttgccactacactgcagcctgggcaacagagcaaggctccgtctcaaaagaaggaaagaaagaaaggaagaaaggaagaaagaaagaaggaaggaaggaaggaaggaaggaaagaaggaaggaaggaaggaaggaagaaagaaaagttcctaaccctggattaatgtcctggggctgacaaaacaaagtaccacaaactgggtggcttaaaatgacagctctggagactagaagtctgagaccaaggtgtcagcaggtctgcgctcactctgaagcctctagggaaggagccctccttgctcctctcagctcctggaaacccaggtgtccctgggcttgtggccacatcactccaagctctgtctctatcttcccatggccatctgcccccattatgtgtttacatttgtgtctctcttttctcttcttatgaggacctcagtcacactggattagggcccatcctgaatgtgcctgcctttgaacttagttacatctgcaaagaccctttttccaaataaggtcacatgcacagcactgggggttaggactgcaacatctccttttggggaaattattcaacttatcacaaactccgtccactgaatgagaacgctgggttttagcgagccctccaggttaagaagtgcttaacctggaggttaatgtgcctgtgtttttccaataaatgctcagagcctgaggcaattggagagcatgtctgtagtttgcaatatacagggttactcaaagtcaggcttgggaccagcaagagttggatccagagatgcatgatgttttagcagcaatgatattcatgaagctttttgcttcactccttgttatggtttgagatcccacagcagaccctgagacaaagacctggaggcaggtggttaacttgggaggtggggtcaggggaagggagatggggaagggagaggagacagggcaggtgcttcccgagactggtgctctgttgggagctggagcacagtctcgaaaggacaggtgtgaaacgtccaagagctgacctgccagcagctgcctcctgcccctcaccacagagggtggctgaagcttttatgccctggctctcccagctgccctgcacgggctgctgctcaggctaaggaccgagaagtgctgatgcttgagggactcatggtcagtgaggacaggctgtgagctgagctctgagctcggggcgaaccaaagatgggagaggagcatcagtgccccccgccccatcaccacattagaatcctgcgggaactggctgggttctcgaaggcgttgttatcgccctgtgctcacacataaggaccctgagacccagggccactagggtgaggcgacagggcagggcctgatgcacctgtcgaaatccacttctagctcccaccctgcccccagagacatgcgccccatgggccggcacacagcaaggggcttcggggcagggtgaaaaaatggcaaatacacacatttaagccaaaataatgaaatggccctggccctatcagcctcgaagctacatcaatgtcactttttttaaaaacgtaagaggggctgtgaggacatccagcccgtggtcactccaaacctgccaccacagacagttggggcctccccggagtccgtgggccgaatttcacaggcgagcattcccaggggtcctcaccagctgacttagtcagtttgggctgctctggcagccccacaggcaggggcaaaggcagaaatgtgtcttctcacagctccggaggttgcagtttcaagatcaaggtgtgggtaggcccggctcctctgagcctcactccctggcctgcagatgcccctctcctccctgctccgcgcacacagtcctccctttgtgagtgtctgcgtcctcatctcctcttctcgtaaggacatagtcctattgcattagggtttcagctagcccccagggtctcacttaccttactcactgctttaaaggacttttctcctactaaggtcaagttctgaggtgctgaggtgacaaggtcaacaaatgaattttggggacacaattcagccagtatcacttacatgttctgattttcctccccaaaattctacatgctactagttattactatgcccattttagaaattaatgagatactcaaagaagtgcagtaactacagcaaaatgccacagctcagatgtctccagcttcaaaatccagaagacccagacagctcctccagcacaggaagccaggacatcagctataacagctgtgtggttcctgcaggtggagtttggccttgcccaggtccttggaggcacgacttctgtgtctggtggaactgtgcagcgtggctcagacccacaagctgtgtgatggcttatcatccctgtgtaggcagggcatgctgagccaggctgactggacacctctgttcaggaagcattaccatcctaccagcaagagcaggtgaatagtttacatggtaattagccagcatgcactgttcccatgtgttcattcatttgttgaaaaacaaaataagacaaaacactccttcctggccctactagctccctggcttttctagaatatgctaagcacaggccacttcagaaactgtgagttcacctctccccctgcctggatactctttcttgtggtgttctcctcatagctcacacactcagcttctgcaggtacttgccccctcccccacattcccaggtcttacctccctcacctccccatcttccttcattgcactggtcaccttacagctctacaagagcagaggctcgcctgatgtgtgactaatccatccttagtacctagagcagtagctggagtatgcatctacgtggcaaaggtactacatgaacacatgggttcagagttcagcccattccacatgcatctgcaactcttcgtcaggccccagaatgcagcaggagtttgatacctgccatgggggcataaggagcagcaggcattgattgatggatgggctgccttactctggtttctgcaaataaaaataagaacaatccagtcaaggtagacaggaaaagccctgttaaatttctcctatcagcttgccactggaatcctgctgctgttgcagagacctggagacatggatggctttagaggccccagcaggcacaagacctggtgcacaggcccgagccaggctggagaatgactcagagggcagggaggatagaggaccaccagccatttgtcccgtgagttgcattagaccaggaaagccaagaaccacttcaactagttgaggaaagctgtgcctgttatgctatgtccttcagagagctttacatttttacgaagtccagaatagctgttggtcgtctcacagatacttacttaccctgctgcctcaacctccctccaccattcactgtcctgatgaaatcagatgatttgcgagcagagcaaccttgaggggaaatgacagcccctgagttcagtgtagagtctcaggctgggcacagaggccaggcagccccccgtgggcctggggtgggctgggcactgggaaggaattggcatttgctctgcacctgctctgtgacgaggcacacacagtttacatctagggtgccactgcattcttacattttattttaactttacattttattttaaagaaactcaggcttggacagtgaaagagacttccttgtctgtgggcacacagccagccagcagcagaactgagcttcttcctgctcccagaccagcccttccccactcccccacaatctagaagctgttctggaagccgctgactgcctcttgtccttgagcagacttcctgaggtctacaccacctctctggttcctggagcaaggaaggcaggtgtttgtgtcttctggccaaggattctcaggaaccaagagaagggatggtaactttgacacttctgttttcagaattgctccttgttcttcccaccgcattagagcatcgactgctgcttcctccagtgggacccatcctggtgctggcaggttgctccaagtgtgggcaccgacacatgctgggcaaaccagcccttgaaccaagaattccatttgctgagtctgagaggccaggttctctttggagtctcagttgtagcctgtaacatttgggctctcataggccatatttcccaccgctgtccttaaatagtactttagtcagatcagataacattaccatacgctctaactctcctgtaactactaaaccgaaacatttacaaatatgataaaacaagcctagaacaccagaatggttcaatttaacacagtgatgtaacacaacaacaaaaggacagttcctggctaacaccaagtctcagccttcagagcgccatggggctcacagtgtaggttcccccaattccgaattactgggaaactccatttgcccagcagggcactgggcccatgcggccttcatatgacaaggaagtatcatttaacctgaaggactgcttctgggtcctttttgtttttgtgtggtttttttttttttctttttttctttttttgacagagtcttgctctgtctcccaggcttgggtgcagtggtgagatctctgctcactgcaacctccgtctcctaggttcacgcaattctcctgcctcagcctcctgagtagctgggattacaagtgcctgccaccatgcccagctaatttttgtatttttaatagagacgggtttcaccattttggccaggctggttgtgaactgctgacctcaaatgaccctctcacctcagcctcccaaagtgtgggggttacaggcgtaagccactgcacttagccatggttttatctgccacaaagaaaacggttctattgggccctctaaatggaagcatgggctccgagaagtcccagccattctgagttgcgtagcgggcctcccagtcccataggcctgacccctacctctttttctttattgccacccaaaaatgtcccatacataacataactgcagaaagctgattatcccaaaggagtcatctgaaaacctgagttctgtaaaacactgatctagactttt

SEQ ID NO: 5666 - DNA, 16640 bp, Homo sapiens
ggagttcagtggtgcaacctcagctcactgcaacctccgcctcccaggttcaagcaattctgtctctgcctcccgagtagctagaattacaggcacgcaccaccacgcccagctgatttttgtatttttatttatttatttatttattttttagtagagacgggatttcacgatgttggccaggctggtctcaaactcctgacctcaggtgatccacccacctcggccttggcctcccaaagtgctgggattacaggcgtgagccaccacacctggccaaccttgactatttattataggtaattctgtgcagatgtctgacttatgttggccatctccaggatggacctgaactttcacacgtatgtccctatgactaaatccaggtgtcatttgcaaaaaacaactaatattattaagtagctaccagggctaggtatcactcaccatacatacacacatgcacacacacacatacacattcctacctcatccttacaacaatcttcattttacagatgaggaaacagaggcacagacaggtcgaataacttactcaaagtttcacagctagtacattcgaacccaggcttaaggacccatctttgtccagaccctgtatgcaagtgtctgtgacactggatgccaagactcacactagagatgttgaatttaggtctgaacaatatccaattctgtgtgtgtgtttgtgtgtgcatgtgtgtgtgtgttgtattcatgtcttaaccatccatattcatatacacatatgaacatctgtgctgtgattcttttttttttttttttttttttttgagatggagtttcactcttgtcacccaggctggagtgcaatggagcaacctccgctcactgcaatctccgcctcccgggttcaagcgattttcctgcctcagcctccagagtagctgggattacaggcacccgccaccatgcccagctaattttttgtatttttgttagagacagggtttccccatattggccaggctggtctcgaactcctgacctcaggtgatccacccgcctcggcctcccaaagtgctgggattacaggcatgagccaccgtgcccagcctgtgctgtgattcttgaagctgcaacccatgtgcatgcaagtgaatttcagcttccagtcctgtccatagctgtacctaagtgtggaagctggatgtgcatgtatgcatgtccatgaccttgtatagccacatctgggactcatactgcacactgaatttggctgacatgtccagactctggggccaaggctgggtcacacatactgagtggccacatgcgtttgacgtctgtgacaatttggtgaccgtgaatgactggtttcaagtgaccacctgtctgaacctgtatccagtgcccctgtctccacccccaaccacagaggacttcttgccctctggtctgttccccttcctctctctcccagagtcttatagcaaatggggtgggggctagagttctggagaaaacaggcagcggttgtaaataaacaacagggcaggcggagcatggtggctcacacctgtaatcccagcactttgggaggctgaggcgggcagagcatttgaagtcagaagtttgagactaccctggctaacatggtgagacctcgtctctactaaaaatacaaaaattagccaggtgtggtggcgggcacctcagctactcgggaggctgaggcaggaggatcacttgaacccaggaggcggaagttgcagtgagctgagatcatgccactgcactccagcctgggcaaaagagtgagactccgtctcaaaaacaacaacaacaacaaaacaaaaaacagggcagggtgtcttgagaagttaggggaaaggcataggcatatagtagttagggcagggtgcaaggaaggtgtaggaggcaatgtaaacgtccctgtcctcaggcatcctctaccccttctcttagcagcccaggatggtgacaagttgctggaaggtgacgagtgtgcaccccactcccagccatggcaagtggctctctacgagcgtggacgctttaactgtggcgcttccctcatctccccacactgggtgctgtctgcggcmcactgccaaagccggtatgaaggcaggggctcagggtcctgagggagcctggttcggggggaagagctcctagatttgggggaagacggaggcagacgccagaactcctgggttctgaaagacgaggaggccggatgtcaagcccctgggttaggaaggagtgtgtgtttcaaagccttcgatctctgaaggaggaaggagaagactagttccagcttttgagcctcagttctagggatgtgagaatcctggattcggggacagaccaggagggggctgggagtagttggaggggatcgagttctaggagtgtgcctgacttcagactcgttggtccttgaggagcaggggctggaaccattggcttcagggtcttgggaaaaggtaatgggatgtcgagatttctaaagggtcgggagacctcgggttgcccactctttgatctttctgtcctctacttgcgggtaaccactggcccgcactccactggcgggaaaaccactcgcccgcacagcttcatgagagtgcgcctgggagagcacaacctgcgcaagcgcgatggcccagagcaactacggaccacgtctcgggtcattccacacccgcgctacgaagcgcgcagccaccgcaacgacatcatgttgctgcgcctagtccagcccgcacgcctgaacccccaggtgcgccccgcggtgctacccacgcgttgcccccacccgggggaggcctgtgtggtgtctggctggggcctggtgtcccacaacgagcctgggaccgctgggagcccccggtcacaaggtgcgtgaaaggatggagctggatgcgaggcctcaaggaatcctatgctccagggctcttgggcggaggggacaagggccggaatttatggatctgctccaagtccactgtcttccccagtgagtctcccagatacgttgcattgtgccaacatcagcattatctcggacacatcttgtgacaagagctacccagggcgcctgacaaacaccatggtgtgtgcaggcgcggagggcagaggcgcagaatcctgtgaggtcagagcctagaggggccatcaggcggaagaagagggatggggacaggtgtgggagtccggatggggttggattttctttgctttgggccagagaagatgctagggttaggcttggagatggagtaggaagagaagttagaataggggtgaggttggagttggggttataggtggggattgcgttgtttgaggtggataatgtgatagttagtttgagatggcatgggttggggttgagaatgggaatggtttggtttgattctgggtgggaaatacgtcagggttgaattgggatgaggtagattttgtttggaatgcagaagacatgaagattgagattggattttgagatgggcatgggtttgatttgattttgaatggtgaggatgtgggctgagttggatttaacttagtacagttgcactggagttgcatgggggtgagattggatataggttgggtgagttgtattgagctgtgttgaattggggttggggttggggttgggttggctctgtttgggataaactgggctgtattgagttgagttgggttggggttccctgggatggggatggattgggtttggggtgagattgcaaatggtgattaggatgaggatgaatccaggaggtttcactcaacctgagaccccctcttttccccacagggtgactctgggggacccctggtctgtgggggcatcctgcagggcattgtgtcctggggtgacgtcccttgtgacaacaccaccaagcctggtgtctataccaaagtctgccactacttggagtggatcagggaaaccatgaagaggaactgactattctagcctatctcctgtgcccctgactgagcagaagcccccacagctggccagcagccccgcctgacatggaacagaacggagccatcccccaagaccctgtccaaggcccagatgttagccaaggacttgtcccacctgaggacaaagctggcgctcaaggtcacctgtttaatgccaagataacaaagcgctgatccaagttgctctgtaggaatttctgtgacttttttctggggtcaaagagaaaccccgagacactgtacactgttccttttcacccaccaccccgatccctaggtgaggagaagcggcttgaagcagggctccattcattcaacacacatgaccacccgtgtgatcttgaacaagaggcccaatctcacttcgccttggtttccttatctgtaaaatgagaccatcttattgctgacttcaaagggctgttgtgaggattaaatgagatgattcgtctgaactgattaaaatcgtgtctggcactgagtaaataccctctatctctggatcccagttaaaggacctaacagacactagattaccaagaatggctttttctttaaggtttagttctgggccgggcatggtggctcacacctgtaatcccagcactttgggaggccaaggcgggcggctcacttgaggtcaggagtgcaagaccagcctggccaacatggtgaaaccccatctctactaaaaatactaaaaaaatttagccgggcgtggtggcacacgactgtaatcctagctacttgggagggtgatgtgggaggatcgcttgaacttaggaggcaggagttgcagtgagccgagatcgcgccactgcactccagcctggtgacagagcaagactccatctcagaaaaaaaaaaaaaaaaaaaaagatttagttctgggcttcctggtagccatggcaaaaaggcaaatactgtcctttccttagccaggtccctgatatacagcagaggctggaactctgagctgctttgattttaccaaaaagccaagacaacctgttggaagcctatgggtttaccattgaggctgcaggaatctagttcctaattatcttcagagaccacaaaatgtgatgttcaaggtcgctgaatgttgaagtacatgaacctggctcgtgagacctaaatattgtactggtggtgggggggaagggtcattggaatctgtggttagcctgatcttgacctgggagggaaggttgtccagatctctgggactttggaggacaggacgttgagcacccataactgggagcaagaagtgggaggctcattgagaccccagcattgtttgggagggacactggattttgtaatgctaaagaacttaccctgggagacccctgaaacttcacattcctggatctggaggcactaggaatgtggtgatgtgtaccccaaaattttattatgaaaggaacagtagctttggggacctaggtcctgggtctgggagtgcaagaaccagggcattctgaaggccaaggcttatatttcagggggaactggcagctgagatgctagtatcttggctccgagtggtgcagggaatcagagccctaactgctggtgtttgagggcaccaggtctgggggtgcagggccttaattgagactgaggtatatggggctttgtaccaggggtcactgattcctccgtcttcctgtttctgcttcccctcagtccccccttgcctcactggctgctccccagagcaaagccccagagccacaggccctgccccacctggcttcaaccccaggaatgcgtccagcgtgatccagggcctgcagaacaggtgctggttctccctccccgtctacagctctggggatcggaggsgggggggcaattgtccagcccccaggcaacaggggaagggccttggccaacatctgggtgccagcagggcaggggtggggctctgaggggataagggcttttaaaagcctccccagggaggttccccagttcctccacctgctggcccctggacacctctgtcaccatgtggttcctggttctgtgcctcgccctgtccctgggggggactggtgagacagtggggggatgtgggagggggaacgggccctgattctcttgctggcctcacatccccccccgataagaccttcccctccaacaccccaccctcatccctctggcccacagtctatcctagtccggggtgccccggctcttatctatcttgcgcggscccaccctaaacttccacccccgctcctccatgttgtcatagtgctcactcccacaccagattcctgctcctcccaggaagcctcagtactttctcctcttccctagccaacgccctgtcccaccgctttaccaaaggggcagattctgggccatctctgtctctctctggaggaccccaaccctcccatgggcttcccccaccccacaggactctgatcatcccctcctgccccctagttccctgcggccacctatttggctcctgagtctacaaatcccaccacactccagtgactttttccatccagctgtccgctctcaactgtgtcctccagaccctgacatctggtctccccagtccttccagggtcccccaaatttcaccagaaaaccctgcttcccaaactggcatgtgggatcccccayctggtatgggggggggtctgcaaatgtcccttcccacccagcacccccagctctcccaggaaaaacaccamaccctcccaccacatgctcctttccttggggaagttccatcccgccccaggccccagcccttctctgcctgaattgttcctacacagctctggttttctggaaccccacsccaaggatcctgaatgccttctcagccagcgcttctgccctggcctcccccaagtcagtatgtgattctacaacctcacrtcaagtgggtcctgcattgcattcccacagctgcttggcgcctgttctcaccacttctccaatcctcttcctaggattgcctccaagaggaccccatatccttccagtaccctcagaccatgaaccccatccccatgagaaacgaagatcccatccttcaccctgtccgagaaggactgccactcacgcctccctcctcctgagccccgtcccagtcctgaccgcaactgtgttctcagggccccaacctcccctcakattgccattcctggttcacaggaaggaccccaaaacctctcggaagcccacctctagccttaaccatagccctttcttttaccctttaaccaggaagccctgaaatctaactgtcccagccaagctggccccttccaaccccaatgtagggaccccaagtcacccccaaactcttcagtcsagatgctcttctttacctctcagacctggttccctaaagctgcatcctttcctgaacctcaaaagcccaacccaggtcctgtttccctagcctaggagccccttagccctccagattcttcctcagtgagcctctgatcctgtcccacccttggcgccttgatccctggtttccagaatccytttccactcccctaacccaccacctcccatcccccagccccagaccccaaatgacctgacgcccagatgcagtgtctgctccagacactgtctcctgtctcctaccctgatccctggaggctgctctactgtcagagcacaaaatctccccaccaggtccagccaccactccaaaagcccagggaacagtccagagtcccaccccttcccaacaccccttgcccatgtccccaacctccagccctggtcctctacccgcaatgtcccttcagacccacagcccagctccctctcctagccttgtccctggcctctcctgccaaccctgcccttcctgacccagcaccgcctctgcaggtgctgcgcccccgattcagtcccggattgtgggaggctgggagtgtgagcagcattcccagccctggcaggcggctctgtaccatttcagcactttccagtgtgggggcatcctggtgcaccgccagtgggtgctcacagctgctcattgcatcagcgagtgagtaggggcctggggtctgggaggagggcatctatgctgccacaggattgacaggccagtggcattccccttggataacctcaggcaagactggggggctgagscagagaggaaggctctggcgcaggtcgcctggcagggcagagctgggctggacacccctctccaaggctgcctgggtctcttgggatctggttctgcttgtgtctctgtgtgactgtgttctggtctctgtcttcctctctctcctctgtctccttgtctctgcatctcccctgtctctgtctgtctctgagtctctctgcggcatctctgtcactgtgtctcaccctccatctctctacccatctctctctctctgggtctctacctcaccgctccctcatccctactaaacacacacccagatggacctaagggaggccccagagtaaaggaagggctttatccccaacttgtgtgcctgggagggggcgcctctccctctgtccagctccccgccccacaggatatccctccactctggagagacacagggaagggctggtttcagcgggagctgggtggggcaactgagggaggaggaaggaggaggcggggcgagaaacgcgcgggagggtgctgggaagggaagggggcctcgaccttggacttcaggccaggccacctgcccctggggagcccgcaccacagccccagctgcagctgagccgctctcaggcctcccctcctccctacctgcccccaccctccccacctgcccccaccctcccccagggcctccctcccttttctctcccacactcggtcactcctgcttcctctctgcctctgtttctagttctcactctgacgtcccgcgtcctttttcatttgtctgcttctcgctcccttccgtgttctgttccctcttcctccctcttccctgggcctgtttctcgctgtccctgtcttttatccttctcatctgcctcttttttgctcaccctgtttctcactgccctcccctccgcctttytcacccctctgtccttttgagctcttttttgctctgtctcttcatttgccttttgcactctcaaamtctttcatcttcccattcgctgtctgtatttctccataactatatctttcttcctctgtctccgcccacccacatttttctctttccctttctctctttggggaccctcccccatgctcccctgccccatccccttttccccttcccrtcttctcatccctccattcccatctttccccagcaattaccagctctggctgggtcrccacaacttgtttgacgacgaaaacacagcccagtttgttcatgtcagtgagagcttcccacaccctggcttcaacatgagcctcctggagaaccacacccgccaagcagacgaggactacagccacgacctcatgctgctccgcctgacagagcctgctgataccatcacagaygctgtgaaggtcgtggagttgcccaccsaggaacccgaagtggggagcacctgtttggcttccggctggggcagcatcgaaccagagaattgtatgtgggggcagactgtgtagcccaaggcggggatggggactcctgygtccaagggagaaagggccagggaagcaggtgaggtcgggctgcagccctttttctcccgggttcgtagtctcatttccagatgatctccagtgtgtggacctcaaaatcctgcctaatgatgagtgcraaaaagcccacgtccagaaggwgacagacttcatgctgtgtgtcggacacctggaaggtggcaaagacacctgtgtggtgaggcagccctgcccccagggtctggaagggctgagggaggggactcagcctctgaactggcttctgagagctaaccaggcatctgcttcactgcttcccagctagctgtagccactcgccccatcagtgccccagctccccctccttcccccgcccatccagggacaactgcatctcaccccccacaccagagttcaccgttcctcgtggtaatgtgttgttaccgtcgagtcagagagtagtcctggagaggtggcctctgcgatgtgcccrcaggggcagcgtcctgcagatggtcctgcccctcctccccctracctgtctgcaggcactgtccwcctggaccctgccccatgtgcygmagctggaccctgaggtcccttcccccttggccaggactggagaccctgtcccctctgtgggaatccctgcccaccttcctctgggagtgggcactggaggccctgtctgcgagctggggctccccaggcagaacttgggccccgtagacctttctcactctcccctcccaccttgtgctcccagggtgattcagggggcccgctgatgtgtgatggtgtgctccaaggtgtcacatcatggggctacgtcccttgtggcacccccaataagccttctgtcgccgtcagagtgctgtcttatgtgaagtggatcgaggacaccatagcggagaactcctgaacgcccagccctgtcccctacccccagtaaaatcaaatgtgcatccaatgtgtgtcacgttctgccatcacctatctttccagatgtggtgcacctggacccactcggctgaggctggggccaccccagctgtgtcaatctcatgcctggaagtctgaggtcaccagcaggtggggaaaggaaggggctgtgacaggtgcagacaaacaggcagggaaaggctcagatcccaaagggcgagtcagggacgccagaacagttcactcacactaggatggaccctgccctggtggggaggtggggggcaatggaaggtctgaggctgagaggttttattgtggcggggaagccagaaaaggtacagagggatgttattgcaagccatgccttcccagggaggggcccgttctgcagaagggtggagttgcaccaaatgctgggcggtgctgtgtccacctggggacaagggtggacatcggagctgaggccggaactccgggacaagggtggacatcggagcaccctggctgagcgggtggagagtggcttcagggtgtggcctgcgaaggctgggcaccaggggcagggccacacaaactagccacactgccgagctcagcgggacgctggacaagtgtctgcagaacgggaggggatgctgggcctctggggtggaggcactgtgaggacccagtgggcagggacaaagccgcaaagggcgggccctagagcgagggctggagtttgccaccggtcccctcggagggcgtggcctgatatcagggggtggggcctcaggggaggtcgaatatccagggcgtggccacgctgaaggggttggccgggcatctggccatggctaccggtcggtgtcctgaagacctcgggtgctattccttggaggtgcttgggtctcatcctcgagggtgtatgaaatgggaaggcccggggtgcgctcggagtcagcgtctgagttccgctgtttggatgtccgcctcgctgcgccctgctgcacggcccacccgcggtagctcagccgccgcgcattcaagggctgccctctgcttcacatgcccactgggcttaggtaggacacggctcctgggagatggctaggtgggccgctgtactccgagtcccaccctaggccccacccgcttcccgaggccccgccctcctcccgaggccccgccctcaccggagtgcagcatcaagtcgctggcgtcccagcacaggtaggaggtcaccaggtaggacaccaccggacttgggtgcaccgccttgccgttaactgaaaagagcgtcaggctgaagagaaatcaggagccctgcaatggggtggggccagagacagaaggctggacagtgagccctatgacccccagtaagaaaagagggactgagacatcctctcccaccctccgtgacaagcagacacacacacacacacacacacacacacacacacacgccctcacaacagacagaaagatacctggagagaggggacaaaaaaagaaagggaaacagagagtgggggagagagacatcccacagatagagtagaactgagtcagagctccccagagacatgctaagacagaggccccgaggggagcagcacggaagtctagatacacctccagaaagccagagagcagggctggggttagggagggcccccrccccccaagccaacacctaccaatgccgaggcagaggaaactgaagacaaagtcggccatgttcaggcggaggaccactggccaggaggagagggccatgggcgggaggaggactcagcacagggccacggccagtaacatgaagcccttgctcatatggatgagaactggggagagggggacaggggccccagagtcamccccagatacccctcttggtcaccctccaaagtcatctctgctgatacccacaagcagcccaacagacaaccccaaagtctggcacatcctcaaaatcacccctactcacctccccaaagtcacctcctagaaaccccaaagaaactccaatctcactcacaaggtcacccccagggacccctaaagtcatcccccagtcacacccttagagttgtcccaaatcacccctacttaacctaaaactcaattctcagacactctcataatcccacacaccccccaaggtcaccccacagaggaccccccaaaggtcatcccactcatcctcaaggttaccccacagaatcacctcaatcatttctttctttcttcttctttttttttttttttttttaagatggagtcttgctctgttgcccaggctggagtgcagtggtgtgatctcggctcactccaacctctgcctttgggctcaagcaattctcctgcctcagcctcccgattagctgatactacacgcagctgctgccacgccagcctaatttttgtatttttagtagagacatggtttcaccatgttggccaggctggtctcaaactcctgacctcaggtgatcggcttcccaaagtgctgggattacaagcgtsagccactgagcccagcctcgatcatttctagaaccacccccacagacacccctggtcaccctacttgaactcctaaaaggtgtctcataacaactcatgttagtatcctcagtttcactcccagacaccctcaacagcaccctcaaagttatccaagacaccacggtcaccccagtcctctccaaagtcaccctacttctgctctagtctctgctagtcaccccccaaggtcccctagtggccccattcacatgccgagaatctcctcagacatcctaatgtcatctcttgttcacacctgagagcccccacaaaacacatacagatttgcacacaagaaaaactttcaagtcaaatactctaaaaccaatgtgcccaaaagcttagttccagtttacagtggatatttatccaacttagacttccagcagaagagaggtttacctgtttccgagatgctacatctcctccttttagccctttttctactttgtctacttttcaacagtgcaaaattgttttagccaaataggccaagacctcatctgctttgtttctggcaaactgcacatctctaatacccaacaagaaagataaaggatcatcatatatacagaagagcaacagcactctgggaagtgggggaaatatcagaccccttggttttttgtttttgttttgttttgttcatagagatggggtctcactgttacccaggctggtctcagattactgagctcaagcaatcctccctccttggcctctcaaagtgctgggattacacgtgtgagccaccatgcccagccagttcccttagttctttctgctcattgaagagtcaagaagcagaggtcagggagaaggcaccaagccagaaaccaagaccttgaatggtgaatttggtctgcccagaacagcagcctgacatctcttggggacaccctccacccaactcacataaccctggatgagggattctcctggcatatgctggcctctgggccacagaggtaatcatgtgattctggctgagccaatcacagtacccyagctgcagaccctgcaattggcccaaagatggacacatgaccaaagcccaaccaatcaagctctgccccaagactttttattaggaagctgtcaaggaaaagcagtctctcctcaaggattacaagcctgaagctgcctaagccttggacctagcttcatggggagagtaaaactaagaaggaaaacagacaagcgaaagagcattgagctgacactgaagtccctggctctcgtcatcccagagagcagcccactctgtgatttggtcagaatgagtggatatttgcagcttacctccccaccatgcatttcacctcctgcccattccccattctcagccccagtcttaagccaatcagccaactgtactccactggccatataattggctcggggtgctcatgtgccccaagccacacaggattcttgcaagaactgttgataacttttttctaccggactcggcagttattaccaactctgccaagttgctaacaactctgccagttttttgtctgtctgctctcagatccatttcccgccctgtcctgttctgcactgcaaggaccacatttcccagcctcctttgctcaccatcttatcactgtgtttgactaatgggaggcactggcagaagactggttctgggaggagagggcaagccagggtatttattagcctctctatctctgcatgtggtgggtcttccgtagtagttgtatctattctctgattctagccacttctgagcaatccaaccatgaacctatgcgttccagagggctgcagtttctggactgtagtaataccacctcctccctttgtccttctggccaagtagcagcatcctgtagttcctaactcctggtttgcctcactatttcctattggcttctcagctcctctgttactcacgaacaaattccctgtatttacttccttctgaagaatctggaatgatttattttccttactggattctgacttgccactacacagagccttgagaatgaagccaatcccatagccaaaaaacagtaatatctgatactatcacttgggcccctggatccacccatgcctgaaggcattcctaccattaccatttttcactcaggtgatcccataaaggatcccctagctagttcaagttagttcactcaagctaatacaactagttcactcaagctagttcaagttagagtttgtgtcacttgtggctgggcacgatggctcacacctgtaatcccagcactttgggaggccgaggcaggtggatcacctgaggtcaggagtttgagaccagcctggccaacatggtgaaactccgtctctactaaaaagataaaagttagccgggcatggcagcgggcgcctgtaatcccagctactccggaggctgaggcaggagaatcgctcaaacccggggggtgaaggttgcagtgaaccaagatcacgccactgcactccagcctgggtgaaagagtgaaactccatctcaaatttaaaaaagtaaaaaataaaaaaaatttaaaaaaaaagagtttgtgtcacttgtgacccaaaaactcctgactaattcaagtcccttccttaggacagcagggagcacagaattcaatgttccctgcataccaactccaaaatcacaatcaaaacctaaaaataagtaatgagaatttaaaaaaacagaactgaatgttcatcaaaaatctggagggagaacctcccgaagccaagaagcaattaataaagtcacagagacaaaggtgaagaaattaaactacctaaaaattctaaggctgggcacagtggctcatgcctgtaatcccagctctttgggaggctggggtgggcagattgcttgagcttacaagttcgagaccagcctgggaaacatggcaaaactctacctctaccaaaaaatacaaaattatagctaggaatagtagcactcccctgtagtcccaactacgtgggaggcagaggtgagaggatggcttgaacctgggaggcggaggttgcagtgagccgagatctcatgccactgcactccagcctgggtgatagagccagactttgtctcagaaaaaaaaaaaaaaattctagatttctataccttaaaaaataataataagggccaggcgcagtggcttatgcctgtaatcccagaactttgggaggctgaggcaggtggatcacctgaggttaagagttcgagacccgcctgaccaacatggtgaaaccccatctgtgctaaaattacaaaaaaattagccaggcacggtggtgccaattacctacaattcccgggtcagtatccaagaccctccaccagccaggaacagtcacggggtcagtatccaacagcctccaccagccagcagcaatcgcctggtcagtatccaagaccccttgccaattattcacaatcaccaggtcagtatccaagaccctacaccag

SEQ ID NO: 5667 - DNA, 37154 bp, Homo sapiens
gctgatgtggtccatgctctctgagccaggcctctcttgacttcttatgtttagttattcatgaaaccactgggcctgtctaaatggccaagtcatataggaagagacagagtgaaagggagagcaagagctagagtgagagaaagagagagagacatcttctcaccttcagacctgatcagaggcaataatgggagaccatgggaggggagagcctgatctgatgattccttttcagttattttctggaaagtttaaaaaatatggtattcttcatggagaagccaagatgttaggctgcaggcagtgcttatgctctctagcctagtgaggaggaaagcagtataggtaaataaaatgacatttagttggtaatataggcagggcctatatcaactgccacctataaaaggcgttggtgatggtctttagggggccattggcaaattgctacaacaaaataataaaataaataaaataacaaaatccaagtttatctcccagaatctatctgggcatatcattactgttggaaagacttatgtttaccaggtgagaaaactgatgctgagaggggttaaatattatgcacagcttctcacatctagtgaagtaactgaactaggatttatatctagggactctgtccttcataggacaagttgctaatttgggggtgttctcagggagaggaaaatgtctatatgctcatatgcacagattatccaaatcaaaactctttctccccattgtcctttctcagttgaactagatgttaataccactattgtattagtcgactaagattgccttctgcagaaaaccacctatgtctcctttctacccaagtgctctggggctcctcccctgcccattctcctccaacatcccattccacattctctttctatctctgcaggactccctgtagtcctccctgcccatccattatctccctcaagctgtcccctcagccttttctaacagggaaaggctggtgccctggtaaagagtcccccacccccatcccactccctggcactagatgggcttgggagacaatgactgcccctccctcatgctgttctgatgtctcttgttccttccagtcacctcccttccaggcccatgaggagggcctgaggcccacactagctagtcttttctctggaggttgtttgggggcagggaggaagtctaaagtagagagaaagcgctgccatgccttaagccaacctttccagaagtataatgcccttgccactagtagtttgggaaacaatttttattggcatgcaggcaaatattttgtttcaatagtggcatatttatttttatggataccttctatttttggcaaggaatgctgattttccatttatggttataatgtaatgttttattttaaaaacaaaatgacttagggaacaaaataagttgacttaaaaataaattattagttaaatatatatttagtatatacaagtagactacagaaatggcaaaatagattgaagttgaagaaacattgccttaagctaagcccactcaggatgaaattttatctgcccccaaatcaacatctcttgaaaagtggtccctatctttccttgtgtcagttcttaacacccagggggtaggcatgcttctcatgtttgttttcatagaatatctgtgttttcaggggaccaccatatgcaaaaatgtcaggggaggggtactcaattggattaagaagccagggcccacagaacagatgttttcaccctactaacccaattgctgtctgctttttagttgccacagtctaaacattctttaatgcattgtctttttcagtcattgctcaagaggtaggttagtataccagttttcatagtgggaaaaattaggagacttaataatttgctgcatatcttggtggccaagttttccagccctggtcagttaggctttaggacacttttcttaggcttcaggaatgtgagcatggaagtagtacagaaaggaagtagtacagaaaggaagtaatacaggaaggaagtagtgcaggaaggaagtagtgcaggaaggaagtggtacaggaaggaagtggtacaggaaggaagtagtgcaggaaggaagaagtataggaaggaagtagtggaggaaggaagtagtacaggaaaagtggttgtaagccatttaacttactttttttcatctgaactgtgacccccaaattatcaatttgtcttgtgaagtcacttcatttaggaaaagcaatgtaaaagtaaaaattagtatttattgtgtgtactaggtgmtttgcatatgtcatttctttaatcctgtaggaaataatatgttctccaggaggtgacaatgtctatatgattagattcacagattacctatccaaatctaagatctccgtcctctctcttcctttcccaagaacccatacatatttctattaattggtagaaataattattaatagactttgtcacttggccactgtgggctctgacgccctctagtgacagaaaaattctttggtagaagaagtaatatccctagatagcagtctacagaattgtttaagcaattatctttacttgagcttgaaactagaatagctaatttgtaacaattaacttttgtaacaaaagaattattatactgatcaaagttctgataatttatcagttaagattttttcagttgtaagaatctagcttaagcagaaactaagaatttgtagagttgggtaactttgggtggtccagggttcaatttaagaaccaaatgcatccagaacttggatagctctaccaaccttgatctttcagcatggtttcctctcagtgtggtttcctctcagcatgagttgactgttttcagctctggcagggccacaagctcccttcacaaccaaccacatcagtttcacatctcacatatttctacttcaaatccaatgaaaaagaaagggtttgtgtcccagtgtttccagtaaagatcccaaaatctactccaactgaatgtgatgtgctgattggcttaagccaagtcacatttcccacccactacctccctccacctacacatatacccaagccctgggattggtaccaatgccactgtgatggttaattttatgtatcaaattagctaggccatggcacttggctatttagtcaaacactatcttagatgtttctgtaaagcaatgttttggatgggattaacatttaaatctttacactttgagtaaaacatttgctttctataatgtcaataggccttatccagttagttgaaggccttaaaaaagaaaaaaaaaaagactgacttccactgagtgagtgagaattatgccagcagacggcctttggacttgaactataactttttcatgggtctccagcctgttggccaatgctaaagttttggacttgccagcctctacaatcatgtgagccaactcctatctatctttccatttattcattctcttggttctatttctctagagaaccctgactaaaagaaccactcacatcaaatagttaagaagaggggagagggacagtttttctaaagacaacttggaagtactattaccagaaggaagaagaaggagaaaggcaggataaacagtcatggatatacactatagctgggagttattaaaatcaacttattgcaatttagtaaaaacaatttggttgacaacattttttaaacattaggaccaaaggggaaaagaacaaaagtcttagtggtaaaaagatgtagaagtttttttttttttttttttttttaatcttaactcttcctgtttttttacatagtcaagattcttgtttaagtgttattcagaatgttcagaaaccaggatatcttttgagtagaagctttaacttatatggtatggtttgaataaggatggttgtccaaaacatctccaacatctgttggagtgcctgaaattctattattaaaattttatttctttgcccttgaaggcctgaggactctcaggaatatgctggtaaaataaaaataacctttagagatgcccaaactgttttccccagaacaccagcattcattaggtgttcattcaatagattcttcaaaggattccaaaggcaaagaagtttggggaacagtatatataattacccaaccctttgacattagcatactaagggccctgagaagttttggattaagaaagttttcaaattaaagtaacccagaattttctaagattatttgaccatgaaacatatgtctccccacaaagcacatattcctatctccttgaacttgaggataattagacgtacgtgggtagagggtaggggaagggggtatggcatagaaagagcaggaccttgggagcaagaatatctaagtttaattcctgactctgctatttattaactaaccatctttgccaatgttgcttaagcttttttggctacatttttttatttgtaaagtaagtttaataatcactcatctcactgggctataatgataagtattaagtaaggaagatccacatatgtgagttgctggcttataattcacactcaagagatactgattttgtcaattgtcctttcccctttttttctctcttccctccttccattccttcttcccttacctctcctttccttccctcacaccccttttccttccttctttttacatttttttatttaaatgaacttttcattttggaatagttttaggatttcaaaaaatttgcagagataatacagagaatgcccatataccatcctccttatcccacttctttttgtgtctattagatgctcagagtgtgtgcacaaggctggcacgcccagggtcttcctcatggcactaacagtctactgaaaggtggaacagagacaagcctatcaacacctacaagactggtggtaagtgcagtgacagatgcaaaacacagggtgatggaaagccctcaggagggtaacctaacctagatttgagggcccaaacaggctccagaagaaaatgtcaactgagaggaagcctgaaggatgaacagtgggctaagcaaagggttattaatgtgttattaatgggttgaatctaattgggaagggagagaggttgcagagtgaggtgcagagcttggtggacgatgccaaaggaatactgaaacctttagtgtgtccagtctggaactgcatccaaattcaggttcagtaatgatgtcattatccaaacataccttctgtaaaattcatgctaaactacctaagagctatctaccgttccaaagcaatagtgactttgaacagtgttcaccagagcacgaaagaattacaagatttttttttaaagaaaattggccaggaaataatgagtaacgaaggacaggaagtaattgtgaatgtttaatatagctggggctatgcgatttggcttaagttgttagctttgttttcctcttgagaaataaaaactaaggggccctcccttttcagagccctatggcgcaacatctgtactttttcatatggttaactgtccattccagaaacgtctgtgagcctctcatgttgcagccacaacatggacagcccagtcaaatgccccgcaagtctttctctgagtgactccagcaattagccaaggctcctgtacccaggcaggacctctgcgctctgagctccattctccttcaagacctccccaacttcccaggttgaactacagcagaagcctttagaaagggcaggaggccggctctcgaggtcctcacctgaagtgagcatgccagccactgcaggaacgccccgggacaggaatgcccatttgtgcaacgaaccctgactccttcctcaccctgacttctccccctccctacccgcgcgcaggccaagttgctgaatcaatggagccctccccaacccgggcgttccccagcgaggcttccttcccatcctcctgaccaccggggcttttcgtgagctcgtctctgatctcgcgcaagagtgacacacaggtgttcaaagacgcttctggggagtgagggaagcggtttacgagtgacttggctggagcctcaggggcgggcactggcacggaacacaccctgaggccagccctggctrcccaggcggagctgcctcttctcccgcgggttggtggacccgctcagtacggagttggggragctctttcacttcggaggattgctcaacaaccatgctgggcatctggaccctcctacctctggtgagccctctcctgcccgggtggaggcttaccccgtcttagtcccggggataggcaaagtggggcgggcgcgggacgcgtgcgggattgcggcggcagcggcgcacgcgggcacctgggagcggcgggctgctgcgggaggcgttggagactggctcccgggggctgttaggaccttccctcaggcccgggtgctcagaacgctggaggacttgcttttcttgggccttgatgcgaagtgctgatcccgctgggcaggcggggcagctccggcgctcctcggagaccactgcgctccacgttgaggtgggcgtggggggcggacaggaattgaagcggaagtctgggaagctttagggtcgctggagggggaccccggttggagagaggagcggaactcctggacaagccctgacaagccaagccaaaggtccgctccggcgcgggtgggtgagtgcgcgccgccccgcgggggcggggagagagcctgcagccttcagaacagatattgctcattttctggcagttctcagacgtaggaaataagtcagcaccgaagcagtggttaagccggagggctcggaagaacggcaccttttctttctcgaaaaagttatatgggggctgaatgagcttctggaggcttgtttaccgttttttattgtcacacagaaaargaaactgccttgtctcccttccgggaattctctctttaasactgtaagtcgctgcctgagtggtttcattttgttttgtttttctgcccttctctttcttcttttgccctttcttagcttgcactcccatggtgatttctgcttggtctcctgctggggttggtggtactcgttcycaccgcacagaacccggcgcctattattggccaagaaacttgagcagcctgttttgaaaagtccctcgctcagaaatgccagcttgcagatggctaatcaaagagacgtggatccaggaggctcatttgagtaccggagcctctgagagtccatggatttttattttattgggccccaacaaagtgccaggcatagcgagagaagtgtttacaaatgtgatctccgcggattctcacgagagccatgtagtggggaagataaccacatccccattttacagatggcgaaatgaggttcagagagcttcagtaattcagccaagatcacacagctagtaaatgggagatatgggattgaactcagatctaattccaaaactcaggctgttcgctgattgcatctgatatccagattacaccaagaggctgagatgtctgggtccattttatgattagaaaaaaaaatcctgttcctttcagaaatagtgtgcactatttgggmttctttagaaacwtccttggagaaaattaatgattcaagattgagaaaacatttatacaacctcaggccacactcttctctctcttgttattaaccattgcaccactgcwatgttggctgctttgaaaatctcatagtttttggacagcagtattagtaaagtgtaagaaaattgtcaaagcttggagctatgcttgttgaacttttgtaccaatagcacctttaccagaggctgcgtgtttaaagcccgaagaaaactttgcttttctgaaagaatacacacacacacgcatatgtaaatattcatacatttatgtatatatayatattataatacctataagttaggtataacttatatttgtatatgatatatggcctaggaaattaaggcttattaaataaaatttataaatgcagatgagtcaaatacaaagatcagacataactctatcacctaagtaatcattgtttacgttttgcagtttatcttccatttctcccctctaatmtgactcttttaaatttagttacacagaaattggttttgcgctcacgacatgcctaacatcaggcctttatccttaaagaagtttcracactcttgtgtcacctcatgtgtctacagaaaatgtttgcttttatgccttcacggttatgttttcttagtagtagcaataaataaaatagatgcaaagtgctaattacttggaatacagaagcaaattttaattctattaatgggctggacatagatgggtggggagctgttttctgcttttcccctcttcccctagtcctctgactctggtgataactatagtcaacaagtatccccatccttaaccccttttgcttctctttctctttccttctctcaaccttcctggtgttagttttctctttcctatttctgagtgtttttactccgacacttacaataaaaaagtttgaaatcccaaaaagttgacaaatttctaaaggagacagaaaaagagtcaaacttactttacaaattaatttgagaaatagctgtgggttgcattttttttttttattgtgcatgaccctgttattggccaagaaacttgagcagcctgttttggaaagtccctcgctcagaaatcccagcttgctaattgaagggatgtggatccatgaggctcatttgaattccgaagcctctaagagtccatggatttttattttattgggccccaacaggttttgtcttgcattatttaggacattggccaggcaatcactggacagccagtttgctctcctttacattttgtagaatggttatcttatggtcaaaggaaagggagagggcctttggaaaataaagctgtgtatttacaagcagtcatacagaatagttttgtggggaaaataaagaacagttatttaatttgtaatttaatcatttttcttaaaccaacccaaagagcataaaatggaatatttatttatttttgtagcttaatttgtaatttaataatttttcttaagccaacctaacgaacatattgggctgtttattttcatttttaatgggccatatttacatcacaaaggacttgagaagtcttacaaatacaataaaatgataaaatatgaattaagacattagcaaccaggatggaaaaacacaaatttgtaaatgatggccaggtttgcaagcaaaaattaaattgataaatggcagcacccccactaccagctayagttagactratgaaaaatcctctaatgttcatgcctgaaatacagttaccacccttagcagcaaattagaggcaaagaagttctggaatttggacgttgtctctgagtaagctctttgagacactggacaagtaatttccttctgaatactcttatactgacacataggagaagtgtcagtgtttcaaaggaatctctttgaaggctactacattgctttaggggtgccagattaccagagtaaactgccagtttgagagaataactgtttcttaagagatggtctgaaacctaagtaaggaaatccccccacttgaaagcccctaggaagttaattgcttttggcaaattatcttgggccccaaaagtcccttgatgagcacatgttttgtaataggtactaaagactatttacttatgatgaaaaataaaataacacaatttaaaacttgaaattgataaaaagcaacttgaaaccaaatttaggacagtgaacccatccctttcttatttttaaataggtaaatatagaaaaaatgaccacatgatgtgaaacaaaaagcaaatatttaaaaactacatttatactttatctcaccacactaatgtaaagaattttgattttacttataaattcttagccttgtctacacatatacataattgcatgtttaatttgagctatatatagtctgttttttgttcctttgcatgttacacaaacctttttctatttcyacataatttttatctcatattttttattggatacattatagagagagcatttattaaatgagctgggattactataatttttattatttattttttaatttattacttatttttataatttactattgaaaaaaagcatttcttaaatgtactgggatacatatatatatatgactttttcttgttactaaaaaattactcatagaacttacatattaaaattttaggacttgtgatgaaaaataataaaataatttaaaacgataaaaagcaacataattttatatgttgtaccttgtacttccttataaggtacaacactrcaatagccttagtgtgtagttttctttttgctatgtatgtatatatatattcataaaagtggaaaaataacatttaataaatcctctttattttctggaaaatccttgctttaaaaaaagtctttagctttttatatagttctacttctaacaccaattaaatatcttcaattcagtctcaagcaggaacaaatcttcagtccacttgcctacctttactgtctttgaagtgacagtgtgagtagtaaagcccaaatcagagagaaattgacttttgtaagattggtaacttcaccttccccggaaggaaatgaggtggttcttccctttgatcacaactgctttcttgatttgaaataaactgttgtacagcccagtcaccccatctttagacatttagaaatggcaatcatagttatataggacaactagcctgagtcccactaagtagaaatgatagtgaatttagtataagattatacctttaggctgggcaggtgactcacacctgtcacccagcacttcaggaggccaaggtgggtggatcatggatcacttgagattaggagtttgagaccagcctggccaacatggcaaaaacccaactctactgaaaatacacaaattagctgggtgtggtggcgtgcctgttatctcagctactcgggaggtcgcggcaggagaatcactggaacctgggaggtggaagttgcagtgagccaagatcatgccactgcactccaggctgggcgacagagtgagactccgtctacaaagaaaacaaagaaacaaaaaatcatacctttagagcaaggccagccttgtgaattagcaaatctgactacaaattcaatcagcagatgtactcagcccagcaaagtgagcaagcttactataggttgtgttaaggcatggactgggataaactggcaaaattagagtaaatttgacaatttgacattggattcattaatgatagcctgtccttcaatgaagtcaggcagcattgtgtttctattcacctctgtgttttgtgaggctataaaaatataagatatgagaaatgtgaatactttttatttgtgagggcagatatcttgaaaaagagagcgagaggaagtcagagtatgcgggtgaagactcttgtttttttgctgaggatttagctttggtttttagccattctcacagagatcattggtcctaattaactggttgttgttgttttttttcatgtgaatgtctgtaaggtttcaggcttgattttaaaaattgggcctatactcacagaaagacaaatactgcatgatctcgtttatatgtggaatctaaaagttttgaatccataaaagyagagagtagaatagtggttaccagaggctagttgggggcaaagttgggggatttagggagatattggtcaaaggatacaaaatttcagttaggaggaataagttcaagagatctagtgtacaacttgatgtctatagctaataacaatgtattgtatacttgaaaattactaagagtagattttaagtgttctcgccacacacacacaaaagaaaatgataagtatgtgaaggaatgcccaatgtaattagctcgatttagctaattatcttccaaaatatgtacataattatcttccaaaatatgtacataattcaagacatcatgttatataccataaatatatayaatttttttatttgtcgaataaaaataatacaaaaaaaccctgggcctatactgcccacaggtagtggccacaggcagagctggtcccaagcccctccctctctctgtagtcccttatcccaggttgctttattcttgtatgacccacgtggcccctctgggcttgtaagggctctggggctgtattttaggactctatagcccttacattacccatttcctctaccaaaggtcatttctcttatcttcaagcttatttttggaagggtcattatttcttcatgagaagtcaaattctgatttgcaagtgctgaacacagatgccattagtctataaaactcttatattctcacatgtaaatgtagtaacctgctaacctcagattctgcttcctctaacctagttgccctgcaactgtgatgaacctcaaaatcaccaagggtacttccccattctcagagatcctgattccttaggtctatgtaggggccttagcactttttattaaataatgcatcactacaggattctgatgtctgtcggggtcttgagaactatttttctgactctagcactaaactcaaaatgtaatttcagatggaatttcctaggctcattcattttattttatttatggcttggccagtcatggatctaatcagtaacttgcaactgttgcttcaactacctctgtcctggactttccagagattggctttaagaaagaaagaggacatccctgggataagattaccatgtgtatttttatgtacacattttgaaaaacatacaaatgaatgggatctttgcttatctcttccatgtagaaaaatttattttacttctatttcaggttttcaataatgtagtaggacaagatgacatcactatatccctgttttttacacagatatattagagatgcattatcttattggaaattttaaactattcaataataaactattagtcttttagaatttctttttcctcaagtgttgataagtaactgaaagtctacaagcagacaagcagaattagtcggtggaacttcatttcttgctccatttttgtcctcagcagtagagggtggtgagatttcaacccagcctagcaggaccaataagtctggaaagaagtagctctagttcatattggcacctgctaattctagttctgaagaccatgggaaatctcttgcctatttagctcagtgatcatccaagatgggaaattcttgggctcagctgtgagggatcccaagtttatatgtamcactaatgtctcacaaatcaagaatccaagagaatcaagagactatagttcattccttatattaaattcttaggactgccaactgggtggctacagttttgggggctagaagtctgatatcaaggtgccaactggactggttccttctgaggaccacgagggcaggatctgttcaggcttgtagatggccttcttttccatgtgtcttcacattatcttcctctgtttgtatgtgtgtccaaatttcctcttctttttttttaatttagaaatttatactgtctacaagctttatatagctttagttaaaaaaaagcaaaaaaaaaaaaaaatcaaaacaaaaacagtgaagccaagacactcttccaaagtctggacccttccggccttccaaatacaagagctctggaagttgtatataccaaatttcctcttcttaaaatgtcaccagtcacattggattaaggcttaccctattaacaccattttaacttaatcacctctgtaaagaccctatctcctgatacagtcayattcggatgctcaggaagttagggtatcrgtatcactatatgaatttgggagttgggggaggacacagtttagcccatgacagtcctgaatctcctttgctagatgcatgactgtgggccagtcacttcaccagttgggatactgccatctctatcagaaaaggggtttgggctaggtcatctataaagtcctttctgctctaaattgtaaatataatgagataccaacatttagtttaattgtttaaaattttagaagctaactggrtgctttgctggtgtcaacactcccctttacaaaaaaaaattcggccgggcatggtggctcacgcctgtaatcccaacactttgggaggccgaggcaggcggatcacggggtcgagagattgagaccatctggccaacatggtgaaaccccgtctctactaaaaacacaaaaattagctgggcctggtggtgcacatctgtagtcccagctactcgggaagctgaggcaggagagtcacttgaacccgggaggcggagcttgcagtgagccgagatcgcgccactgcacctccagcctggcaacagagcgagactccgtctcaaaaaaaaaaaaaaataaataaaaaaaaawaaaataaaataaaataaaaatctcactttctgtttctactgttctctcaagtacccctctgccttctgttacttctttgctgcattctgagaggaatggggtggggagcactctttcctgtagaaccccataacccatctattttcatcaatttatttgaaattcaaagccaggggttaaaatgtccactttcaatttgagatgtctaactttcagataaatctattaacatgcatttctaagtgacttttaagctaagcattttattttattgagctcgtatggaagggtaactattatacttgtataataaagtgcactttcaaaaatactcggttcaaatgtaaaataatattcgtaatattttaagacaaacctcctagaacttatatgtgtctttcttcccagagcagtctytatgggtgcctaaacaatactgcattattagatttttttcagtttataagccacacaagaaagttaacccatgtcatctctagaggcataaaaatagacagttgttctgagaaacatatctgtttattcctagttcagtaacagcgcaatgagatcctaaattatgaggtactttttgtttatcttattgtctcattggcaaccagcaactcctgttgcatttttgacatgggaatctatcagggtgtggttaataaagtacrtttccatggtaagtattctttaagaaaaaataaaccaagatttcatcagagacagaaattactgcaaactgtacttacyagtttctggtgatttgtataactgagctttcratttcaaaaattaaaaagttctctttagtgtaacatatttttgtgtcyagtaattttacttcaaaaataaaagagaattttctttaccatcaaacaacgttgctgtaatgagtggtgatatatttagtcctagaggaccaaagagaaataaaatggctttgattatgctggtttaagaaaatatatccgatkaaacagargttaatatttgtgatgtttgatttagtaaaattataagactaccaaagaaaactagaagagcaaaataaccaaaayttatataaagawttcaatgttgataattcaaaggtttagaattttttccacctttcaaatactaagttgctgttatagatttactaccattattacccagattttcyattttactaaaaaataataacacagttcgttatgataaatcagtatagatctttaggctcaacacaaccctgctaccttttaaacttttttattatacaacaaacacatatgcattatcaagaaaagatgagtttagcaaaatgaagaaaaatagtcttatcaactagaaataagcaccattaaaatttctgtgtgttaaaagataatatrctgctgaaactttttttttcttgaaatgtccctcttttctttcacttttcattttcttaatccctaaccttctactgttgaattttctggaccaccgttataccccctcatcaatagggcatttttttctgcagtagctgagcacaatggtcatattgaagaaattcccttgtgggggctttgcctagaggtaaaatcctcttggccgggtgcgttggctcatgcctgtaatcccagcactttgggaagctgaggcgggagcatcttctgaggtcaggagtttgagaytagcctggccaacrtggtgaaatgccgtctctactaaaaatacaraaaattagccrtcatagtggtgcattcctgtaatcccacctactcgggaggctgaggcaggagaattgcttgaatgccggaggcagaggttgtagtgagccaagatctagattgtgccactgtgctccagcctgggtgacagagcaagactccgtctaaaacaaaacaaaacaaaacaacaacaacaaaaacaaagtaaaaccctcttcactgtgatgactctaaagcttgcttttgtctctctaaatcacaacaaaccgtttgcagtgtgatgctgtgctcaaaattgagaattctcactgactgttccaggcatctgtctactcattcttgccatgctgagggctgtcatttctcaccactgaatgcctttttttttttttgtgcttctttttaaaagtcttttcctgtttgctttgaacttcaataaaaacagggggtaagaaggtaatatgcttttattttgtctgtggggtttttttcttccttcttttggttccttttcagatcctagctcatcaaggccatttgccacactgacactggaataagcctgaatgggggtctatatttcttccagtagttagtttaattcggtcattgagctgttgctctatttgtaaccgtcatgctagatccgagggctgactattcctgagaaagtgtggagatcctttcagactgccatggtgctagggcagagtttcagtcattatcttctgtgtctgctaattcttgcatcatttcttctactctgtaacctggttggctatgaaaagtgattcttcctcactgatgctgcaggcaatgggtgaatatccaattgttctctcaggttcttgtcatcggatacaaagaacaaatttcatgtgtccctgtttctgagaggttcaaagggagcaaatgcacagattctagcttaggatgacttccagcttctaactatttgtctgtgcattccatttcctcacccctgcgagaggttgcagtcatggtaacggctgttctgagaaattcagtgcccaaactggagggaggggaacacaaactcagcttcttcccragcttcagggcagggctggcaagttttgccttccccgccagcaagagccctggctttaggggtcttgctacagttttcccagactggaggtcttggggctggattctggttcttagcgaattcttgccaaacacctcccctttccccagyatccatttgttttgaaggttctttgcaggcttcttgccaataattgtcttaaaacaaatggagttgtttgcatacctagatggagtaaaatatttaggaaactattctacaaatatgaaacagcccagatttgggccagaagtcctggtcctgagtctcttgttagccactcttaactgtgaattattggacaaatcatttctcgcactctgtgtaatctgtcacctgggtacttgatgatttaaaccaggaattgtggcccttctcataatactgtctcctaaatattgggtgaatttagtatatcaaggagggcagggcactatacccgtaggggactctctctctccctctgtctctttgcctttctcagatatgcatctttggtggcagacctggggttcaaaccacagttgttttgaaatttctctttccttctccactatgctccccctcactgaaactttaataataaaagtagcacacttattgggcatgtatttgttatgtkccaggttctgtgctaacagctttaagtgcattattccacgtattttcacaacaagcctgtgaggaagaggttatttccacttatagataaagaaactgagacttggagaatgtaagtgattttacccacaaacacagggcagtaagtgggaggccctgttcaccttagaacacctggcttctatcattcatggtgctgtttctagtgtggtttgaagaacctgagatccaaactgctatacaagtgacctgctgctttcttggagagagaaatctgaaagacagtggagccctcacattgtctttgcctgtgcacagcagatactgccaattttgggtgggttacacttgtttaccacgttgcttacttcagaaatcaataaaattctcttcatgcttttattttacaggttcttacgtctgttrctagattatcgtccaaaagtgttaatgcccaagtgrctgacatcaactccaagggattggaattgaggaagactgttactacagttgagactcaraacttggaaggcctgcatcatgatggccaattctgccataarccctgtcctccaggtatgttacacaaaacatccagagattacagtgaaagtcacagttaggagtagcacatagtaatcatgactataataattttacagtttttggttcccctatattatataacataactgagagaaaaacaactatgaaattattttccaaagatgagttttatttatatttatcaygcttatttgatgtggttatggataaatttaatttacaagtgacatgcacctctgaaatgagaagactggtctatttggctccatttttttctaagcaaaaatgactcatttgtgaatatgaaagcttatcatgtcaaaactgattaggatctaccataacaatagtggaactctgaaagcaagagacttctcctcttaagggatatgtctcagcacttcccttcaatcagaaggtctctaagaaagctgtcctggcactgaagcctgcaaaatatatttgcattttgcagctgaataactagacgaataagaaaagcaacaggcagaaaccaacagcttttttttttaaatcaatactttgaagggcaaactaatttcagatcacaaatccttcaaacactggtaaattagaagctaagcaaaatgcaattgtgcaaacatttcttcaactttgagtagagttgaaaaaaggaaaatagcacatgggttcatgtgatagattaatagaacaaaaaaggactgtagtatgtttcatggttgtcctcccaggcttccagcactcaagctgtaaaacaggatgggtcctgtttgtgaaaagattctaccagtctccctgtgcttcatgtccagattttaataaccgttatggaaaaatctcccctataacccaacccatttatacttaaacccatttacacttaaatcttctccaacacgaataaagaatggcgtcctggctttattataacctgctaaacacaatcaatttgctctatgaattgaaatctttgttcataattttaaaacctaaaatgtaaattaaaatgaacaaaatatgctttgcacatcaaactgtcaaggatttttgtctattgctttttcggttttgctttgttttattttaatttaagaagtgaatgtaaattgttacaaacttttaagaaatacatttggatatatgagtcaaaaatttgaaaaaaaattttttttaacttttttttcttattattatactttaagttttagggtacacatgcacaatctgcaggttagttacatatgtatacatgtgccatgctggtgcactgcacccactaactcgtcatctagcattaggtatatctcccaatgctatccctcccccctccccccaacccactgtttatacttgctaagatagcaattaatttatacgaaaataccctgagaaaataatcaaaaataaaggaaaatattgtacacatgatatttcattatcaatatgatgtaggattccttaggtaaattctggaatatttaaagactgaaatagtatgtatcaaagtcatgttttctgatatatttctaatataatcctcaattatataaaccttcttaagtaatttccaactgatctggctggattaactgattctccctgatccgtctataaaatatcctggatggcatccaaccatgttaaatactcttcccacttcaattccctcttgttgaattttaggcttatcaatatctaagttgcttccaaatctgtttatgctcattagtgttgtgatattcatatgtaatttgattgaatattgcataaattaatgaaatacaaatacagagraaagacagattttatttctaagaaaactaggttgagtgctttggagaattcaataaagatgagctgctaaaatgttgttgatgaattttgtgagggaaaaataaaagttaagtagtaggaaaaaycacaaaaatctctaaagccattcatasagattattggtatgtttatgttttcctttcatcaaaaacgaagggagggagggagggagggagggaggagaaaaaaagaaagaaatgaaaaaggaagagaaaaatagacaaacaggaaattataggtgatgcattatggatgtgacttaagaaagaacctgggattataataacttctatatcacaaaattgtcaaatgattatatagttatattttataaattaaaacaaaatatttacagtatttttaagtgatttcctatgtaaattgacatttttgattaaatgatcaaagaagtcctccccacatcatcatattcaataagaaggattctatggtatactgcacacatatttcatatatacacattgtacatatatatatatacacacctgttatatatatgctcatgcatatacatgtatgtatgtattatatgcataggaatgcaacaaaataacggcaatatctccagattgttgatatatagttttttgtttgtttgtttgtctgtttttttgagatggagtctcactctgtagtccaggctgaagtgcagtggcatgatctcagctcactgcaacctctgccttctgggttcaagcaattctgcagcctcagcctcccaagtagctgggactacaggagcacaccacaacaccgggataattttttgtgtttttaatagaggcggggtttcaccatgttggtcagtctggtctcaaactcctgacctcaggtgatctgcctgcctkggcctcccaatctgctgggattacagacatgacccactgtgcccggcctgatacataagttcttattatactttcctgccttttccaacatttctataataagcatatgtaccattatactaaaaaaagtattttaaaatctgattttcaataaaacaactacttattttcttattttaataaattttgttttcatactttggaggaacgaaagaacctgtggtttactgtatctccattataccaaggaagttgtgctaggcacattctgtaagataattcattaaagagaccaattcattcagagaccagtataataccactagcaaaaaataaaattatacttggacttgggttctgttttctttaaatattgctacaatgttatatagccctatgcactatttttgaattttgttctgggaatctccagtttgttttttactattgacagactattatctttacttactaaaatagcatatatatttacatgtcataatttgctcatgtagtaaatattttgttttatcaaaaagaatatatgaagttattaaggaattcaygttcctaggaaacacagcagaaattaattttgctgtataggtgagcagagcagattaaactgcttatatttttaaaactagttataccattaacaattagagtcactagtaatgtttttctcacacttcccttgatattttctgtcactttcttcttaattctctattcccttaccttcatctagctttccccatagcatttttttagcacttgatatcaatatatttatttgtgtattgtctgcctgcatcccaagaaggtgaagtctttggtgatgaagggtttatcttatttcctgcataatatcaaacttctaaaaagttcctaggactcaataggcatttaataaacacctatcagataaatgaattttttaagagarcacattacataatgctttctaatagcaatacagtgacaaactttatttttaaagtaaattaatgcaaatatgtatattatttaaaattgtttgtttttaagataacaagcctgatagataataaattttggcataaatatgttaatgcttatcaaaactcatcagtacatatcctgtcttttgatgaaaaagtaatagaaaggggagaacaaagagaactctcatgctcactaggcaggccgagtgcagctctgacagcaatgcaagagaaatattactatctccatcatatgcaggatgaaatttaggcttggagaaaacaacacttygttaaagattttatagctgctcaagatttgaccaaggcttttaaaacttcaaatgytcttttccttattacactgtttcttatcaggatttgtggactttggaaagtaaaatgaaaagtcagagcaatgtgagttagtttgataatctcagtggccagtaacagctatccccactctgaatatataccaaccaacctctcccctttctccaaggaagttagttcttggcaaaggcatttcatgcagtgtactttgtcattctaaccttcctttttttttgtatgctcctgttgctaatcatcctatttctatgggcttcagtcactcttttagcttttgtcttgggagactttctgtctgttgacatgacttttaaaataatcttctcccccattgtatttatatctcattagcctacccccyctccccttgtgttttagaagagttttattgtctgtcatccctctatasttcccaccctgttacctgcccgtgtcctgttcaaacacttgctccttttttccttgggcaggtgaaaggaaagctagggactgmacrgtcaatggggatgaaccagacygcgtgccctgccaagaagggaaggagtacacagacaaagcccatttttcttccaaatgcagaagatgtagattgtgtgatgaaggacatggtaagagtcttaaaatgcaattgaaagaggccaatcttggaatttyatgtagaaccatttataagacaatttgaaattgsggcctactgtggtgctatgttgacacacaggaaagggaaggacaggtggctagggtaccgcagaaccaggtgccgagctaactactggtctagacctttatgagtaagtctaggcaattcttccagatataggagaatgagtaaatatgaaccctaggaacagggttcatcagctcaaatcaaaagctcagaaattattttttttctggccttgacttacgcttatataatggtgctcgttcatggccagaaaaattcagaagcctgcagatacaaggacacagaaatccaaaaggtaggtaggaatgctccccctttctttggggatttagtttgtcctgataattccatctggggacctgaattttcatggatatctcaatgtattctaaggacccagattgaagtataacagaagtgtttctagttttgtttgacatgaagaaacctctggacataaagcttttcccatccctattcagcctataaagcaatgtttctcatccctggcagtgcattagaattgcttagggagctactaaaaatgtttcatgtttaggtcccayctcagggcaattacatcagagtctctgagtgaggaccttggtattggcctgatggagtaagtctggggtagagcctaacattctacatttttaacaagctcccaggtgatgctcatgctgccagtccccaggtcaccctttgagtgttaaggctagagactagaggaacaggggagacgtctaagtattggtgaggtttgtcttggttgctgctaaatgattgctggccatttcaacctggggtttcctgttctgtgtttaaacactgactgtattactggtgtcatgctgtgactgttgatataagcagtggatctcaaaaatccatgcagctcctgcccaccattttcatagtctgcttataattagccgctataactaatagtttccaaactgattttctaggcttagaagtggaaataaactgcacccggayccagaataccaagtgcagatgtaaaccaaactttttttgtaactctactgtatgtgaacactgtgacccttgcaccaagtaagttttagtctttctctgattaaaacactagatataacatgagagttatcattttcctagggaagtaacactgactgagagttaagaattagggttctagtcctgctttgcctccaagcaactagatgactgtttgctcatttaaacactggtgaacttcctgtgtaggtgacactttgctggccacttaagctaaagatatgagccrgacatatgcctggcatcaaggtatcagtccagaagcacagacagtcaaggaaagcaatggttattgtgtttcaacagcatgagaatarcatcagaagagacttatgttccaggtgttacaaattatacagaaaaacttttcaactctgcctgaggagatggaggtgaagacatgaatgtgtctcatgacttgaatcttgaagaaagaaaagaaagagcattaacaggtgcacatggatggaatgcacattataggcagggaaacagcagctgcaaagagacaaaggaagctcaggaaaacagaatacctggctggagtgtaggaaagactgagaagcgttcagggctgaatcatgaagggccttgtcttttaggctaaagaggttggttttgacccaaagttagagaacctgccttgtaagtcatcttgggaagcttttaggagttcatctaataggcttaagaaataagcacatgatgccttatgtttyatttgctargaaaattttatgtacagttgtcccaggctctcccctggccacaagtgtctgagagtgcccctatgatgacaggctaggtaggcattggggaagcagctgacttagtaaaataataacaataatagtaattccaaatatttcataatcttgatttaattttcttgtcatcataaccttttgaaatagataatattatttccatgttattgatgagataaaaggctcatggcagtgtgacttcccaagctcacctagtcaggtaatgggcagaggctgtgaactcagacaacctgattgtgaatgtttgtctgtctgaaggaaatcacacatgaacctcttgagtctcctgatcaccaccggttgctaaaagtggcagcctctaagggccagctgagtaccctccctgagctacatcatgggcktggctatcacctggccattttcttggtctataggaattttttgaaattacttttgacagtttattttaagagctagtttaagctataggatttacgtgttcagtttattacyaggtttaagtttatttttgtatccacttcatctctcttgtgtgtcactattttcctatcttcctttaactcttgaaatcttaagacartcattccttatgatatttttcatccagccatccaaattatattaacttgtgccagctttagatactaatttagaaatatttgaaggaatacgtttgccagagatgcaaagatgaataaaatggcccctaatttacaaagtgccattgaaaattataaaggaattattctgccaggcttttgaatttctcctgtatttttttttctagatgtgaacatggaatcatcaaggaatgcacactcaccagcaacaccaagtgcaaagaggaaggtaattatttttttacggttatattctcctttcccccaaccccatggaaagatgtgaagaaaaaccaatcactcttgattastagaaagtcctttatttaatcttaaagattgcttattttcatataaaatgtccaatgttccaacctacaggatccagatctaacttggggtggctttgtcttcttcttttgccaattccactaattgtttggggtaagttcttgctttgttcaaactgcagattgaaataacttgggaagtagttcacaaagatttgcctcattcttacctataaaaagctaccactttggtagatttatgtattgttaatttcttgcccctgaatgcagccttgagagctgactgataagaacraatgaaattattcctcagctagtttctgagcaacagttttggggcattgagtggtattctcatccttcctatgaacaggtgttctctgcagcagcagaattggccaaaaatcagaagyaattcttcactattcattgagatctccctatgcaaaaagagaacacaagaagcaaaggcattcccaggaaacacattgcagggaacactttaaaaacttgtacttcactgcctcctcttcctcggcctaattgcttgtttttaattatttctccttcttaacttaaaatactatggggacacatgttatacaaaggtgacttagtagagtcagtagaaaagccaaaattagatattatcataattagtctagaaaaatccctttaagtcattcatcaactacagggtcacaccaactttcagtaacttagaagtattcaattttcccttctcagaacaattatctgtttcttcagttcagttgaagaagaaagtttgccttgcctttagcggttgtttagctgaaaatacatttgggatatttaagcactgtaattgtgctcagagacatacagattcttctatctcacattgactttaatgcatacacctattgagtatgtatgcttgagttatttgtgtgtgtatttcatttctgggcatccatagcaagttgatgttgacttgcttgtcctacggcttctgcatcctgccatagtcttgccgtccacatctttgctggacagagagtggtgcttgccatatggtaagtcaaaagccatctccttgctaggccagcctgtggtaattagatgactaattaagatatgtcctttcactagaacacttgacttagtagtacgaaagttccaaaatcagcggtctcctgcgatgtttggccacttttaagtttcactgaatttctcctttttccttcttatatttctcttagtgtgaaagtatgttctcacatgcattctacaaggctgagacctgagttgataaaatttctttgttctttcagtgaagagaaaggaagtacagaaaacatgcagaaagcacagaaaggaaaaccaaggttctcatgaatctccaamyttaaatcctgtaggtattgaaataggtatcagctttccttgaaaagaaaaatagagaaattagtgatttggctttttgttacttccttttacttttttgtttcttgtttgtttcattttgtttgagatggagtcttgctccatagcccaggctggagtgcaggggtgcaatcatggctcactgcagcctcaaagtcctgggctcaagtgatcctcctgcctcaactgtgaccctgggactacaggcatgcaccaccatgccaggttaattttttatttttattttttatagagacagggttcactttgttgcccaggctgrtctcaaacttttgacctcaagcaatccttctgcctcagcctcccaaagttctgggattataggtgtgagccatcacatccggcctgttactttctttatttaaacattgcttgtgtttgtgkgtgcataggttaaaggggcctcacagatgaattatgatatggtacccaaattaaaagtaaacttgtacacaaaaaccgtaagaatcaacaaaggagggaattgagagtgtgctgaaaatgagctgaaaaaagaacttggccaacctccatgttccgtgttgttgttatccctgcagagaaacagcctttaccaggcatgggttcagtatccaagcctgagcaaagagattgctcttaaagtttgtcataagggcacagcttaactttctctggctgccggttgaccttatgtctcaccatatcttttcccaacatggtatcaatatatttcagatagcaagaaatacaccgagaaaagaaaccagttgcacttaatggaattattttcttatttggggccagggctcagtgggagttaggattctttaaattaatatggtaaaaaaaatttcaatttgagccattttctggtattaagaataagaatagttacagggaagaaaattttrgagtagttatatttattatttattttaataagtctatatgaaaaataacctcmacctattttatgaattctttaggtttcttgcctttaaaaactaagacaatattgcttagtttctggcaaggccggaacctttcagaataaaaattgaatggtaaaagtaaccttcttaatcacttaatctagcttcctaattttatacatcaagcaactgattgtacttctttctgaattaaggaaaaattagaagttcacatttagaatattctaaagatatatttttatttgtctttctctgcttccattttttgctttctaggaaacagtggcaataaatttatctggtaaggcttttatcattttatttcatagagatggcatcctttagagtaataggccaatttcagagtaaaataatrttactaatttcagtgacatattatgggatcttgttatttctcatacaattctacctgctcagcataaagcatttatcaggcagtttgtttaaatttataatgartactcatagttaaaaataatcaagtaacaataagacacaatagtctgaggcttaagaaacttttccttcataatcagctagatgtattacagaactcctgcctaaaaagatctagaggttaaagtgtactgtagactcaggtattatcagtgtacccaactctataacaacatacatgattccattcagtkgttctttgatctgtgatttagagataagatgatcataaactctttgcttatacttttagatttgtgggtcattgatcattggatccataagagatgttataggtgatcttttccaatcctcttaatttataaatgagaaaagaagatacagaaatgttatgtattgtggcccaggttatttaacaaattactgggtatatggcaggatttggagttagaactcaaggttgtcttgtttctgtattcccctagtcagctcttcatagacctttaggacttagctataytctgaagtactataaaaagagaaataaacatggttttcactaatgggaatttcatttagaaaaacaaattttcagactattttctatttttcagatgttgacttgagtaaatatatcaccactattgctggagtcatgmmactaagtcaagttaaaggctttsttyvaaagaatrrtgtcaatgaagmcaaaakabdtgagatcaagaatgacaatgtccaagacahagcarrayagaaagttyaactgcttcgtaattggcatcaacttcatggaaagaaagaagcgtatgacacattgattaaagatctcaaaaaagccaatctttgtaytcttgcagagaaaaktcagactatcatcctcaaggacattactagtgactcagaaaattcaaacttcagaaatgaaatccaaagcttggtctagagtgaaaaacaacaaattcagttctgagtatatgcaattagtgtttgaaaagattcttaatagctggctgtaaatactgcttggttttttactgggtacattttatcatttattagcgctgaagagccaacatatttgtagatttttaatatctcatgattctgcctccaaggatgtttaaaatctagttgggaaaacaaacttcatcaagagtaaatgcagtggcatgctaagtacccaaataggagtgtatgcagaggatgaaagattaagattatgctctggcatctaacatatgattctgtagtatgaatgtaatcagtgtatgttagtacaaatgtctatccacaggctaaccccactctatgaatcaatagaagaagctatgaccttttgctgaaatatcagttactgaacaggcaggccactttgcctctaaattacctctgataattctagagattttaccatatttctaaactttgtttataactctgagaagatcatatttatgtaaagtatatgtatttgagtgcagaatttaaataaggctctacctcaaagwcctttgcacagtttattggtgtcatattatacaatatttcaattgtgaattcacatagaaaacattaaattataatgtttgactattatatatgtgtatgcattttactggctcaaaactacctacttctttctcaggcatcaaaagcattttgagcaggagagtattactagagctttgccacctctccatttttgccttggtgctcatcttaatggcctaatgcacccccaaacatggaaatatcaccaaaaaatacttaatagtccaccaaaaggcaagactgcccttagaaattctagcctggtttggagatactaactgctctcagagaaagtagctttgtgacatgtcatgaacccatgtttgcaatcaaagatgataaaatagattcttatttttcccccacccccgaaaatgttcaataatgtcccatgtaaaacctgctacaaatggcagcttatacatagcaatggtaaaatcatcatctggatttaggaattgctcttgtcatacccycaagtttctaagatttaagattctccttactactatcctacgtttaaatatctttgaaagtttgtattaaatgtgaattttaagaaataatatttatatttctgtaaatgtaaactgtgaagatagttataaactgaagcagatacctggaaccacctaaagaacttccatttatggaggatttttttgccccttgtgtttggaattataaaatataggtaaaagtacgtaattaaataatgtttttggtatttctggttttctcttttttggtaggggcttgctttttggttttgtcttccttttctctaactgatgctaaatataacttgtctttgatgcttcttggatcccttagaaggtacttcctttttaaccttaacccttttagtagttaaataattatttccataggttgctattgccaagaagacctcttccaaacagcacatgattattcgtcaaacagtttcgtattccagatactggaatgtggataagaaagtatacatttcaaggggtaggttttattattaagaaagccaaatgaggattttgaaatattctttcctgcatattatccattctagctacatgctggccagtgggccacctttcttttctgcaatttaatgctagtaatatattctatttaacccatgagtcccaaagtattagcatttcaacatgtaagcatgtcggtaagatagttgtgctttgcttagggttccctcctgtgttatggtctggaaagtgtctttaggcagaaagtctgagtgatcacagggttcgctcattaatttctcttttctgagccatcatagtctgtgctgtctgctctccagttttctatttctagacagaagtagggcaagttaggtactagttattcttcatggccagaagtgcaagttctactttgcaagacaagattaagttagagaacaccctattccactttggtgaactcagagcaagaactttgagttcctttgggaggaagacagtggagaagtctttgtacttggtgatgtggtttttttcctcatggcttcacctagtggccccaagcatgacttctcccatgtcaatgagcacagccacgttcccgagttgaggtgaccccacggtccagaatcatcctcattctggtgaacctggttctctttgtggtgggcatactgggtaggagaatcacccaaaggtcacccatgagctgcagaaaaaaaggctatttgcagaaggagctcacagatcacattgaaagcattgcatattcaaacatcttggtcttctttattggcatgcccacagggtcttctgacctctgattagatcagacactttttagatattgaatcatcagtttctgtacaactatctgaataaggtatataatcaatgaaatttagaatttttttctatgcttactcctgattggtaatttgtttgggtttagaattctatacaaggccatttgtaattttcctcagcactttaaaaatattaaaccatgttttcttaacatctgttgctgttgattatgtctgctcttggtgtaaatatcattcctttgtaggtaatctgtaattttttttcctctggtaatttttaaagcttcccctactactttcctatgtgttctgcagtttcacaacaatgactttcaatgtgtatttatttttacttaatctatttaataagatttaattagaaaggcagggctttcatcatttctggaaaaaatcccagctattttctctttaaatagtgtttctttaccattctcattctcttcttctgaaactgttgttattatctgttgaagcttcttgagttattttctaggtctcttaattttttttaaaacaataattgtctccgtatgttgcattttaggaaatttctcattactctttttaaattaactgttagtttttactaagcccggctagaatagtctatccactgaggtatgtattttgttttctatatttttcattcttaatgtttcttattgttccttttacatttttacttgtatatgtttcattcctgctttttttaattttctttcttctttctcttttctctctttttttttttcttcttgcagtgcagacagactttattagtacagcagaggtgcccacagagcaggcagaagggatcagtgcctggatctgtcccttcctccttctgccctcgctgagccctagtgtgtccggaattggtgggttcttggtctcactgacttcaagaatgaagccgcggaccctcacggtgagtgttacagttcttaaaggcagcgtgtccggagttcattccttctgatgttcggatgtgttcggagtttcttccttctggtgggtttgtggtctcgctggctcaggagtgaagctacagaccttcgcggtgagcattacagctcttaaggcggcccgtctggagttgttcgttcctcccggtgggttcatggtctcgctggcttcaggagttaagctgcaaactttcgcagtgagtgttacagctcatgaaggcagtgtagacctaaagagtgagcagcagcaaaatttattgaaaagagtgaaagaacaaaacttccaccctatggaaggggacccgggccagttgccactgctggctctggcagcctgcttttattttgttatctggccccacccacatcctgctgattggtccattttacagagagcygattggtccattttacagagagctgattggtgcgttttgacagggtgctgactggtgcgtttacaatccctgagctagacacaaaagttctcaacgtccccactagatcagctagatacagagtatcaacacaaaggttctccaagtcaccaccagagtagctagatacagagtgtcgattggtgcattcacaaaccctgagctagacacagggtgatgattggtgtgtttacaaaccttgagctagatacagagtgccgattggtgtatttacaatcccttagctagacataaaggttccctaagtccctaccagactcagaagcccagctggcttcaccccgtggatcctgcaccggggctgcaggtggagctgcctgccagtcccgcgccatgctcccgcactcctcagcccttggatggtcaatgcgactgggagccttagagcagggggcggtgatcgttggggaggcttgggcatggtgggctgcaggtcccgagccctgccccatggggaggcagctaaggcctggtgagaagtcaagcacagcagctgctggcccaggtgctaagcccctcactgccccagggccggcggggctggctggccgctcccagtgcagggcctgctgagcccacgcccacccggaactcatgctggcccacaagcaccatgtgcagccccggttcccgcccatgcctctccctccacacctccctgcaagctgagggagccggctccgaccttcgccagcccagaaaggggctcccacagtgcagcagcgggctgaagggctcctcaagcacagccagagtgggtgccaaggctgaggaggtgctgagagcgagcaagggctgtgagggctgccagcacactgtcacctctcactaggaggctggggcctggcctggaccagtttctcttgttccacctgaaacacatgagaatggagagcttagggctggccttgcttctggctcctattgtcataactctaatgttatcacttcattgaaaagattagacctctccttccccagtccctaggcagggaaccccagccactggggagagacaactttgtggggcctgggcttaggtatatcctctagacacttccgaccccaccccacaccctttagttctctgaggctcaacgcactttctttatttcattgacaatttatcatagtttaatataacttattccattatttaccttcttgaagatcctactgagttattttagagtcttttttagagttgctctattattttaattttaactgcagtgatttcatgctgactttgtaggctggctttcctcatgtgattttccttatgaatttttgaaatttgtaggcttatcttgaatagcccatttttttctctctgcactcatctctccatatttaatagttctgtgtgttcttttgccagttcttccagagtccccagttctgagccaagatttactgagataatcttgaggctcatacatcatggtgatatcaggactatcacagattcagtcatgcatttgggggcagcttggctcagccactggtcataggctgtgccgaatcttctcagacccttaggcctgtagcttcctagaagccacagtcccagggagtgtttggcagtaggtctgtcttagtagctctgtcttagctgtcttccacaagacagaaagttcagagagagaagaaggaaaagaaactggttaggcagacagttaggaggggtccttggtaaaactccttcaaacagagaaatagcctgaaaaaatcaaagctacaggcacagatagagcagcctggggaaaaatttagctttagctgcagagataakggagcaaggcctaacaaagaagcctttgttctttggataatcagcgggctcccaggaaaaagtttcctccccttttcagacatgtacatgatgggctccatgggaacttgcacagggagaggggcttacctaaaacatacccacagtttcataaacaagagaagctgtactttgtgcttacctaagacatacctgcagctgcacaggtaaggagagttacacagacagctactacacagttaagggaagttacacaaacagctacagagatgaaaggagttttttcttataaaagcttttggattcaactgtaaaagtggcaaccctctttcagcctcctctttgctgcagagagctttcttctttcaattattaaacttttactccaacctcacccttgtgtccaggctccttaattttcttggtcatgagacaaagaactccaggtactacctcagacaacaagactgaaacattgtggtgcactggcaagactgcaacagttctacatcagcccgtggttttaagaagggagcctggttcctgttctgcctcaggtggggcacatttattccgtaccaaacctaaaagcaggctttgctttgcttccaagcattgatccaactaagctttggcttgttgtgcacaagtcatcatcttgtagttgtttccattcttataccatgaaaggattgatcttatttttgagcttggctatgcctttttattttcctttagagacattctatgtatcattgctatttgctcagattggtaggaggtggccctcaagaaatgaacttacaatttggtattaaccccagggcccattagataactagaaacaatgttttgttttgttttacattttttagttaaaactaaggatcaagttgtttttcagttatatagggccctttgacaggacttgatatggtttggatctgtgtccccacccaaatcccatgtcgaattgtaatccctaatgttggaggtagggcctgattggaggtgattggatcatgggggcggagttctcattaatggtttagcaccaatcccttggtgctgttcttgtgatagtgagtgagtaattgtgagatctggttgttttagaagtgtgtagcaaaggccgggcacagtgactcacacctgtaatgccagcactttaggaggctagggcgggcagatcacctgagatcaggagcttgagaccagcctggccaacatggtgaaaccccgtctctactaaagatacaaaaaattagctgggcgtggtggcacacgcctgtagtcccagctactatggaggctgaagcagggagaatcacttgaacccaggaggtggaggttgcattgagctgagatcgtgccattgcactccagcctgggcaacagagcgagactccatcccaaaaagaaaaagagaagtgtgtaccacctcccctgacccttgctccttccctggtcatgtaagacatgcatgctttcccttcacctcccaccatgtttgtaagtttcctgaggccttcccagaagcagaagaagctacatttcctgtacagcttccagaaccatgagccaattaaacatcttttatttataaattacccagtctcggctgggtgcggtgactcatgcctgtaattccagcactttgggaggccaacgcaggc

SEQ ID NO: 5668 - DNA, 165156 bp, Homo sapiens
gacaattagtactttctttaatttgatatttagtctcagaattttatagctggaagaaacctgatagaatatcctgtgtagcccagcatactttctgtaaaatgagaaatcctcttcccaatttgtgtgtgtgtgtgtgtgtgtgtgtgtgtgtgtgttaatggcagaataaagccaggctatggacaaaggagaagggagtgatgaggatcaggtgtggcatttgcctttccaaaaaagagattgagtgacttactctaaagtaagttccccttcaaatctaaagcaattgcactatgtcaaactataaaattgcaacaatcaaatttataaatatgatagttttcatcttgatttcttcctcctggatttacagataataaatcttcctcctgagatttattaatccttcctggggaggacttaccattaaaatgtatggtcttttgcattttcaggctgctgttgcttttaccctggtggaagataatcactaaaaagtagtctctgtggattatctaatcaatatctcttcgatttcagataaaattttatactcacttgggccttaattattgtgctaatatctctaggcttcccaaatccaggagaactgtgtctgtggatctttagaaatacttggactgactagttttatgctggttctacccttagaatccagaaacaggccagaagcatatcctgttaacttgtatctatgttaagaaaacattgaaaatgtaattattcactatctgatttagaaactgatgttacaattagcatctctgtattggtagtggtaacaacaatgacaacaaattgtacccatagaatttccacagccataactaaaaccagatggcaaatactgtttttataactcccacctttaaaaaaaaaaaccaaaggaaccgtttcttgtttaatttcattctttgatagttgtaatagtaattgacaccgaggaaaaaacaatctactctaaatattctacacagtaaggattaaatttcattttctatggttttactatttagtgggcattgtgatacattctaatctacacattgcccctctacccatgccttgtcttttgtcctcagaatatcttattaatcagaactttcataaacatacacaattctttgactgtttcaagagtcaggctatattttcagctcttgtcttgtttctgtgaatatggtggcagaaatcatggatttgagggtcaactggactggtgtcaagcagtcccctaccgtttattagctgaatgagcttaggaaatcatttgtttaacctttaagtctcaattgtctcatctgtaaaatgaagaggatattatccatctcaggggattcattgttagaatcaaattaaataattgaaattaagtgtgtaacactacgcttcgacacaggtagtaaatgtacgataaatattaactaatattcacacattatctttctcttaaatgaaggaataatacatacttcccttcccttgtgtaagattttttgaagtaacttaacattacaaagcatgtctaatgaatattttaaataatggaactttcaaatatatattatgaacattttttaaaccttaacctagggtaaggtttccattcacctttcactggtttcgaagagttgatatcagttttactatcaacagtaattgaggtttatcactccccaagaggagggtcagttttttttttttttttttttttcagggtttagagctattttctggcaataacaatttctaacttctaattaccctttttccggcttgaaaatctaaagttggattgaagaagagaaatgacaacatctcccttttacttatccaagctgtgaatttaaaatacctttcgtttttgtttgtttgtgcctatcaactttgacccatagctcccagaataattttgatattttctgaataaattgacactagactttatacatcactcatgtctttatttagggtaggccactgtcctctaattccatactgattcttctgggtactctggtgagccactcaaaaaacaatttctgccaaacctttgggaaagtatcagtggtttggtggccaaattcctcatcaaatagtgcaaactggtttcctccaagctgtgacttctgcagagacagaaatgtccttgttaagtaacactgtcctcaaattttctatgtgtatcatagcctacttcctcctgaatactacctttctccaaatcaagactcaaaataatatgttttctttttaatttctatcctaaatcccatatagaaggaaggatgcaagacgtggtctccatgggagacagagtataatcaccaactaggtccaaaagaaaagcaaagtcgtgtcctgggttcctttttccaagttccgagttgtgggaagatgggttgtggcagctccgggagcagacacataggatttcctccttcctcagctctcaggagggccgctggatccaaggcaggggtcaggtatttccgagatgaagtgaactgaatagggcggctacccgaaaggcagtcctcagcattattccaggaaacatcagggcagaacctgaaagaggaaaagaagtacacagctgaaagttagggtgtgtttaacgtagtgagtggaacctcaccgcccacgtgtcatcccctccaggaaatgccatttcctcttccaggaaacaaaggtgtggagaacttctgagagcagccacgtttatataactaagagacagtgtctaatagaaaacagaaacaccccatggcctgggaaaggagatggcgggtctacaggatgctggcatcaagaatatctagaggtgtccactacacctaatggataccaagaacagatgtgaattttttgttttagatgaaattttacgataaaaaaatcccaattttgtagatatatgatggatgttgttttaaaagatctgatcttcaggttaacgggtttcctgttgtaggactatacgattataggacaattgagtagccaagagtcctcaaagatcagttgtccaaaagagaaagaaagagaaaactgagtgtacgatgtaagaatggagaattggctgggcgcagtggcttatgcctgtaatcccagcactttcggaggctgaggtgggcggatcacctgatgtcaggagttcgagaccaccctggccaacatggtgaaacccgtctctactaacaatacaaaaattaactgagcatggtggcaggcacatgcctgtaatcccagctactcaggaggctgaggcaggaagaatcacttgaatccagaaggcagaggttgcagtgagccaagattgtgccactgcactccagcctgggtgacagaacaagactccatctcaaaaaaaaaaaaaaaaaaggagaattaattattcagcagctcttgagatggtggctccagcctgacctgggtttgaatcttggttctggtactttagtaattgtgggatcttgagcgaggtacataacctttctaagccttgttagtctcttctgttaaagagagatgataatgatgatgatacatatcacatcagattatgaatattatatgagtagtgcgtctaaagtcatcacaggctgggcatggtggctcaccccgataatcccagcattttgggaagctgaggtaggagcatcacttgagcccaggagttttaaaccagcctgggcaacatagtgagaccccgtctctacaaaaaaatctttttaaatattagcttggtcatggtgatgtgtgcctgtagtcccagctatttgggaggctgaggtgagaggataacttgagtcctgggggatcaaaactgcagtgagctatgatcacgccgctgcactccatcctgggcaacacagcaagactctgtctcaaaaagaaaaaaaaaagtccttatcatacctggtgtatatatgaaactttttctaaagccactaactactgattaaattaacaggacatatgagcttcctttcagtgcctaattgtcaatgagaaacccagatatggagcgtgaggaatctaccatcttctaggcacagtagctgttatccgtttgccatttcttctttgcactgtaacaggatccgctgaaaaacaattggagaaagagccagatggatggcagtctgaactagggaagcttctgttttgtagtttgcagaaagaatctgcatggggatcactgcttaagctttgcctctttgtttccagacacagacgcactttcctgcctaatttccatagcaaatacccaatgagcgcctactgtatgccaggttctgatgatgtcagagtgagccagcacttccgaggtactggccactctcaaacctcctggctaggatcttccaagagctacagcctctggcctgagggtcagtccaatgctgttagatattgacaaatgcggggctaattttaatggaatatagttttatccttaaaaggtgtgtgtgttttggctttatttgggttcatatagattaggggcatcatcataactcgcttcctagtgcagacctgagtgatttaatcaagtcttgaaacacttcggggcctcagtttttcatctgccttcccaacctctgaggttctttttagttgacatcctacattcccatgatcagaaggctgctaattcaacttttggcttttgttaaaccttttttttttttttttttttttgaggcagagttttgctgtcacccagactgcagtgcagtggtgagatctcagctcactgcaacctcctcctcccaggttcaaacgattctcctgcctcagccttctgagtagctgggattactggcacgtgccacaacacccagctaatttttgtatttttaggagagacacgattttgccatgttggccaggctggtctcaaactcccagcctcaagcgatccacccgcctcagcctcccaaagtgctggcattacaggcatgagccaccgcacctggcctgttttgttttgttttaatcgtttttaatgtctctctcaaaacaagaaaagaaaaaaggacaaaaaattactattttacttctcagattaatctgatcttagtacactacagcaacaaaagtcttaatcaagtacgttttaattatttggtgtcatcattgcaaggaaaccattcagtaagaatattagtaaccagacatataattttctaacctgaatgagaaattagttacatggagtatagaaaaagaaaccaccccgtttatcctccctgtgaccatcattagtattacccgcaaggcataaaaagtcctaaaatgacacgcacggcggcaacattacctttgcagcttcaagcacagtaaagttgaaagcagtcccaccttggcaattgtgtataaaacgacaatgtgcagatacaggaaaagtcccaggtccgaagccacctaggaacgatgaccccaggacagaagtgtgcccaaacaaatgcctggggtaggtcattttaaaaggaacaatgtttacaagccctttctagcgtgaaaaacagagaaaagagacccagctctttccacccaatctgctggagcgccgtttcgttttcagttgggcgagagggagacatgtggcctctcgccccttttcctgactctgagaatgtggccggagccggggcgctcctgctccgcctcgccgccctcccggggctgtcctgggccctccggccgccgcctcccgctccagttcgcagctgggcgacaagtggctggtaaggaggccaggggcgggagcctgggcgcgggaccgggggcgcacggcgggggaccgagcgcgcgtccctggctagaggtgccgggtcccgggaggccgggctggcggggaggctggcgagcgccccctggcgggcaccgccttctaggcgcacccgcagtgcgccgggcccgccagccccgccagccccgccagccccgaccgccagtccccgcgcagtccccgcgcagtccccgcgcagtcccagcgccaccgggcagcagcggcgccgtgctcgctccaggtagggccccgcgccccgcgccgccgccgggagggagcgggctggaggggccgagacccgtggcgagaagggctacccaggcccctcggagagcctccgggaaggggtgagggctgccgggtgagcaggcggagtaggaaatggaaccaagcgggcgcaagagcgcaccgggaagaatttccccgctgggtttctgggacgcaggtcgcacgggatgcgggatgctggcgaccttagccgggtgggggccgccggcctgggggcgcttcctcctttcttctcccttttccttctcacctgaacgaaagggggcctgcggggagggaagaaggtggaaagtttttgtattcttggtaaaaaaaaaaaaaaaaatgcgtgaggaaacatgttttctggagrtggtatcctgtccacaggggagcataaccccttttctgggaatgtattggagcacggacgggggtgccattgctcaggcttctaaacaagccaagtttctggtcaagggcctgggggagggggaggcaggtctttgaaagataccaaaaaaaaaaaaaaagaaaaatctgcgtgctcattcctgtagcctcaagtgaggttattccccagctttgagggccaggttaaccaagcaaagtttgtgcaataaagtatctttgtggtattggattttcgagagccaccgttatcaatgggagagtgactgttgaatgctacaggcgtgtgcactcycccgtgggcatgaagagaggtccacgggctggctggattgggagactccggtcatttctgcaaggagagcgccacaggactgccttgttccctgggctgtcctgcccctgtgcgggctggaygtggtgctataaaagatgattcaggagtggcacaggctgagggggactaggctggagaaggtggagggaagagggagcactccgtgccctcttcytgtccatgggaaatgaaccatctgtgcctggtgtccaagtccttgacgttccagttgccctttgagagcacacctyaagcctgctgaattcttttaagaaccacctacaagatctgagaagtccgcccatgctttctgtcaactccggcctctttgaccttttcttttgccaaagaaaattctaaaccactgggattcgtgaggctccgtgagagaggcaagaagcctggagggtccactccgttgctcttttcccttggtttgctccctagaagccatggtccccactgggcccttcttgcccgaggctgtgtgatagacaagccctattcctaaggtcctgggtcccccaccccaccccacaccccgaccttgtgaatcatcatcttcatattttccctaacttatctttggtaacccttgtaaaatggcaggcttactgcggatgcttaatctcttttaaaagtgctgtgtctagcgggaagaagagtgacatttactaatatggttgcaaattactkttgaagtttatgcacagctgtttaaaatccctctgagatcagtgccattgtttgatgcaggtgcttaccgcagaaggctcttgttagtcccttcctcctgctgattgaacatacatatatttaaagacgtggcgtagggagagcttctaaaacctgcaaagccaaagctgcacagctcctgcaagttagcgatccactctaagtttttcwgttgttgtttctgtcttcttgcctctcatgaacttctgtttctgatttcaagagtaacctgctgggcaccatcagcctttgtttcagtgacctgcgattttcttctacactttaaaaatgtcaatatccaggcaagactcttgtcacccaccatccgcgttgtcatgttcatttccgctactgtcttgtgctgtggtgcctcgggatggcaactgttacttgaggagctaacttctacctctgttctcctacagacatgtcctcattgcgtcttcgctcaccatacacggtgcagctcctggaaatttgatttgttttgctgtctcacttctccttcaggcaacaaggggatggtgttcgattattcacacctcagctccttctgtaatctcaaagatccctttcaacaataatactctctgtctcttgttaacgccaggcatcagaagcccccttacatagccggcttgtcactggtcatttctataaagtattctcattctaacacatgctgtctcttccgtggaaaagactaaattcttctctgcaatgaattagatgttttaaccaaaattccatgtggactgggtccagaattttctttcaagagtatgggcttgtggtacaagtatgtaacttcggggattcagaagtagacctacacagacaaatctccttataacgtgttatttaattatggtatatttgcctttctggaaattaggaattagagttagtacttcctgtttttaatgcatttgattgatgtcttagagttgctgattatgttgttgcccctaaaaatgttgctaatgtgctggtttgttaacaaggttatatttgatttcaggtgatttcctttttatggagttcagtctttaatttttttcaataatttgcctcaaatcatttaaaatgatatattgttatataatgaaaatcccagcaatatagacgtgattccgtgtgtgtgtgtatgtgtgtgtgtaatctgtaatttaaaatagagaaattagtattgtgacggcatacatagcattaaactcatgcttgctgtttctgttgttttaacactttaagcagctcatttctaagcagctatgtgttcagctcagctttttcatacctattccaattgttaaggaagaagtcatgagaaactatagaaaaatgtgatgttgaaccagagagatggattaaaagctgtttccttacaatggtgaaaatatctttcattattttaacatgccaagcatttatacatgtcaaattctgattgctctgtcatctaaacacattcttggggacaaaatgagcatcagagttttaaaattaggaaagctcactcaagcccagaatcatagatttttgctcctggattaaattagcaagtatttggcaggacatctttctgcaggttgctgtaggttgatgttagcttttgaattaagctaatagtattaattataataataataatcagcatcaacaaaaccaatgaaatatggttttgagtctttattatttagaatttatgtgctgtatatcatactcagaattttatttatatgtaagaggcattactgcttcatttaacctccaaaagcctttataaattagatattattattattccagtttttcagatgaggaaactgaggctcaaggagtagagccccttgtccaggtcttataaccagtcagtggtagagtcaggttagttggaccatccagattagtctaaccatcaagcatttgctttaaaccgcagtcccaggtgacctaccagttaacttttttattgtggttaaaatacacataacttaaaatttaacttcttaactattttctagcgtacagttcagtgacattaagtatattcacattgttttgcaaccattgccatcatccatccacaggattcttctcatctcctaaaactgaaactctgtcctcgtggaacattcgttcctcatccgtctttcctctcagcccctggcagccacccttctacttcctgtctctaagattctgactgctctagggacctcacagaagcagaatacagtatccatccttttgtaactgtcttatttcacttagcatagtgttctcaagctgtatccatgtgacagcattggacaggacttccttcctttttaagtctgaatactattccatttatggatataccacattttgcttatccttgtatctgttgatggttgcttctatcttttgattattgtgaataatgctgccgtgaagaggaacacgcagatatctgtttgaggtcctgctttcaattctttggggtatgtacccagcagtagaattgtggggtcgtagggtaattctatgtttaattttttgaggaamtgccatattgttttccacagtggctggaccgttttacattcccaccagtggtagaaagggtcccaattattccacattctcagcaacgctgtcttttgttttgtgttttttgagatggagtctcgctgtgtcgccaggctggagtgcagtggcatgatctcagctcactgcaacctctacctcccaggttcaagcaattctcctgcctcagcctcctgagtagctgggactataggcacgcgctgccacacccagctaacttttgtatttttagtagagatggggtttcaccatgttggccaagatggtctcratctcttgacctcatgatccacccaccttggcctcccaaagtgctgagattacaggcgtgagccaccgcacctgggcttttttaaaaatcttctttatagtagcctttctaattggtgtaaggtgctgatagttaactttttacccaatcattgaatgcccaatggcagggatctctgggctgatgctactcctgagttcattgtttatttcctatcccagcttgagcatatacacctttttctagtgtagaattaatggaggaaatacaactcacacagcacctgagggactagggaagccatggaaaggacagtccctaaaacataaacagaatgtcccggtaggtagggttatctccacctccatgaggaaccttatgattcagaaatgagtagttgttgagaataaagtgaacatggcatcagtgttaataaccctgaatgtgtgggacagatgctttttagaagattagttacagatataattatcttttgtatgttatcagagcaggacaagttcccaggacaatggagagaatggaaagggaaactgctattgaattcaccaggcctttgttgcaagcctcagatcacacaccgtgctgcaaaacccacagggagatgtggtcaggcaaataggaaattataatgaattgtgatgaattcatgagatatttgtactattttgtatcagtttataatgtcatgcaactctgttttatatttgctagtttcctttctgtctcttttttcctctagcatgaaactccatgagggctggcattttgtccctacatgtgtccccagccactctaacagggcctgacacataccaagttgtgaacaaatatgtgcagaatgattgtgtwagtgtttcagtaggggacacacttggtattatgtgcacagctagatttggggtgtcgcagagctgtcagtgacggctcaactgagacctgaaggggaagtggcagtgagccagatgggggttctgggaggtaggaacagtgtttgtagaatgtccctgcagcatgtgagtctggaatcccagtgcagtccagtctaagccttgcagatgagtggaaatgagcagagtaagcatcacagcttccatttaaacctctgctccccatcctaatttgccatatgaccttaaccagtgaacttcttggagtgtcattctctccatttgcaaagtgaagaaaattgtgatctctgatagcagtgatgctgcgagaaaggagcatgtgccagtgtgtgggstattgctgrgtggagctggaggagtcagctgtgccagatcacataggacctgtaagcaggtgaaccatatacgttatcctccagatggggactgtttatagagtgaaagagcacgttattaatcactaagcttgggtaacaggtacaaacccagattgtcctgggcagactgtccygtagagttgtcctgcgttaagtcataygaaggagtttgatccttttctaagaacaggaggaaccctttaaatgctttatctaccaatgtatacaagtgccattcaggttctctccagcgtttcagagagttttacctgcccatgaactcacagcactcggcttgcactgcaaactcacctatacgttggcagctgtctcctcactgggcacttaattcatgaacaactaggagggaaagacarcaagacagccaggggtctgctctttggctctttgcatttttttttacggggtcttgctctgtcgcccaggctggagtgcagtggcacgatctcagctcacagcagcctccgcctctgaggctcaagggatcctccggcctcagcctcctgagtagctgggactacagttgcatgccaccatggcctggctagtttgtgcactttgtagagatggtgttttgtcatgttgcccaggctagtctctaactcctgggctcaagtgatctgcccgccttggcctcccagagtgctgagattaaagacatgagccaccacacctggcctagctcttttcgcctttaactggagtgttagctgatatcaagaacacatcttttgggtttttctttttttaaccttgtaacacctaaaggactgcggctaagtgttaaaagaaaaaaatttctatctggtggtttaaatatctgcagaagcagaatccttgtcatcctgaaattttttccctgtgggcaagaattcctaataagcgtacaatctattggaaaaatcaaaaagtaaacaaactatggcaatatattctaacatgtattgacttgtcactatcggccgtttgctgtgctaagcactatatgtagatgattgcttgggtgctttgagaacatgtaraagggaaccaagtcctgattcggaggttcaggaaaggctttcagaggacaaggtatcgcgggtgggratggaagatgtatgggaattagccaaaaggacaggggttcagaggtgagccaagtctgtcctgaaagtaagcagaaatgttgttgttcttgtcgttttgagagaagttcatctcagctgtgttcagcatttttagggcataagcttcaacattttccgttctgttttcactgatatgttttagctatacaaaagcaggccttctacacagtttttcaaactccaagacacagtctactagtgggcaatgacattaattttgggggtgataacaagcatgaaatagaataaaacagaaaatattaagatgcatttcatgtaggaagggtaattatttcatgaaactgtatcatttggtttgggacacattaaatctgttcgtacctaaaagaagacattcatgcagccaacaaacatggaaaaaaaaccctcaatatcactgatcattagagaaatgcaaatcaaaaccacaatcagttaccatctcctgcaagtcagaatggtgattattaaaaaatcaagaaacaacaggtgctggcaaagttgcagagaaataggaacgcttttacactcttggtggtgggaatgtaaattagtccaaccattgtggaagatggtgtggcaattcctcaaagatctagaaccagaaataccgtttgactcagcactcctgttactgggcatatatccaaaggaatataaaccattctgttataaagatacatgcacacctatgttcattacagcactattcacaatagcaaagacatggcatcaacccaaatgcccaccaatggtagtctggattaagaaaatgtacatacacaccatagaatactatgtagccataaaaaggaatgagatccctgtcctttgcagggacatggatagagctggaagccatcatcctcagcaaactaacacaggakcagaaaactggacaccttatgttctcacttataagtgggagctgaataatgagaacatgtggacacagggaggggaacaacacacactggggcctgtcgggaggtgggattggagggagggagagcrttaggaaaagtagctaatgcatgtggggcttaatacctaggtgatgggatgatrggtgcagcaaaccaccatggcacatgtttacccatgtaacaaacctgcacgtcctgcacctgtatcccagaacttaaaataaaaataaaaattaaagaaaattacatacctatggcatttagttttctataccattcctttaagtcatagaatcagatgagctyaggggctagaaggaagagggagcgatgggaaggcagtcgttggtcatgccctgggcctrgatcgcgggaatcagtcattcagaaagccccatatgttgggtgggtctcacagcttacagagaagccagctgaggtgtgcaggttaagaaacttgatctagggtcacagattaaattactagcgctgacccctgatctcttggcttctgatgtggtggtattctttccatacctccagggactgtgttcccaaagtttgttagttaggtggctgtttagggaaggaccacacctggttcctgtttgtttgtttcttggtttgtttgttggtttgttwgtttgtttgtttttgaggcagggtcttgttctgttgctcaggttggagtgctgtgactcartctcggctcactgcaacatctgcctcccargctcaagcaattattgtgtcagcctcgagagtagctaggactacaggcatgcaccaccacacctggttaatttttatgtttttagtagagacagggtttcaccatgttggccaggctagacttgaaatcctggcctcaagtgatcctcctgccttggcctcccaaagtgctgggattacaggtgtgagccaccccacctatcaagggaagatattttcttaaggggagtatgtaataacaaccatgtccctggtttgttargaaggttataaactttgaaatatacccatcagtttcataaagagcaagacaggttaggaagaaatagtgttcattatacagactagagagctttcagcttgacattgacaaatataaacttggccactgtccctccactaaagcgtttcccttgctgctggggaaggaccgcctggtgatgttgtgtgagatgatgcactttctttgccccctctgtggtcactgggatcacagctaaatccaactgtctgctttttccagtgtctacacataggctgatgagttctcccggaaaacacgccgctctgcaaattcaggatgccgtagctctgtgacttcccactccatctaggatctctgtcttccccagctcccagacgtttccctggccaatgatcttccttcccacggcagcttctccacagctgctcctgcctccgccgtcccctcgcactcagcagctgtcttgcctcctgcttccctgagaaagtacaagtttcccgattcagaactgcccccacctggggatcacagggctgcacgcctcactttatctgaatccatcctctcatccttcttttctttcacaacgaaagaaacccctcagttccagccaggcacagtggctcacatctgtaatccaagcactttgggaggccaaggtgggtgaatcacttgaggccaggagttttagaccatcctggccaacacggtgaaaccccgtctctactaaaaatacaaaaattagccaggcgtgctggcgcatacctgtaatcccagctactcgggaggctgaggcaggagaatcgcttgaacccaggagacagaggttgcagtgagccgagattgccccattgcactccagcctgggtgacagagcaagagtctgtcttagaaaaaaaaaaaaaaaaagaagcccctyagttcctgtctgaggctcacctcccctggggccctggaatccatttctttcttgttcttgggaatctcaatctcttatcttccctgtcacctgcattttccttctctccctcatttctggccccattctctctgtattaagtgcgcttaaatcccttccttctgtgaaaaaaagaatatatatccttttataccttcctccagctacttccttgtcttgcttctcttcacaatcaaactcctcaaattgttgtctacacttgctgcctttgcttcctcaccccacatgtcttgaacgacagatgcctggccttgcctcttgcacccctcagaaatgatcacccgcactctcctcatggccgattcccgtggagttctacccgcctcttacctgacttcctgcaaccagatgtgccgtgagcacacatgcatcctgggacattgtccctctgtgtctcccatgacccccctgcccatgtttccttccttccttcctctcttctcctttgcaagctcctcttcttttatcaacctggatgactgatgttcctcaattttcccgccctgtgagcatcctcttccctcatcagcctccatacctatctcctcgctgactgtgacccagtcatgactgccccagatccttgccattcttccccagaaagttcctgggcacgtctaatgcctcatgccccaaactggatgcaccaccttcccctttctctttcaacacgttttctcctcctgctcttttctgcaactggcatagacatcacctgctgcacgacctgaaatctgtgtgtctttccttgattctgtctcccctatctccatagcttgccccaaaccaattttattcactcaccccaattcctctgtgttccctccagcctgtcacactcccaccacctctgctctaattacaggcagcaccgtttctcttctgggttggtgtggaacctcctccctagccgtggttaccatgggctgccttctggaacccagtgtgccactccctgctcttaagttctccaaaggctacccagtgcccccgggataaagcccagcctccctgatgtggattcgaaggttctactcctttcctctccagccctcacatcgggttcctccaagtctgagcctctttaagctcctaggaggtcccagcatcccctcatctygtggacgtctgctcaatctctgagctacttcctgtacatcttcagctcccaagatgtctcttgtcctctggaaagctcttcctgatcctccacatcaggacttggctttcttccacattgtacactccctgaggactggatccacactctctcttactctttttgttgcacttctagcagtcagcattgtgtctgacacgtagtaggtgctcagtaaatattagtgggataaataaatgagtcatatattttagaatctgtaatgcccaaggtactgtgtgctaagtgttagaggaaaagaatcccaatctagtgacttaaatgtctgcacaacagaattactattgtcttggaagattttgcctgtggacctctggagttatctagataaattctaccagaaatcagagctgaagggggtgggaaatgtttagaattccgggaggtgacttgctgcaaagactccatctccccttgtctatggtgtgatttttccccttatcatccccttggcatcctgctttgtggaccactgtaatgtcaataattaaaaaaaagattaaactggccgggcgcggtggctcacgcctgttatctcagcactttgggaggccgaggtgggcggatcacgaggtcaggagattgagaccatcctggctaatgcagtgaaaccccgtctctactaaaaatacaaaaaaattagccaggaatggtgatgtgtgcctgtagtcccaactactcgggaggctgaggcaggagaactgcgtgaacctgggaggtggagcttgcagtgaaccaagatcacgccactgcagtccagcctgggagacagagcaaggctccatctcaaaaaaaaaaaaaaaggttaagctaagagtgatcaggaaataaaagataatattaaaatattcaaaaatattctataagcaaaagaatgaggcaacaggtaaacataaaatgtagacatagcaaaaattcataagtgattttaataaagaaaaaatagtaaaggataaaagataaaattttgtttaaattaaatgaaaagatattttaagtcttcttcaaaacaaaatcataattttttttgttagttttggggggatttttgtttttgtttttgttttgttttgtttttttcttttttggagacaagagtctcgctctgtcacccaggctggaatgcagtggcgtggtcacagctcactgcaacctccgcccttcgcctcacctgagtagctgagactacaggctcacagcaccatgcctggataacttttgtatttttagcagagacatgttttcatcatgttggccaggctggtctccaactcctgacctcaaatgatctcccaaccccctgcgccaccaccaaagtgctgggattacaggcgagagccaccacgcccagcctataatcacttttaaatgtactaaaatagatacgagtaagaaaggtaaaagactaaattcaagaattaggatgatagaggtatgcccaaaacaaaataaatgaaagcattcacaaaaaaaagaatgtttatcttaaaaggaaagagtagtaaactatttaagggactcacttaaaagtagaataaaccaacattatgaaaccaaagaaaaacataatctttcaaagaagattagaaataaatcccagcagcaataaaataaaatgggcactcacatgtatgggtttctaacaacagctaaaccccagctaaaacaatgttaaagccagtgctgaggtttccagcttgtaccccagaaggccttggtgacctcagggatgtcatagagggaaaacactgggacatttccctcctgaggaatgtaagcacagggtcagataagggtagagaagagagctacactcatctttgtctgcagaattcgggtgacgcgtcttactgtgcaagacttggcaccttgtgcattctggccccaaattgcatctccatccgtgtgttctgctatcctttcagaaatgggaagatatggtgggccctttagggccaagcatatccctgtctttgttcatggaggcctcttctcaaacagaatccctatgtcctgttcatgaaacactatttgcccctactatataattggcatttttttaagtgtcctattgtgttagagcttttccaagtcgcctctgatgtgtggactgactttctgcttcctgtgtctctgggagcttgaggcttctatccttctcattagtggagctccctaatgacattttaatgcaattattgtctcttgagtaagcctgagagcatgtaccgagtcttctctttctctttctctctttaactctcagcacagagctcagacggaaccttggattgaggaggttcatgaggcctcctgtagccagggaatatattttatttccctccagttaccaatatgaaggtttccaaacgttcatatcatattttaggccctaatcattaatattgagagccctaagcactccgatttgggtccatatctaaaggtgagttttaggggatctgactgagaagtgttccgggccagctccctagaaacccttgggtgcactgacttcttcctggccagtgtygtctgcttggtcatcagtgtgttcctcccctcctgagttctctccatctttctgttcttctgttttcttgcagtaatcgaggacaggtggtcgctggcacacaaggatattaggaacccatgaggttgtcccttgtaggagaaaagactggagagaggccactgaatctcgttgtgtcattcaccctacctagtcctgctctgccagggtcatgctcaccttccagacccmcccaacagtgaagtcggactgaaaaatcccagaagtgggaattgggagacaaggttgagtgcattagggggatgtctaggattccccctgattcgaatattttgtagctgttttgaggggtccttttcgcatccagaccaggatttcacctggacagctggagtgggaaagaagtggatacatttcaaactcctagggctgtagttaatgtgtcctgtcataaccactgcagaacagtgtaggtcagagaatgcaaccactggtggcatgtataacccttcaccaataaaccgaagtgcagtcccacaaacatgggagtcattcagctacaattagctttgctatggacaggaggaattaaaatttaataccgtagcaacagcaaaacatgattcgttctacagtgttagtggggatggtaacacaaggaaggttatgataaccaagtttctctgaaaaggtcaagtggatttcctcagtgggctatgtttctggaatataaggtaatggtgaataatagaggaaatctccctctaagaatgggaactctttaattcatctgcattagtcattcaataaaaataaattagcatacattttactggggacctatttagaggggtactatgaacagtagccataaataactcttgcataggaagaacgtgaattactctactttgtaaatattagtttgcaaaagtaattgtggttttgcaattacttttgaggaacgtaattcagtgggaagtaacttgcataattccaagttctgaagcagaggcagctgaaatatttgccattgcaatgaaaaggactttcctcccgggattcttccctagttcctggacaaggagatttgttaatatttgtagtacacttgagatctgcgactaaaagtgctttaggagagaaaagcatcacaagaagaaagggctttttgtttctttttaaaataaaataaatgcaatttctttcaccaaaaaaaaggcgaacattgctaagcataaatgagcacttccttttagaaatgaataaagtaaaactcaaccattakcaacttcccatagctagagctcgcagaggaaaatgttaacacatagcatcatgtttgaattttattattttcatagagaagaaaaccagcaagcaaaccccttctcttgagagaacagccttgaagtactcagaacagagagcatatgtatctattgaaataaaataaagtcacttttctccaggaaaatactatagatattttctcatggaaaaaatagactagacctatgggtctaaatatgtaaacataaagagagatcacactatttattcaagtactgtgctatctcaagacacccagccatgctgctaagaaggcgcattataaagaagcatcaaacattctgcagtttcaaaaagtgaaacgtatatttgcttgaatgttcatctaaacactacccataggaaaattcaaacgaaactccagggaattttaatccacatgccacattttcttagtcttttgcaagatagagtcagaggattacattttctgaaaaccgctttttaaaaagcttaagccctaatcagttaagtgtgacaaaggcttgaaatgggatttggtagcaagtaattaaggatgaagtacaagtgggtatatattgacagtggacccatgctattgtcctgaaattgtcagcggggagtttattctttatttgacattgtttatttgacccagagcattgctttgaagatatcaattgctatggaacaaactgctcccaaacttagtggcttaaaaaaacagcaccattgtatttgttcttgattctgtgggctagggatttgggtcagccttggcttggcggttttggtcttcagagcatccctagggccctctcataaggttgcagtcagacctgagatgaggtcactcccttatatggcccctgggtggatgcagctaggaggttgagattcccccaccccgtcttcctccatatgtggccccaaagtaggaagttcctgctgctttggtctttgggtgaaaaacaggtcaygggccaggcaagatcaaggaggggcagcagagggcacttctgggcgagcagtacagtggcatcgcagaaggacaggtgggagggraagggataggctgcakcagctgcctttgaaaacgccatcgagcaatagtattgcagccatttayaccataatatttcctacagaggacctcgtttagtttccgagattgagcctctagtctcgctcttcacaccgctgaagatgtgcggtagaggatcttgctgaaacgaaaatgattgctgcactcccctgcaaagctctttggttactccatatcacctgcaaaatagaatcccgaatctttgcggggcccgtgagttcttcccagcctgtgccctgcctgccagactcaggtttcccttgggtccttgagcacctcgtagctccccagaagcctcttgcattttacagctctgcacctgatcccaggcctgagtgcacttcctcacgctcacatcgttactttgctaacccctgagacctcacctcctctgcaaaggcccccacgggctgtgtcaaggtgtccctcctctgcgtgccctggcatgctgtgcacatggacagctcagcagcactaacacacccttcctccctccccaactgcactgtgagctcccaagggcaggctctgcatctctttgtctgtctagcccctagccctcggcttgagcagagagtcccacacatagcaagtgctcagtaaattttggtggaatgtcagctcagtataggtaaatgacagagtggaggagtgtcggagggaaaagaccagaaaaccctgtacaggaagaaggcggtgtgatcccatggagagttggagcctggggaggcaggaagaggaggaacaaagcggtgggcttagactgcaattggaggctgagagcactctaggtagtcaagagacgcgaacaagcatagaaagtaaagcagaaaatctgattcgatgtaagagaaatcgaggcatgtgtcatggtgaggggcttatagggaagaggcagtgacaaggtaggagagatggcccaacatcaggacgggccatggagacctgtccccatggggagagccctgacctggactcagaaggcagggcacccagaatcccacccacgcacctccagacatgcagtagagctcagtcatagtaggcatgcagtagacctccctgtcaccgagaagaggaggagaggcactgggcaaagtgaggttgctgcttccgggactcttggaactgtgagacttacgctctgaaatcctagctgtcacttacttcactttcgactgaatatcttcactcttgagccaaagtgattgcatgcctttaaagtgaaactgtgcgctgggatctagttgacaagggacaggggctattgttttgttgggggaggggaggtggcagctgagagccaaccaaggaagcccaccttgaaagaatccatagccttttttcaacaaaaaaactaaaaagtaatcactacagaaaatattttagtgctaaatcttggaagaaaacatgatgagtgttcttttgactctgagtatataataattatagctaacatagactgagctttttctgtctactagtaactgttctaatcactttgcatccattaacccatttaatcctattatgatcctcatttttcagataagaaaagtgaggttaaatagcttgtttaaagccacagagctaccatacagcagaactggaatttgaactcaagcagtttgatgccatgatctgtgttcttaatactccatgtagcaaagcctgattttgggactataccttatctactgacttatgtttaaaaatactacctgacattggagttaattctgagaagtgggttttgagacttccttctccctttatatctcaattactgtttggggctatttccttgttttgctgtccaatgtattacttatgttagtaatggagagaacactcactctggttgagcataatcatcaagccgggagctctgctaagatccagtcggcttggctgggttcttctccaggcattctctgctgggccctgaagcgtgcgtctctctgctgaagcatgtgaacattcctcctggtgtttagagagatttggaaaaggctgaaaaaccgcatggaactccggaagttgttgtcttttcagggaaaacttgtgagggagacaggagatggccacagtggttttctttggggtccagcactgaccggggcatttatgaggctgccctgcaggagaaccacacagatgagttcatagacaagcctgagtgggcttctccttcgttcttccttacccacgagcgtccacctcaatccctctctctttcctttccggtatctccagatgccaggtccgtggctcaatgtatttccttcctaccagcattattttgaactgacaatgttgtaaattttaaactatattttaagtaaaccttaaaagcttattttagaatcctaatctgctttttcagacttttgttcacctcagatctccaactccctttactttttgcttgaactctcctcccttcttcctgctttcctcaactctttcatgctgtgtttaataacatgctaaacacattaaaaacagcaagttctatcatatcaacatacatgcccacacccacacacatacgtactgacgactgtcacttgcaaagagctgttaagaagaaagtttgtttaattaaaaaccagcgagaatggtggccagattaacattcttgagtcataacttggaggtttgaacttcaactttatggagccgttctgagaatttaaaaaagtaatctattctgtcatactgtgagatctacataaattattttttggcataggcctttgtaactttttaattgacttttgagtcagtgtgtttctgtgtatgtaaatcaattgtaggttcacgtcaaatttctgattgtctcagatatgtattgtttagtaatatttgacagggtcctgaagcacaagattccaaaaagttcaaaaagatacccttattcaaggaaacatttctttttttcttgtttctttttttttttttttttttttttttttgagacagggtctcactctggttgtccaggctggagtacagcacaatctcagctcaatgtaggctgcacctcccaggctcaggtgatcctcccacctcagcctcctgagtagctaggattacaggtgcacaccaccacacccagctaactttttgtatttttagtagagacacagtttcgctgtgttgcccaggctagcctcaaacccttggactcaagcaatctgcctgtcttggcctcccagagtgctgggattacaggtatgagcacccagcctcaaggaagaattttttagtcagcaatttgaaaagaataaattttttttttttttttgaaatggagtctccctctgtcgcccaggctggagtgcagtggtgcaatctcggctcactgcaaactccacctcccaggcttatgccgttctcctgcctcagcctcctgagtagctgggtctacaggtgcccaccaccacgcctggctaattttttgtatttttagtgaagatggggtttcactgtgttagccaggatggtcttgatgtcctgacctcgtgatccacccgcctcggcctcccaaagcgctgtgattacagacatgagacaccgcgcctggcctcaaaagaataatttttaaaatttcaagaaacctatactttgttttggcttggtttctaaaatagaaaataaaatggattatttatatttgaccaaatagacacattttcagaggctgaacaattcactgagtatgtaagcattaggcctgaaaatgaatacggagaaaaattagaatagccacgaagtgcagcatatccgtgaaacactatctcaggggcggagacaaagtcgccacactttctacgggttcattttgtcctgatggttccatgatgcgctgcctcccagccagtgtttgcagaaggtttttagattcagtcatggaggggaagaagaagctgtgaaaaccaaaaacagcacagaggggtttctttctccttccagtaggcttcccagcaaatcaaggatgactgcctgtagcacgccgctcctcacctagtctcaaaatastccagaaagttctccctacaccttattctatccagcacctgaaatgctgycagctaggatcttaggggacacagatcctcttaaaaatgcaagcactgctgagattcccttcacccattagggtggcttaggcagtaacaaagagaaaatggatattttcaaggagaaggggaaagctgggttttattcagtcactaaatgttgactgatcaaacacctaacatgtcagggctttttctgggcgtttaaaatacaggggagaagagaaggagaaaggtactgaccctcgtcaagcctatgcctacttttttttggagtmgaaagacaatagctaagtaaataacacacaaataaggtaaagtcaggcacctcaaatacagtgacttgaccactacacattctgtgtacgtaacraaataccacatgtgccccataaatatgcaaaatatgatgtatcaataaaaacaaamacacacaaaactcaaagaacaataaaacaaagacggtgaagaggtaaagagaatttctagaacctggcctgtttttagattattaaatgtttccttttttgatggagagtgaagaaaaatatctgatattgtacttgctgccacaaaatcatggttaacagaaaaagatacaggccaggcacggtggctcacacctgtaatctcagcactttgggaggccgaggcaggcagatcacctgaggtcaggagttcgagaccatcctggccaacttggcgaaatcccatctctactaaaaatataaaaattagctgggtgtggtggtggatgcctgtagtcccagctactcaggaggctgaggcaggagaatctcttgaacccaggaggtggaaattgcagtgagccgaaactgccactgcactccagcctgggtggcagagcgagactatctcaaaagaaaaaaaattacaaaggagtcactagatgatctagaaaaaggcatgtccctccttccctggcccaaacaatgcacagctcttatctgccccagtcctcaagggctgggaccagggctcttttattacccagaagttcctttgccagttcttttcctggcacctagttggtgactaatgaatatttcttcctagtgagcgtagtataaggtatctgactgtggtcatttatgttcctaatgaggatacgtaacttttctttttaaaccttaactttttattgcctattgctgaaatgttagcagataggccaatgagtagaaagaaccccaagaattgcctgattaattcccactcatgcagcccaggcccaagctctcaccttctgccctgcttttaacggcagcacatgtcaccgctgacgggacgtgcctctctgcgcgtgaccatgcacttgggactctctaaatgtctcaccggagaatcaatagccctagttcagctctaaatgaagtttctcgtcgcccccttctcttacaccctaaggataaagactgtctctgagaattttccccaaatcttcctaacatagagataaaaatagtaaaataagaaattagacccctcaacttcaactttaaaatcttatttctcttcctgcatcacggtgaccacctcctcacaagtgcaagaatagatgacgatattccagcatgctgtgattctcctaaaaacctgctgctcctagggactctgtggagtgagtttcctggaccgaagtcacttctcagatcttcatgttacacccatgatgtttgcttgctaaaccatcagcttaagttatttatcctgtatcttttatctcagttttctggttgcattttatctgtgtcatctttactttagtcaagctaacgctgtggttttgcaaattaaatcagctgtgggtttcagtatgtaactcctctttgtgtttactaagccttttttaaaaaaaacaaaatagtactgtatgtctgtttacatctttagtagtgtgtaagggaagattgttttctttagagttcttttaaacaatttcaaggctattcagaaggatccattttaagaaaccaaaacatctttttaaaatgccttgtttaatatatatctttagccataatggaatccccttaaaattttgaagttgatctgtaataaagaggttgtgtgggtcatgagtctggactttatagttcagacaaagagaatctgcttcatgtttcaaagcaaggaagagatttttttaaaagacagctcacatggcccgtgtaggggtggaaaaggcagcgtgaaagagcaaggggataagtaattaaacatctattggaatcatgaaattattaagagaaaatgtctgaagttccagagctaaaagactgaagagcagtgatgaaatgcaacaaaaataaccagaaaaatccatgggacttgttgcgtagatggttggaggagatgaagatgaaggagaactcagctggttccaatatttctagcttggaagactcagtaagtggtaattccattgatcaagacaggacagagaggagaggtacagacactggaaaaagtagaattcatgtttgtttcagttgtgtttgaggggctggtggaacatcacctggaaaggtccaatatggagttgaatacaggggaccgaagaaagtgaatgtatagttcaagaaagatattctttttgaggctactactaggtagagggtcataggagccatcaaaatagatgagattgaccagaaatgttggtttaaaaaaaagggggaggaaagtcaaaatgtattccaaaatagttaggtaaagaagtgaaaccaacagaataagctgaagagtgagctgagagggaaggagagcaggagagaagaagggagtcgacagtgtcctgtgcagtgtcaaggaggaagaccaagaaattgaattaaaatacaattgatagtacagagttacatttggtatagagaaaggtctctggaacaaaaggaagaaggtctctggttgaggaggaagaccatttccagccgcagggtctggaaatgaccaagtcatcagcgctcttgcagggagcaagatagatccacagagtgctggctggaggaatccatatggcagagggcagagaagcgaatggaaggggaggaagcaaagatggttcaggaagctggttggcgaaggaagggaggtaaggccatarcagcgggagaagccacggcagaagttgttagaggttgcaaaaccggagggtgtttataagcgggagtgggagacaggcagaaatcacaagaatggcaaggggttaaagaaaagaacaattccaagagtgtgtacagggttaggatcatgtatgcatgaggcattcagggaagaactagatggagactgggataagttgaaccagagcgaaggaagttgagccatttatgtcttgcggcttccagtttttccttaaaattaacaagctcatctgccgaggtggagaaggcagagtcatggttttggagacataaggggaacaagtgtgggacagcccgtttaggaaattggaaaataaacaggccaggaataagatcaaaaataaagccaagattgttggcaaattcagcaataaatcaaatgcttacataattcattgttttttattgtagtgaaaataaacaacataaaatttacaattttaaccactttaagtgtaaagtgcagtggcattaattagattcatgactgtttccagaaygttttcatgacccaagcagaagctctgtacccagtaagcagtaactctccatttccctctcctttcagtcccaggccacccccttctactctttgtctctatgaatttgcctcttccaggtagctcatattaagtgttgctttttttttttttttttttttccaagacagggtcttgctttgttgctcaggctggagtgcagtggtgcaattacagctcactgtagcctctaactcctgggctcaaacattcctcccaccttaccctcttgagtagctaggactacaagcgtatgccactgcacccagctggtttcttaaattttttgtagagatgtgagttttgctatgttgcccaggctggtctctaacccctggcctcaagtgatcctcctatctcagcctcccaaagtgctgggattacaggcatgagccctcatgctaacctatttgttgcttttaaagcattaatcatggrataagaaaaaggaataagttattcttctgctgtataacactctgtaaatgaagaggtcattcctaaaccatatcctggttttgttgttgttgttgtttgttggttttttgaggcagagtctcgctctgttacccaggcttcagtgcagtggcacgatctcagctcactgcaacctctgcctcccggtttcaagcgattctcctgcatcagcttccccagtagttgagattacaggcatccaccaccaccccagctaatttttgtttttttagtagagacgtggttttgccatgttagttaggctagacttgaactcctgatctcaagtgatctgcccacctttgcctcccaaagttctgggattacagatgtgagctaccgtgcccacctggcccataccctgtttttttttaaatccaccatgtggtatccatttataaaaccttattattaatacaatgctatgaaattgatataatgctttacccttaaagtgattcaaatcagctgaagctttgaacctctctaaatcctactttgaattaaatattttctttatcatacgcatacacaacaatgaatgtcttttttcccccatccaaatgatagcacagaattgtgaatctgtttctgtttagtgttctcttccagaggattgcattattcactgaatgtctgttgtctgaaatagaagttcccacagtagtttgtrtacgcatcatttaggaagataagtggtttttcctgttatgtatacaaataaccagtctgtgttaatgtctattatgggtgacatgaacagatccttctcgaggaggtttacatgtgtcactatagcattagatcttttttttttttaacttttattttagatacagggagtatattacatgatactgaggtttagggtgcgattgatcccatcacccaggaactgagcatagtacccaatagttagtttttcaaccctagaccccctccctcccacctttacttgtccccggtatctatcgttgccatctttatgtccatgagtacccaatatttagctcccacttctaagtgagaatatgcattatttgattatctgttcctgcattcaccacttaggatcatagcctctagctgcaatcatgttgctgcaaaggacatgattccattcttttttgtggctgtatagtgttccatggtgtctatgtactacattttccttatgagcatctaggttgactccatgtctttgctgttgttaatggtgttgccacgaacatagatatgcgtgtgtctttttggtagggtgatttattttcttttggatatatacccagtgatggaattgcaggttcaaatggtagttctgttttagattctttgtagacttagtaatttttaatggaaatgaattatcttcccaatgaaagtaaattctaataaaagacttattgaaagaaatgtctgatattgggatcattttcctaacacaatttccattttcattttctgtaaagcccccacaagagttgacagagttcctgaggtggsgatgagtgagccgtgcctctttctacagtggatgtagtggatgtggcttacagatgccttttacatttccagctgtagacagaaaatgccagaggccacagcatttccccaggccctgaaactaagctaacaccctctaaatattgccaaatcaaagtaatagaaaggaaaactgttctcatattgtctcacttccccaaacatatctcccctaattcagttccaaccacactttaattcccagtttggacccccatttttctcctgaaactactgctggagagttctctctctttggagttgcagttccttctgcaacgttgcatggactttggtaccaactggccttggttgctttgtatatgagtcctgtatcccaaggagactataatcttcctgacggtcgtgggtttcaattcctagaatcacgaaatagcagcactttacagatgagaacattagacccagagaggtaaagtaacttgcctaaggtcacacagctgaattcagcaaacaggtgaattagtctttcttccctacttgaactactacttgaatgagtgctccgagacttgatgtctgcgacactctgtttttttttttactgtttccactgcacttttttgttctagagacctttctccataccaaatataattctgtactatcaattatattttaatgtataaaattatagtcacatttcaggtcctgcctcccagggataaccttgactaaagttttaggtgctcagaaataatttagtgacacatttatagattttaaagtttggtaagaaatttggaagtaactgccaaagttgaagatatgtgcataccgcaactttgtaggtctattgctttgcatgtattctatcgaaactctcaaatatgttcccaaggaggtatctacaaggatgttcacagcagcatgagttataagaaagtggaggagaaggaggaggaaggaagaagaaggaaaaaaaggaaaagatgaaacatcaatagaagaaaagatggatagcatatttctttcttcttcttcttcttttgtttgtttttttttattttttttttttatttttttattttttgagacagggtcttgctctgtcacccaggctggagtgcagtggcactatctcggctctctgcaacctccacctccagggctcaggtgatcctcccacctcagcctcctgagtacctggggccacaggaacacactaccatgcccagctaatttttgtatttttagtagaggcaggattttgctatgttgcccaggctggtctcaaagtcctgagctcaagcgatctgcctgcctcgtatgtctattccgatggaatctgcagcagtggttctcaaagtgtggtccaggagatcattaaaaccttttcagggagtttgcaaagtcaaaactgatttcacagtattactgaggtctatttttccttttcactctcattctgtaccttgaagttttccagagactgcatgttctgatagccacaggctaaacgcagaaactgtcttctattaaaccagacattaaagagatcacaaaagtgtcaaacagtgccactttttttcaatgttttttgctttgaaaaacataattatttatcataaaatatgttgtcttcacgtattacatgataggttttcattatttttaattaaaaaaaatattttaatttttctccttcttattttctgatgtggtaaatattgacagatataatccctataaaccaaagctctttgtttttctcacaatttttaagagaataaaataattcttagagtaaaaagtttggttgggtgcagcgactcacacctgtgatcccagcactttgggaggccaaggcaggaggatcacttgaggtcaggartttgagactggcctgagcaacctagtgagaccctgtgtctacaaaaaataaaaaagaaactagctgggtgtggtggtgcatgcctgcagtgtaactagttgggacactgaaggggaggatcacttgaacccaagaggtggaggccgcagtgagctgtgattacaccactgcactccagcctgggcaacagagcaagactctgtctagaaagacaaaaaaaaaaaaaaaagactaacaggtttgagccctgctgttgcagacagtgagaatgaatgaatggagactgcacgcactgagcctgaatcttggaggcacgatcactggagttgcaggagaatataaacagtgatttatattgtgttttataactagtaaaacatgctgtatgcagaatacatgtttttaggaatatacaggtatataaaacatgtataaaaagttatttttatatttgtgtatatctgaaacactttataatacacttgaaaaactataaatagctatataagctcaacaaccacaaaaaaaattagaaaatgaacaaaagacttgagtagacatttcctcaaagaagatatacagatagccaacaagcatatgaaaaaaagttcactatcagtgatcattagagaaatgcaaatcaaaaccacaatgagatacagtctcacaccagtccgaatggctattactgaaaagccaaagaataacagatgctggcaaggttgtggagaaaatggaatgcttatacactgttggtaggagtgtaaaccagttcaaccattgtggaaagcagtatggtgattcctcaaagagctaaaaacagagctaccattcgacccaggaatcccattactgggtacataaccgaaggaatagaaatcgttctatcataaagacacacgcacgtgtgtgttcactgcagcactatttgcaatagcaaagacatggaatcaacctaaatgtccatcagtggtagatagataaagaaaatgtgggctgggcgtggtggctcacacctgtaatcccagcactttgggaggccgaggcaggcggatcacaaggtcaggagatcgagaccatcctggttaacatggtgaaaccccgtctctactaaaaatacaaaatattagccgggtgtggtggcaggcacctgtagtcccagctactcaggaggctgaggcaggagaatggcatgaacccaggaggcggagcttgcagtgagctgagatggtgcactccaggcactccagcctgggtgacagagtgagactccatctcaaaaaaaaaaaaagaaaaaaaaaagaaaatgtggtacatatgcaccatggaatactatgcagacacaaaaatgcatgagaccaggacttttgcagaaacgtggatggagctggaggccattatccttagcaaactaacacagaaacagaaaaccaaatgtggcatgttctcacttataagtgggagctaaattatgagaacacatggacacaaagaggggaacaacacacactggggcctgtcagagggtggagggtgacagtagagagaagatcagaaaaaaataactattaggtaccaggcttagtacctgggtgatgaaataatctgtacaacaaacccccgtggcacaagtttacctgtataacaaacctgcaggcgtacccctgaacctaaaataaacatttaaaaaaaagagaagatgctcaacattacttaccattagcaaatacaaattataatcccattagagaagtgcaaatcaaaggagatattgccttgaacccattaggatggctagatcaaaaaacaaaaaataacaagtgttggtgaagacgtggagagttggagcctttttgcacttttgctgggaatgtaaaatggtatagctgctatgggaatcagtacggtggttcctcaaaaacttagaatgactgcatgatccagcaattctaccctgagtatatattcaaaggaattgaaagcagggtcttgaagagatatttacacacccacatcgattagcagcaggattctcaatagccaagaggtggagacgacccacatatccatcaacagatgaatggatgaacaaaatatgctacaaacatgcaatggaggctgggcacagtggttcatgcccataatcccagcactttgggaggctgaggcaggctgatcacttgaggccaggagtttgagaccagcctggccaacatggcaaaatcccatctttactaaacatataaaaattagccgggcatggtggcatgtgcctgtaatcccagctactcaggtggcggaggcatgagaatagtttgaatctgggaggtggaggctgcagtgagccaaggtcataccgctgcactccaggctgggcggcagagtgagactccatctcagaaaaaaaagtgcaatgggatattagactattagccttaaaaaggaaataaattccttcacatgctgtcatgtggatgaactttgaggaaattatgttaggtgaaataagccagatacaaaagaacagatattgcccgttctacctatgagaagtatctcaagtagtcaaattcacagaaacgggaagtagaacggagattgcagggcttgtggaaagggagaatggggagttattgtttaatgggtgcagaatttcagacttgcaagatgtaaaagttctggagatgaatgcccaacaatrtgaatatacagaacactgctgaactatacattgaaaatgattaagatggtgaatttcagccgggcgcrgtggctcacgcctgtaatcccagcactttgggaggccgaggtggccagattaccagaggtcaggagtttgagaccagcctggccaacatggggagagcgctgtctctactaaaaatacaaaaattagccgggcatggtggcaaacacctgtaatctcagctactcgggaggctgaggcgggagaatttcttgagcctgggaggtggagattgcagtgagccaagatcatgccattgcactccagcctagcctggcagacagagtgagactctgtctcaaaaaaaaaaaaaaaaaaagatgaattttatgttatgtgctttttaccatgataagaaaagctacataattgcagtttttgtcattacttttaatggcaaaaattgcaattacttttgtaccaacctagtaatcgctatgacaaacctttgtatgatgggggaattttctgattccctgccctcactccagttatcataaaaataagtcgactgtttctgaatttcccaagtgagtatcttgcccagacttcttgctttagtccagtctttgatgttggctcatatgaagcattctgcccttccagaatatcccgtacttcctccctatctacataaattctacccaagggaactctaatgaatcccattgcagcatgcccaactccatactgctttctccatgatacagtcagaagccaacccagggcacttggattcctcttgccttaaggacccaggacacttattttgtgtacaactagatgttcattacttatatggccccatgtactgcttcttaagttttcagagctgttccatcgctcccattagaatgtaagcccttggaaaacagaggtcctaataacacaacatggcttatacgtgcctgcctcagagctttggcatatggctgtcacacaataagactggtgaatgaatggataaatggatcatggatggatcaatgtggtctttcactgtagctgagctggatgcattaagaattaagtataacatcttctttttttattttattattattatactttaagttttagggtacatgtgcaccatgtgcagtttgttacatatgtatacgtgtgccatgttggtgtgctgcacccattaactggtcatttagcattagttatatctcctaaagctatccctcccccctccccccaccccacaacagtccccagagtgtgatgttccccttcctatgtccatgtgttctcattgttcaattcccacctatgagtgagaacatgcagtgtttggttttttgttcttgcgatagtttactgagaatgatgatttccaatttcatccatgtccctacaaaggacatgaactcatcattttttatggctgcatagtattccatggtgtatatgtgccacattttcttaatccagtctatcattgttggacatttgggttggttccaagtctttgctattgtgaatagtgccacaataaacatatgtgtgcatgtgtctttatagcagcatgatttatagtcctttgggtatatacccagtaatgggatggctgggtcaaatggtatttctagttctagatccctgagaaatygccacactgacttccacaatggttgaactagttgacagtcccaccaacagtgtaaaagtgttcctatttctccacatcctctccagcacctgttgtttcctgaccttttaatgattgccattctaactggtgtgagatggtatctcattgtggttttgatttgcatttctctgatggccagtgatgatgagcattttttcatgtgtcttttggctgcataaatgtcttcttttgagaagtgtctgctcatatccttcacccactttttgatggggttgtttgtttttttcttgtaaatttgtttgagttcattgtagattctggatattagccctttgtcagatgagtaggttgcgaaaattttctcccattttgtaggttgcctgttcactctgatggtagtttcttttgctgtgcagaagctctttagttgaattagatcccatttgtcaattttggcttttgttgccattgcttttggtgttttagacatgaagtccttgcccatgcctatgtcctgaatggyaatgcctaggttttcttctagggtttttatggttttaggtctaacgttgaagtctttaatccatcttgaattaatttttgtataaggtgtaaggaagggatccagtttcagctttctacatatggctagccagttttcccagcaccatttattaaatagggaatcctttcctcattgcttgtttttctcaggtttgtcaaagatcagatagttgtagatatgcggccttatttctgagggctctgttctgttccattgatctatatctctgttttggtaccagtaccatgctgttttggttactgtagcctgtagtatagtttgaagtcaggtagtgtgatgcctccagctttgttcttttggcttaggattgacttggcgatgcgggctcttttttggttccatatgaactttaaagtagttttttccaattctgtgaagaaagtcattggtagcttgatggggatggcattgaatctataaattaccttgggcagtatggccattttcacgatattgattcttcctacccatgagcatggaatgttcgtccatttgtttgtatcctcttttatttcattgagcagtggtttgtagtcctccttgaagaggtccttcacgtcccttgtaagttggattcccacaaaaatcctcaataaaatactggcaaaccgaatccagcagcacatcaaaaagcttatccaccatgatcaagtgggcttcatccctgggatgcaaggctggttcaatatacgcaaatcaataaatgtaatccagcgtataaacagaaccaaagacaaaaaccacatgattatctcaatagattcagaaaaggcctttgacaaaattcaacaacgcttcatgctaaaaactctcaataaattaggtattgatgggacgtatctcaaaataataagagctatctatgacagacccacagccaatatcatacagaatgggcaaaaactggaagcattccctttgaaaactggcacaagacagggatgccctctctcaccactcctattcaacatagtgttggaagttctggccagggcaattaggcaggagaaggaaataaagggtattcaattaggaaaagaggaagttaaattgtccctgtttgcagacgacatgactgtatatctagaaaactccatcgtctcagcccaaaatctccttaagctggtaagcaacttcagcaaagtctcaggatacgaaatcaatgtacaaaaatcacaagcattcttatacaccaataccagacagagagccaaatcatgagtgaactcccattcacaattgcttcaaagagagtaaaatacctaagtataacaccttctttgaactaatgtagcttccacatggctaagctttgtgtatattccttgcaccacgctgaaatttcctttcctctgcaacctcatcttgctctaccccaaggggcacttctactgtaaacctggatggtgtgtggagtgaggcagtcctgactcccctaccctaatcccactggcaccccattttactgccctttttgttttaagacgcttactattaattgatacacaaaaacaggaggcaggtaacaaaaataataaacatcagggcctgtacaccatcatgagtaacacctaacatttgcagttagatatctctgagctcagttccccaccatcccacttactagctgtaggtcctcggacaattcacttgaactctttcttttgttgttgtgctagaacacgcgtaacacaaaatttaccatgtgaaccttttttttttctcgttttcctgagatggagttttgctatgtcccccaggctggagtgcagtggcacaatctcagctcactgcaacctccacctcctgggttcaagcgattctccccgcctcagcctcccgaatagctgggattacaggcacacaccaccacacctggctaatttttgtatttttagtagtttcaccatgtttgccaggctggtctcgaactcctcaccttgtgatctgcctgcctcagcctcccaaagtgctgggattgcaggcatgagccaccgtgcctggcctgaaccaatttgaagtgtacagttcagggacatgagaacattcacagtattatgcaaccatcgccaccacgcatctccagaaccttttcatcatcccaaactgagactctgtccccatcaagcatgaattccccatttccccccttccaagttcccgggagccacaattctaccctcagtgtctgtgaatgtgactcctctagggactcatttcagtggaactgtttaacatttgtcccttggtgtctggcttctttcaccgagcataatgtccccaagtttcctccatgttgtagcaggtgtcaccacgtccttcctttttcagcctcaagaatattccagtttaacctttgaaagcctccattgcctcttctgtaaaatcggatcagtaggccatttttcaaaggttgttgtgaggatttaataaaatcaggtaaagcaacagacagcgcccagcgcagtgctttgagccatgataaaaattaatttagcctccttctcttccctttctaaatgataagttacatgaagaccaggtgcaagaaaaatgcctttctcatgtccgtggttcctgaagtcacacatttgtgagtgctcagtaattaatattatttttaactgaattggataatcttcttatttagcaagttagagattaactcccagagtcccagtattgtaaaaataaaaatgttacattcacattttcccgctatttttcccctatagattaaaaaaaaaaaaacagaaaggaaataatagcagactttgtcactcaggaaaagaaagagttgacttaagacaatgtgggtctgggcgcagtggctcacgcctgtaatcccagcactttgggaggccgaggcaggcggatcatgaggtcaggagttcgagagcagcctggccaatatggtgaaacactgtctctactaaaaatataaaaatttagccaggtgcggtggtacgtgcctgttgtcccagttacttgggaggctgaggcaggagaatctcttaaacccaggaggtggaggttgcagtgagcctggatcatgccactgcactccagcctatgcgatagaaagagactcctcaaaaaaaaaaaaaaagagtgtggggtaggatctccaactgcttaggcgagagaggaggttaaacagtcatcacacaaattcagattctaagggcaggtgaatgaatagaaccaataagtgaagacccagtttccagttatctccatttatcaatgtccttggcctaagtcaattagagttaatcactgtggagttaattacagtgtctctccttgccgttaacaatatattctgtggtcatcgcattattagaatgggcaaattggttcttcagttgacagtgtgaccaggtcattaaacagacaaatctccccgatgaaaaaccttgagcgatgttgattttggtggaaacataaagccatccacaaaccatcctttccaggatggatgtcaggtagtgggaattaagctcaaaactgtgactcacaaacagtttaacttccttcaggttgattttccccgttggtaaaattcccatgaatattctacataaccctttgattcttccaacatcgtttttcccaaacatctttcctgagagctcttcaaaagatggtaaaggtaccatagtaagatacatgatgtaatgaacttgacctcgctgaggggaaaatggccatggtagcctgcttggaagaaatatgcaaaccatctgagaaagagacagctctctcagtgtcgtggggttggaggtcatgtctttccttttcacaacaggaagggctggcaccttctgctctttcggtcctgacaactgtctgctcagagcatcagccaaacaaggccytgtcatcccagccaggaaggatgcgcggtgcatgggagtggcaggacatttgtggaaggagtacagccgaccccccagtttcctccagtccttgtccccaggctggggttccttccagcacttgcagttcagccctgctcagcgtgtttctctggaaaacagaaccgtgggccttgtcagcaacctgctgtgtgagttgggttgtgtgtttgatcatcgaggacagtgtttcagcatctggaggtgtgtgtttgctttccttaggtaaccacaaagtagtggttagcgtctctctaattgataagggtgacagaagctgctgctggctttagaatgatgcctgaactcttcttctgaaaatgaatgtggttaatttagtcatgacagacacatttctgacttcttcctccctccttttttccccaacgccacctttccccatggtgttgtgtttttgcttttgtttttgtttttgttttcctctgtctggagactgaaagagaccagactgcgctcagctgaaagctaagggaagcctgtgctgctccgccagggctgagtattttgttttcagctccgcgaactccacctgtgtgactttttcttcctttctttttaaaagtaaacatggcaggatgtgtgctcaccaattactgagcgcacagaaatacaggaactgctgggctaacgaacacgacttcaaaggacagtggtgaggagcccttgcctccctgccaggcttgaaagggctgagctctccagggagggcagggcccaccctcagggctccaccaaaatagtgacttcccagcctgtgactttcttagagccctgaggaaggactcaacgcagggaaaggacgtgatggcagtggggattccctcttgctttgagcccttctgaatgcaagcagaaaaagaaacccttttatattactttttaattgamtataataacagaaacaatgaaaagaatgtgaccttgactttgcaactctatttcccaggcatattcctaacaacacctaagaaagctaggatgtaggtagcttttatcaccttcgttctttttaggtaatgagttagaagcacaaagcaggcaagagacctcgtaacgtcaaatttaatattaagctgatcttctgatggcccaggacatacccctgggtgctagaatctaacacggagacatggatggtgacgggtacctagtgatccagctgttgaactacacacaattctgctgttgtccccgagggagaactgttcactctgaagctgcagatgctgtgttatagggtgttaaagtctctacagtttctatcaatgctgttgcattcatgttttattgcttctgccaaaatacragtatttcaaggatgaagttcatgttctcccaccagctcttgtctaaaatccatgctcaatgagtatttactgtatgcaggttattactgaagagaggacttatgtgttcttcccatgacatcagaatgcaaggatatttctccaagagagcaggcttctatctgcaaatgcattcacctgaggatagtggtgagacagccactgagcctggcaagtcagcaccactccaggttgttgggctgaaaatagactagagagagtaatctctaggccctcattttataggcaaagaagctgaaacccacagagggtaagcagtttccccatgtttactctgtccttcattgagctttgtattggcttcgttgctcttagtgaaaacacaaggactggccacagttagagccggggtccatgtgtgcatcccaggcttctgcctctgacagagttgaggaacgtgttgagaaggtgtggttgctttccttgaccttaaacttaaatagcgcagaattgctttgggctcagcgttttaatcatgtcacataaaaatcagatgctatccacagagaagaaaaaaaatcatttgaaatgtgcatatgaatatttattagagaaagagtaaagagtagatattacttcatatggaaacgaggaggcttggaggtggctttaatatgcagcatcagtaagaatcaatgcaaagagaatgctatctagcaattttaaatgttcactcaaagagaaatgggcttgaattatagcaggaggattcctgtttagttgttaaaaaaaagataaaaagtaatcagtaggtctcaacatggacttactaaattcatgccagattcacctagtttccatttttgtagagtccccagactaatgaattattagaccagtgagagaacatgatttcaatgagatatctaacaaaatggctcataacactcctattagaaacgtgaaaagtacctagtgggcacctagggggcaacaattccttcagatccaggaaaagggggtctttaggggcaggtcatagaattcggtactggattctgccctagtcatcagcatttctagaaataaatgtccttaagatttagaagttaggccagatttatagcagaccacacaaaactcaaagggtcagtagaatgcagaatcaaaatgatcatgtagactgaaaaactaggccaacgccaaattcagatctgactttggcaaaagcctttacgcagagtcaacagcttaactggtccagggccaggtggggaaatcatgagaacattatgatgaacaggacwccggggttttagttagttgacatttctatctgagttggcagtagaatgtaacgtctgcaaaagtcagttcattcatggtctgcatttatggaccttcagtgcatctagaacttttaccttctgcttatcaaatagtatctggaaatactgattattctggatatgcattgtaatgatattgacactcatgaaaagatgctcaacacccttcctcagtagggaaatacaacacaaatcaataagctctgcttcacacccattaggatggctattaccaaaaaaagggaaggtggtgttggtgaggctgtgaagatgtgggaccttcttgaattgctggtggacatgtgaagtggtacagactctgaggaaaacagtgcagtgattcctcaaaaagttaaacagagttaccacatgatctagcaattccattcctgggtattctcaaaatagttgaaaatgaggactgagatacttgtacactaaactccgtggcagcattattcaccatggccaaaaactagaaacagcccaaatgttcatcagcagargaacaaacaaacaaaatggggcatattcatacaatggaatatcactcatccttaaaaaggcatgaaactttctgacacctgctacgacacagatgaaccttaaaaacatgatgctaagtgagatgatccagaaacaaaggacaaatacgctaagactccacttatacgaggttcctagagtagtcaaatttataggcatagaaagtagacgagcagttatcaggggctggtgagtgggaggaatggggcgttagtgttgaatggggacagagtttgagtttgggaagataaaatagttctggagatggatggtggtgatggttgcacaacaatgtgaatgtatgaatgtcactgaactatacaattaaaaatggctagcatgatacattttatattgtatatattttaccacaataaaaaggttattaaacatagactgagtatcctggcagcaagaactagtacaaaaagcaaactgacaaactttgtgtgtctgggcaaagatgatcaagaccataggtctagaaactctgacaaagaaagataactaaaggaatttagttatcatttactgtcaagaagaacaggcagaagagggtgctggccacccttaattagttgaagggatttcctgtggcagaggcattacatgaattccacttattcagagtaaccagagggcagaatcaggaccaatggaagaaattatatccaaggaggtaaatttcagtgcaggaaagaactttcagccaattagaactatattttgaaaagaagcaggggcactgctaaatgcacaactgagtgttcacagtatactcaagaaagacattttatgcaatttgtgatgcagagtgctgcgctgatgagttctctaaagcagcggtccctaacctttttggcaccagggaccagttttgtagaagcctatttttccacagactggggtggggaatggtttcaggatgattcaagcacattacattaattgtccactctatttctattattattacattgtaacatataatgaaataattacaactcaccatcatgtagaatgagtgggagccctgagcttgttttcctgcaactagatggtcccatctgggggtaatgggagacagtgacaggtcctcaggcattagattctcataaggagtgtgcaacctagatctctcacttgcgcagttcatgatagggtttctgctcctgtgaaactctaatgctgtggctgatctgacaggaggcggggctcaggcaggaacggtcactcaccgcctgctgtgcaccccagttcctaacaggccacggaccaccactggtccatggcctgggggctggaggacccctgctctaaagggtcaacataggtgaatttagaaaagtcagcatcctccaagttctcagaaacattctccgattcactgatgagtcgtgaaaatatagtgaggcagaatgttagggccaacagaaaggaaagtagggctctagggattacagtcaccaaggtttctacccttgtgcaagagaaccatcacttaatacttagtcatgtcattttcaattattaaaaataaattcatcacgcctgtaatcccagtactttgggaggctgagatgggcagattgcctgagckcaggaattcaagaccagcmtgggcaacatggtaaaaccccatctctactaaaatacaaaaaattagctgggcgtggtggggcgcacctgtagtcccagctactccggagggtgaggcaggagaattgcttgaacctgggaggtggaggttgcagtgaactgggtgacagagcgagactccatctacaaaataaataaatgaataaataaattcaaagtccttcatttctagagagtatggaaataggtaaaagtcaacagcttaaaatctgaactaggaaaatcagtcttattccaactccgactttccagagtccatgaccagctggcactaggacaactctggcagacttatgtcactttggtgacgtcaatgtgacatcacagccaagcaaggaaaggcccccattatcttagtgccgactagatgttctaaaggcaggaggagccagggagggggcatcttggtttgaaaaagcttttccccatgtccttcaaactgagccatgcctatgatagatttgaaatgcagcttttgtcgtgacatttcccaatggaacagcttctgtaaaacgtttcctctctctctgctaagaggtcattcctgtctggaatgcctccagtacaaaactagccttgcttctttagcttccccgaggtccagcaaggaaagacctgaaattggttatgaacaggttggcccaggctggcatacccgtcttctgacaatgccgcctccaagctcacccacctccaggctccagtcctggcagcaatgggagttggaccactggaactagcacagtgggcctcaccttagagcaggtactcctgtttctgagcccacagagtgaggcacaatgaagggtgtttcagctggaacagaaggcacatccttggggaagccagcaggagccttggtcccgctttccctgctcctggaggcagtaagccccaagagagcaattcccttccctccttcttttccttcctgttttgcaggaggccagatgttcttttcatgccacttagcttttatttccaaaccatccccggtgaggaagcgctaaactgcagaggcctcggaggaggaagtgcagggaaggggggcgctgtggaagaggaaccagaaaaggggaaagttagcttgccctccctagccctgagtttgcaagtatcaaagtcaaaatgtgtggcttcttttcttggagcaactgagatgaaagtgtctttgagagccccagagaagtgtcagatgaataagatcggtcagtcatcatatctctgcagcaaggaccagcgaagagagctcagtgggagccaaaggtctcctgacgaagatctcaccataaccaactcagccagttgccattaaaaatcctcacagaacagcacttagtttacaggagctcaaagacctgtgaatgctttcagaatagatcccgagaaaggaagaggttctgggcagtgcaatgtcctcaggttagcttctgtggcacctgagttcccgttcccgcagggctggaacaagctgtgcagccttgagcaaaggtcttcacctctctgagcccatttccacatctgtaaagtaaggacaagagaccgacttggatatgtcacaagatggtggcattaaaatggagagatggaacttgaaaacactttgaaaaaacatcggattttgttagtcctcctcatttatttccttaagaggtaaactgaggtatagattaacaaaatggcttattggtttcagtccttttagaacaagatgaaattttattttagaaaacaaagcgagaaataaaaaaaagaatcaccaacttccctgcaagcattcaacaaatgcccatagtataaaaccaacaagaggagtcaaaccgcctcttctgcwtccccaccagccacactccgacacccccactgcgccccatctttctgtccctgatgcttgtcaaattgttccatcgtcagccccaccagagctcatgctactctgagcccctggcttgggagagcgagaactgggatggggaagggtattcttccaaaggcaccgtaggtattgttttgtttctgggagggaaggtggtgcctccagcctctccttcctcttgcagctcgcaagcaaacacagatggaggagatgctctggctgtttttaattctgctttctctcccagggttcttacccagaaaacctattggaatttcaaattttcaaacctcaggaaagtgttgtgtcgggaagatgatttggggttgttttgtgctatcagctgtggggctgggacaggacactgaagcccagtaccccatttggatactgctcttcatcctatttttgcctgggagaagaacagggagaactggctggaggaagaggagaaggggagcggaagaagaagagatttttagagcataataataaaatcgtattttactattagaataattttttatcttccagaacatgttttcagttatagccttgtctgcttcttactaaagtcttatgaggtgtgctattcattagtctacaagtctgctgctgtcatagggctcccaagtaacagtgactgaaagaagacagtggacatccctcccatgtcagagcccgggctcaggcagtcaagggcatagccaaggtcatcgccaaggtcactgccaaggtgatttgacaccatcacatccatgttccagccagtggcaagtggctgggcccaccctgggggttatacccctcagcaaagggacattgaaggaatctgtgtctgggaccacccaggctcagtgcaggtgggggattagagccatgggctgcccggaccttcaaatgccctcacaggtgatcatgtttcacacattccattctcctcatcctcctcattccacggacacacacaaacctccccatgcacatctgcttccccagggtcccccttacttcctactgtccccaagggtgacctagaaccaggggtagggcctgactccactgctcagtaggaaggaagagggcttgtgatccactgccatggctgccctagggtggtgctcctagaactccatgtgggaggctgggggcatttcctcatagatcgatggcaaatccacagcagttggtttcgtcagcttaaaatgagtgacagacagactgactttccaaagcatagagcttatttgggaagagcaggggactgtaatcgggatctgtccgctttgatggatctcaggtgcgtctaaagaggcgcggcgaggggagacttcaaaagaccaagaggggaggtggacacgggctgttttgaaacagcgctcagtgcaggaggtggccttggcgcatggctggagacaggcgtgtcaggccggcagcttgtctggaatactttggttttggggaattccttgcctacttccttcgtaacctcccaggtctttttacttggggtttgacataagtgactccattttgatactggtaactttcacattttcatagcaccatttggtactgaaaaaaaaatgtattaatacatatgtggatttaacatcatgggtaacatttctatggaaaaaatgtatattccctcacctaaacaaataacttattagtaaagttataaatttttgctgtttcttaaattgggaatctcccattatgaggattggaggattcttggaaacaggaactatggcttagatacccacaatactttccacatatggaactcctgataagttggtattaggtgaaagagagacttgttaaattaccaaatgttatcaaaactgggcatccgaatggtgccaggtgatacctgggaccaggtgaacagagaggtcttgtagtggaaagaaactagtgtcagagtcagcagaagtgagccaggttacttacaagctcggcagccttggagaaagtgttaatttctgtacacatccatttttcccttctttataatgggaacaattcatcctacttcacaaaattgttaggacttcaaaccgaataaatatatgaaaaacattttccctttttgttacacagaattattttttaaaatttgaattgcacattccaaaaagaactagttaaaatcaactaatatccagtatactgaaagatagcattttactccaaattttttcccactgacagatttttatctttgtaatgagtttatatatatatatatatatctatatatatakatagatatatgtttctatttaacttttaagtatattctgtaaatatctttgtttcaataagtaataagccactggttataaaatattccattatagttacatgccattatatatttaaacaatatcttatttttgaatcttcaggctgtttctagttttattattattaaactgtgctgcaatgaacagtcttgtaagtatattttcttacactttccttatcactttaaagtcatttaatacacayttccttctataaagcttgtagaggtctcttatccaaattgctatggcgagatctgcttcataattcatattttataaaggtaataaagttacatgctgtatattacaaaattttcccaaaaagctatgtactggggaaggatattaagagtcatgttcagtagaataaatagactgtaaagagcttcatgtcagactttggattttgctacaaaattagtttatatcacagaataattattttctatttttagagctttttggcatttggaatcacagagaagggattaaagacctggatgatttacctatcttttatttctagtaaaatggaacttgttttattggcccttgataactttacttttgtaaattgcctgttgttagcctttgcccattttttcattaggggatttgccctttttaatgatatttaaataattaaatattttgccacatattttgcaattatgtctcccagctttacgtgtattaataacacacaagttttatgtaaaatagtttggaaatgtttacctttttggggcttgtctgtgggatcatatctaagaagtcattcctaattccaagagggcataattattgatctatgttacctagtacttttagtggtttagcagttttatttctggatgaatatcttcaatctgtctgaatttagtattatattagctttaatgtaggttttagctggtagacacagtctcattcattaagcaatctttccctttcccgttgagtttaaataccatcttctttaaacacaaaacttttatatgtaattggatctgtttctggacattctgttttgttccggtaacctgtccatctcttttgctgccagaaccacattattcccattataatatctttattttaatacctattagggctgggagaaggaaggatgaagagacagagggcatttttagggcagtgaaacttctgtgtgatccactgtaatggtggatccatctcattatccatagaatgtacagcktcaggagtgaacccaggccaggcacagtggctcgtgcctgtaatcctagcactttgggaggctgaggcgggtggatcacctgaggtcaggagttcaagactagcytggccaacgtggtgaaaccccgtctccactaaaatacaaaaattagccaggcatgatggtgggtgcctgtaatcccagctactcgggaggctgagacaggagaatcgcttgaactcgggagatggtggttgcagtgagccgagatcrtgccactgcactccagcctgggcagctgagcaagactccatctcaaaaaaatagaagagtgaacctgaggttcacttatggactttgggtgataataacatgcaaatgtagactcatccccagctctggtgggggatgttgataatgggaggagctctgcatctgtaggcacaggggttaagtgggaattctctgtaccttcttattttactgtgaacctaaaactgctctaaaaaataaaacctattttttaaaaaaacaaaatctaaacattacttttgaagtcatagagcttagattcaggggggaatatgaaaaaaatagaaaattagaatagattgcaatttagcaagtattgcagtaaaacaggatccacagaatagtgcttctttaactctgtggtaaagggccagtgaagaaataaattaccaatatctcttagatttagcagcctcttagttattctcatctttgaaaagctatttgtaaactgtaaagtgctcttgcctattagttatttgccactaatctataatggactccttttaaaaatgaaggtattcactccatctaccttctgctctggagaataatgaaattgcagttaaaaaatgctgtcatgttctcttgagagattggtgtcttgtaagaacaggctgaagtacgtttcagacaagattgggtgcagtcggggtgggatgactgtagactgaagcacatgtcaagattgggtgcattcggggtgggatgactgtagactgaagcacatgtcaagattgggtgcagtcggggtgggatgactgtagaccgaagcacatttcaagcaatgtctcttgtcacaaaataatctgaatggctcaggacaaattcaccaagtaaagtagaagcttgacatttgccaactatgtatcccataaccaagtactgtttttaaaccatgtttttcttaaagaagctaagcttttaatctcttcatattatatgcatatgatgaatatagaaaagccccttttaaagtatgaagaatgagcatttcacccggccactggctgattgaatgccagctactgcactggatgctgctacactgctcagaaatcagtacaagtcacaagcattaagtctgatagggtccgacatctggccgattaaacaatccttcggcatatgtaatattaatactctgtgcatgagcaaatccaatcacctattcaaatcagatcctcactgagtgatgcctggaagagtcaaacactggcccggccaaaagaggaccgagggaggcgctgggagaactggctcctaatcccttcctgctgctaattaggtagatagctttgatcactcaccttaattttctgagcctcagttctctcttctgttacatgagagggcagaccacgagatcaataagggcactttcagctttcaaaatgaaaaaaacaaaaaaacaaaaaacagatccactaactgatttatttcctgtcttattataatggattcatccatttacttattccaaagatgcttattatgaacatcttacatggtcaattcctgtgccacgtgtggtccctaaatgagaagggaatatgggaaagagagagagacagagtccctcaatctaccttcttccattctctgggtggggccagaattcactgaacatgaggaagtgatgagaagtggtgaggaatgggttggggagatattctcggcattgccatttatttagaacagggtttctcagcctcmgcactattggttttgggggggtgcttgggggactagcctgtcatcgtaggttgttgagctgtatctctgacctcaccctactagataccagaagcacaccctcccgccatttgtgacaaccaaaaatatctgtctccagacattgccaaatgttgctcagaggagcaacatcaccctctgagaaccactgatttagaaccaccaggcactgtgctggattctgagcaaatagaaacgagaaagctgctggcctggcctggtggagctgactccagggcagctttgcgaacttcaatatgcatccgttccctggcggccttgctaaagctccatcctcaccccagagcttctcacccagcagctctgggtggggctgcaggatttgcatttttaaagaggtctcagggatgctgatgttgctgtttctccaggaccatctctgagaaccatgtgggctccaccctgctgacaggtgagagtacagatgtccttttctcacatcataaaacaacttaatagttttctgaattcagaaattaggcctccagtggatactcagcctacagtaactctgaaacgtcacagtgaggaggaaaaatagagagtcccgtaagctagaacaatgccaatgggtggtcagtttcatatattccttttggctcctttctgaattagcagatgaacggtcagtgaaggggctggcctaggaacctaagtattacctaattttagagtttctgtggattctaaaccccaaacaactgcagccaagtttttacgacacttgcatttgtaagctggcgacgtttctgactgcaactggatgtgagcaattcacattgccctaaacgcatgcatctgcccagatagacccagctctttctttctgcactttctttctcttcccccggtgcccttccctagtccaccctgtccctctatttgcaacaaccccccctgtgactgtgatagcccagtcccccgttgccgggcagagccggcacatgcgggcttccgtagagtattctctataaaactgttagctcactgcggactgagcactgctgcttccgcttgctgtattgatactaccaaatactgtattttctttgaaaagtgtcacacgcccgcgggaggaagtggggtgtggtgtcacagcagcataggaggacaggagtgtttttgctactggtgtacccaagggcgacagctcactttgccatttcttgctctgactctgacaccaagttcatgggaaccagccatgtctctattcatgggatcaaaggttaagaaagtggagcccaggctctcgaaggctccttctctgaccgcgccctaggaaggagaggtttgccccatacctaccccatgatgtgttgagaacatgaccctgtcccatatgcatatccagtgcagtgctttgcaatatagtaggcagatattccaaatgcttcgtgactaacagcaaaaaacaaatgtgtgtgtcacttcatccccttggcaagtggttcagaggtgttctgggccatgtctgatgacccatgaaacaagttcctatggtattttcatgagggagaatttctaaggatgttttagaaaagtgtggtgtgatcatcgtagccatcttttccaccaaacactgtcatacgcattttccatggattaattcattaaatcatcacaacacagacatagacccaatccttcatagaccctgatgaagtgggtccattatataccttgttttgcagatatgataatgtagtcacagaaagattaagtcacttgtccaagactgtacagcttggaaactgatagagctggcctatactccatgacaccaacatttacaaactgcaagctccttcacatgttaactccttcctgggtctctgtgcctttttgaactcggccatgcaaaggttcgagaatggcaaagcctcatgcccaggggcttcagatccccttctcagtctaggtaccctttgaccagagcacctgagtccctggccccaacttgacgcccctgttttgggtggtgtgctcttcctcactgagcacctacatgacaggaagaaatgtcaggaggactgcaagggatccagcatctcagttagagctgctgggtcacaagatggtagagtcagagagaaggttgtcttttcagagtaaattttgacacaagaagcagagtcctacatttccatttactcctacagaaggcagcatctttgtgtctagtaagtgattatcctaaccatggttagaaaatgatgccagggaggctgagttcctcccaactttatctgatgaagttagcttctttctagactttgtccatagaaatcctcattgatcccaatcagccacttctaaaggcatgaatggcagaagcttggagggaattgcacaggcttatgacatgctgagaaaattacccagataggcacaggcgccctgacatccagaagagaacttagggtattccgagaaactccatctctgtttatatcacccaattcttcattcttcaaaccacagccatggagtagaaagaaagatcattaagccccaggtacaaggagaaacatcctaatagtgcttaagataattaagcaagttgccaggaaagcctgtccctacagtcataacatgtcctttgcaagtagggacaggtgggagcagacagaaacagtctacagcgaaaactctatgcattcatgtcctccctgacctaaccttcaaagacatttgctaacaagaaataacgtattagtttgggtggagacacttagccaccaaagctgggttcaggtgctgttgcttactcactgtgagtcctttgcacagttttgtgggttgtgggagatccaacacataagccctcttggctatgcttgtgcttagaacaaacggagaggcagatcaggagacagggagatggagaagcatgtccaccagttataacaaaggccagatcgatggagatggctaaaacgttcaggcaaataagttggtcgtctgttcacagcgtcccaggcgatgctggactgtgtcagggaccctctcacccctgccaaccgaggaggatgcgcccccaccccaccccagcctatgacatggccaaggatagtgcagaaatggttctgcagatcagcagatcctgcaacatgagaagaggagggtggagatgggtgggaacggtttattcatgtagaacatgttaaccaaaaaatgagtgactgaggcaagtttctctatcagttgaggtttattgagctaaagtttgaggacacacccgggaaaaacaccagccccagaagcacctgtgacctgtgctttccaaagagggttttaggaactcagtgcttaaggagagggggcaagcaggagggaagagggaggagggaggcagtgaggctctaattagcgcttaccaaatccatgtcttacataagataaggtaaatgtgtgagaacagggagcagaggaacaaatccattatgcacctgcctcagagtcaggagaagagtgactgatctcagctggcccttcttctgtacctgggaagatgagcttgaaatcaacattgtcagttgagttcctaaaacagaactcagttttagaagttaagcttaggttgcagtcctagggttgcaatcggcataggcttgttttgtaggggaatgtggatcctgaaggatttaggggccagaaaggaatttcctcgtaagcagtgtgtgacggtggccatctgggagaagctcggggccttttgtcattgtgggagcctggcttacgtagaatgctgtgacacagggttgtgaagtgaccgctgtctcctggggaaaaagaatggcacggtggcaggacttggcttccaggcttacctctccccttggcataactggtttggggggcctgagattttattttcttttacaaacgtatccatcagatcaatcactcttcttcctggggtacagggatgaggagtgaggataggttagagggatgcaagcctctctgtttgaaaacacagggagggaaaatatgagccttctcataatgaccatgattagcaactgctcggtaagtgatgggtgctgttgtcctcataaccaacatcatcatcattacagtttttatatcttttactgactgctgttttctagatatggaaattatatgacatagacctcaaatatctagtcccatgattcccaataagtacccacttgcccaagaagtttcagtacctggctgctgaaaatacaacttttacatccttagttcatgtgtcttaattcttgattcagaaaagctatcaactgtattctccatatctcaaagttaacgtgtccaaaataaaatgtctcatcttctcatgccatctagttcttcccgcagtgctcccatcttgtgaatggggatggcctcctaccatgggttggggccccaaaccttgaggccgccctgctcctccttttccctcccctcatcttcagtggcttggtacatcccatcaagagatatcggaatccctgcacgctgccagggtccttctgctggtgccctccgaccatcaactggaagagtgaagtcgcccccagtagtctctcttcttctgcacttgctccttacagtcctctcaacacagggaccagggtaccccctttctaggtgtaaataagtctgctctgcactcaaagctgaagacagcacgtagacccctcgggcggtgtcctacctgaactccaagttctcaccatggcctgtggacagccccatgggcacacccacctcgtctgtcttctctaccccttgctcaactccacgcagcccatccsccttcccagaacgtgcttggcagctccgacctcacacccatgtttcggccgggaacgttcacctgccattgtctgtgtgactcagtcctctcctcgtgcaggtctttactcaacgtcatttcacagagacccttcaggaccagcaaagccctccctgccgccccacccagcactccccacctccctcctctgcttagtttgtttcatgggagtcacctggtgtatttcatattatattcttctgctttcttgtctgtctcgtgcatctggacctctgcacaaaggatgggttttgtctctttggctgactgcagtgtcctaagacacttagtgcctagtagctctagtaactgtttgttgaatgaatgaatgagtgaatggatgcatagtcactaaatcagaaatcgtggataytgtaatcatagaacattaggtcataaataccaaggatcctgaggaagaaraagaaagaatatctatgatttggacagccatttttccaattgtggaacattgtttagcatttcaaataatgaaaataaacacatatagaaggcttactatgtgctgggcattgttctgttttatacatattaactcgtttaatctgtgcaatgcacgtaggagtttatggagtttcctcataccttatctcattcagttcccaaaataataccagcagattgtgggtgattacaacattttcaaggattcttccccagggcagctgcttgtgggagagctgaggtctagaaaggaggagttgagagcaggaaaggaaccaagsctgaccccacccccatgccagcattttgatttatggaaccctgggagaagagtttctccaaaatgatacttcatggcctccagcagatccccctcaaagaaaccaacctgggaatgaccctctgtgtggagatcaaggaggaaagaggcaagtgagcctttcttttctcctgctcgtggacttagagtaagagtgtctgggacatccaggtatatactatttccatttttccttttgacatcttcgatgatcaagatacctgctaaggatttgttcagaaatcagaattagttgtaaggcagttgcctgaacaactgaaagygtaatgaccccacagagagcactaaggcaacagaaagtacggcgaggtgggattattaggttggtgcaaaagtaattgtggtttttgccaatacttttaatggcaaagtttttttaaaaagtatttttagtagaggcagggtttagccatgttgatcaggctggtcttgaactcctgacctcaggtgatccgcctgtcttggcctcccaaaattctgggattacaggcatgagccaccatgcccagcytttttttaaatttccattacttttaatggcaaaaactgcaaattactttcacaccaaattaataggatatttgatgagttttaatataattatcgtttttaccacaattgaccttcccctactcttaccctcaaaaaaaaaaaaaaagaacttaaaataaatccatagtcatttcaaaagtgacttcaataattttaaagtcattagttgttgggactctgaaaatgtaggaatcctgttatgcatgacagatttccacggtgggcaacagtcacctagcacrtgcctggtagttcagctgtaatgtgggctaaaagctgatggaaagcctaacccctttttaaacagtatttctatgactggctgaactccgtggtggatggcaaggctgtgtcctacatcagtgagagcctgcccgctgcagccaggaggcacctcacagagactggaagcacagagggaggtgggccagctggggcccgaggatccagacttggtgagactcacagaccttggcccactrccctcctccctcctccctcctcacccacttttctcccttcttcacatcagtactggtggcagcaccctgagctgaaggagaaaagttcatattcaacatcagaagttattttatttgtatgtcgctttggtgagagctctgtcctgtaagaggggacctttctcatctaggagaaagtctacccgtacctgtccccatctgagctattaattctatagattctggaaggagaaaaatgaaagtgaaaagtaggtaagaagaaagcatggcagacatgcgcttggaatacggctgaagacggtagatgtggcaggtggtaggatgctgtggaaagggactgaaatctgaggcctgagtttgaattcaggccctccaagcactttgtaaccataggcaagtcacctaaacttgctgagccccagccataaaatctataaattaataagatggagataactaccatagttgtcctgtccacctgacagctactggaagggtttatggagataacataagtcaaagtgtctatgagagttcattacaataattaatgtgatgactatttttaatattattaggtgagtaactagtaacacccactctttctcataggattttttaaggacctcatgaagcatgagaaagattttgaaagatggtaattgtgcttgggtggagatggcagagctcagaaacagaaggaatggcgtgaacagagccatagagacagatattcagggaaccttcagcaaatcgagagaagtccaggcaggctgggactccgctgagagtcgtgctgtgtgaaggaggcaacttgaacccaataaacggaggctttttaataacaggttaagaagctgggactccactgagagtcgtgctgtgtgaagggggcaacttgaactcaatacacggaggcttttaaataacaggttaagaattaggctttaactcaacaaacactgggacagctttcttaagtaacagtgtaacttgaccagggctatgccttagtgggactatctattcatgtaacctattaaaatttgtgtcagaagattaataatgtcatcccaggtgttttattttctatatttcaaggtttaacttcaacactattgttggttttttgggggaaagtgcagagtgttgttaatgttggcaggcaggagggcaacacttggtctgtccacgaagcctccttcatctctagttctgactgagggttgactgttagccttcggtttcctttgtcactgtattgtaggggttattttaaaatattatcttcaatttatactttattattattatcattattttgaaaagggtcttgctttgtcgcccaggctggagtacagtggtgcaatcacagctcactgcagcctcgacatcctgggctcaagtgatccttccactttggcctcccgagtagccggaactataggtgtgtgccaccatgcccagctaattaaaaaaagaaaaaatagagacagggtcttgcattgttcctgaggctggtctcaaactcctaggctcaagtgatcctcccacctcaacctcccaaagtgctgggattacaggcataagctactgcacctggcccatacttactattttaattcacttttgagaycatttttgttggtgaaagctaatatttaatctctttattatactacttagtagaagtcttagcaacaaagcaaaacgctacccaactatgtgattttttttttactagttatcatctttcttctgtgcacattgtgaaaaagtttttttttatgtttcttttaacagcagtcacttttacctaagaaayctttctatctcataaagaaatgcaaaagctattggtgtagcttaatttgccaaaatttttctgaattgatgtttaccaaatttggctgagcagatgtaattggaaaccattgaatgctttgtttctcattcccaratttactattgattaatctgtgttctttcttccacatgtgagaggttttgatacaagtgatgactattgttattttaattctgtgagactctcccccaacactgagccatctcccactaaattatagtaatacaaatgctgtccaaacattttattaaatgaagaagtttgctatttcttatttcatttgctactgargaagagaatgcttgatatttttttcaattgatgagagtatattatacttctattgctttctatttatatggaatttgtccccatcaggttcagttatgtggacatcctcagcatctctataaacgcattctgggagtttgaattgtggagggtgaatcagcctagctaaataggtgagtcagtgtccagagaatcaaaagaccagaattctcagttcagtacataatagcgtgtgacctaaagcactgagcaattatacttgatcatgtacctgcatcgaagctacacacaaaagacaaatgagatcacacttaaagctgaaaatagtgagcctctaagagtaaagatcctttgtaattttaaagtacataggggccgggcgcgatggctcactcytgtaatcccggcactttgggaggccaaggcggatggatcacctgaggtcaggagttcaagaccagcctagccagcatggtgaaacccagtctctactaaaaatacaaaacttagccgggcgtggtggcacgcacctgtaatcccgctactcgggaggttgaggcagaagaatcgcttgaacccaggaggcaaaggttgcagtgagccaagatcgtgccattgcactccagcctgggcaacagggcgagactccgtctcaaaaaaataaataaataaataaataaataaataaataaataaataacataacataacatcacataacataacatagtacatatcatgatggtgttttgcagctggggtagcaaaagcttggaagattggatggacatacctgatatccatcatgataatgactgcatccagatgaggacatcagagggtagtaagtgctctgcaagagatagatggagggttttgtgggagctccgtagcagagtgcagaggaaggtcacataatttaacccagatatgctcctgaaagactatttctactttcctcctgctctttttggtacacaccaatgaagttgagaaggcccattagaaaatatatcagagttgtaataataataactaacatttattgagcatttactttgagccagccccattctaagcaccttgtgtgtatttgcccatttaatcctcatggctctttgggatgagtaatagtattatcagtgatttccaaatgagaaagcaggcttagagagtttaaataactccagcagttcagtgtatgagggcatcgatcttttgtttacaacaagtgctgggctgaatcctttgctcttgactccctctgtaattgtctgtcacttaatttgaccattgtattctcttgcaagtaaaacaaatgcatgagatgaagagatttggtaaaatgttgcttttgaaaatgaactccctaagcaaaaatgcagagtctctagcatatatcagacagggggatcagctctggaggcacatagatgatgaagtcatggccccttctctcggaattgttgaggaagacagacgtgaacccataaatccaactgcacattgtagggaaatacagcagcatgggcgctggcactctgtctcttcccctatcccacaagctgaccacatctccaaaggaatgtgatcacaaagggaaattgtttatcttcactggggatgagggaagtaaggcacccaaatgcactcgttctgaggagtttttgctgaatgtattgcagatgagaccagagagamttgtgtagttggagtcaaacccctcttctgagtgtatgtagcatctcaagaatcaagtaggcgacatcctggtggggctctataagtccccacattagagggctgagagctgggagccacaggatcaaccccactcggactgtagaaatggcaggtgtgacgcaaatcaatatgacaggtgctgtctagcagtgcactcagagaactgcaggagccagggctgagaacttcccatggagatgtgttgatgggagggctctagaggaggggaaggaaggcttccaagaggagctagagactgaacaggaacttgaaagatgaggaagggggcagggaggatggagtgaaacagggaggcgttccagggagaggttgcagctttcctagaaggctgaagctgtgaaacacatggcacattggagaaacagcagcagttttgcaagatcctaagatcattcaggctggagcatggagattggatggagactgagaggtgaccaaggctggacagaggaggcagggtaagaagctgctgtgagtcacaagagaggtggtgcagaatcggtggagcaggagatgaagcaagtgggtcgtgaggcacaaggggaagggtaaagttgaagcagcgggtgagggcygggcgtcgcggcacccagcaccgagctggcaaaatgaaggaaraggcaagtttgaaagggaaggcagggagttctgtatgggacctggtgagtttggggtccccttggagatttccaggagagagtcgaatgcgtgactttattgctcagacaaggggtctatggggggacctagcccctgccttgttcggaacagcctggccagtcagtcttcttgtgcatagattgttgtcataaagtatgagactaccatgtgttacacaatagaccaccaggatggctgaacagtagaaaagaactttattggcaatatcagtttgcacaccgggaagagacagtctttggcgtgtatggaaggtgctctctcttcaaagagggaaagtgcaggctggttttatgcctcccaggttccatattacacaatagagtcagatatattcagaaagctttggggaaaaatctatacatatttatgaggggagttaagtgcaggtgccaggggtaaacatatgtccaacatacatcccatgttcactttggggcacagttgtagcattaaaattagatcctaaatttggctctttacatcaaaaggcaaatgataggacacaatgacatttagtgtgcagcacctgtaagctgctgaaactggcttggggtctgcatttgcttatcrrgaaagaatgcctggaagcctggttccctgtccaatcagagttgcaggggtctgggttgtaaatcagagttaggaagagtctcaaacttcgcctgattattcttgttattagggagactaacaagggtgtggcttttcctgtagctgtaggaatttaggaggttgtgatgccagccaagccctgaatcctcgacccctgggtaacttttgtttctttaaccttagaatccatcttagctgatgaaggggcaactgtcttggtctctcagatcacacgtgaatggagagtgaagatgagaccgactgaaatttagagtkcacagaggacagatcacacagcttagtcctgaggcaggctattccagcacatatttttgtctacagaaactctcatttctggttaaacacccagggaaatccccttccccctactatctgctccgaacaccaaaaggcaacccatgaaaatcttttatgttaatttctttcttgtgtattcattacacatcttcttggctcttaatatagatggatagatacgcatatttttacatccacacatatacatacataaacacacacatatatacttacatatacacaggtgtgtatatctgttaaatgtggtaatttacatacccagcagcattgtatgaaagtgtatgattcattttgtccttaccaacattaagtaatagcatttcaaaaatatttgataattgcatgggcaaaaacatattattgtttttattatatatttttcttttcttttcttttctttttttaagacagagtcttgctctgttgcctaggctggagtgcaatgacatgatcttgrctctctgcaacctctgcagggagcmaagcgattcccctgcctcagcctccagagtcgctgggattacaggtgccccccaccatgcctggctaattgctgtatttttgtagagagggggtttcaccatgttggccaggatggtctggaactcctgacctcaagtgatctcctcgccttggcttcccaaagtgctgggattacaggcatgagccaccatgcccagactattttattatatattttaaatattataattctttttacagcttaaattaggacttaaaatgttaatttttcctcaaataaaatgcattattaatttctaatgttattttattctcagctgtgtttgcctaactgcaaatgttcaaaagagcttaaataccacagaaccaaagctattttaattttttaaaagatctgatcatttccctttagtaatttgattactttaagattttaatttaatatgcagctttttcatatatattctttttactttacctctataatctctgtatttataacacatgccttaaaataccaattgcatatatttcttttcttttggtttttgaattatcatacagtaaaattgacttttgscttggtgtagttctgtgaatttaagtctagacttctgtgaccactagaacaatcaagccggagaacagttctgtctttccccaaaatttgctcatgctgctcctccctgctgcaactcctggcaaccactgatgtttttcttcatatagttttgtcttttcaggaatggtacatgcaattacatagtatcttattctgcatgtcttaaattgctcacctggctaaacatttttccacaattagttggaactatgatttttgtatcctgtatagcttgtgcctttgcaatttattttcttgggtcataaacagtgcctttcttacaaatttrtatacccatattatgtaagaatggcgtttacttacttctgttacactaaccatagctatttccctgggtaggtctttactgttaagtttggttattttctttaaatgtataagaccttaccaataggaataacacttgataaataatattgtaatactctggtgatccagtctgatgcagtatccctaaatctgggaaaggttgtaaaaaaaaaaaaaaaaaaaaaaaaaaaaaaaaaagatgctatcttaaagatgcatttttttctggcatgtaraagttggaaacagactaaatatgtagctacagactttagtaacgcagatcgtagagctactgtcaataggatgtcatgcaagaatgacaaggaagcctgagaaaatgtcagagaaacttgaaaaaaattttatagtaaaatgttaacttaaaaagccaaatataattccatacccacaggatgatcatagcatgtaagaaaaaaaaaacacaaaacttgctaatttaaaaagactagggaaaatagatcagaatagtaactgatttcttttattggtggaaatctggagagactttttactaactttgtgtgtcttctttatttttcatcatgatcacctaaaaagtgctctgaactacacagagaaaagcactctgtgtagttcgggtgtaaaacgctgccatctgcctgaaaaactcacacctgagcttgcggttctattgaatgatgtgtgaagattaccacacaaatacctattctgtcttctagatgtcaggtgtatgtcaggtcatgtctgacatacatttctaaaggtctgtgagcagacctttacagaatagtgcaagtgaatctggtgaaacggccgtttaatctgcattgcttattaagtaagaaatcattgtctaggaagaccttcagggggacagagggttttgccccaactctcttccttgctgtaatggaagccctggtcaccctggaggtttccatcttctcttcctggggcagcatttcccagacgcctgctgggctactgttgcctgattagaaacccaccctgggaatagcagggtgacaccagaaaaggtcagggtgctttaactctggctttgtgagttagtgatccctctagactcaaacagaattaaggaaatcttcagaaagtcccracagggcaaaaactcccgtaactgaagatgattcttagtgatttttcctgatttgtggagaaatgaagttttgtctaaaagacccaattggcccaggaaagaagggattctcaaagaaactctctccagagaactcacagctgttagccccgctcctgcctgggaattctaaactcacagggcaaagggcgcctcctaaagacaaatttgtaagtcatctacctgctaattcagcaacgtgacagatacggaacccagcaaatcatgatgtttacccaaccrtctcctttagataaaacttccaaactctgcaggaaattaggacttcattaatatctgtgaaattaatgccygtcaaaagctcctaatttgtctctcttgtggagtcaaagaacactggtatttagcatactggagatcccttttgtcttagmtagatgaggtattacaggcccaagatctccaggtatgttactgattctccttccaggtctttattatttcaaatagttttctttctttatacaaaggcagaaaagacaatcaatgctttgtttcttatctttggcttacttatgaaagcttagaaaaaattataagtataaatcatcaaaaagagagacggagcaaggaagtaacttttttgctgaatatcagatgatagtttcagattaatgggacctcggaaaagtaggtaaaaaagaagaggtatctagttcacataagtggccagaacactcaataatggaacaatagatgaagaattagactagattcctggatttgtagctaacactttgataactatcatctaaacctcttggaaagcataattactgatttttgggcttttatgaagtattttgttcatccttatatgagaaagccctattttatagtagtcaattagtttggagttttctacgtggtttgtgatgttcaaaggcttagagtgtgtgtgtgtgtaactgtgaagaaagcagacctttttgaaaatgtccagagtaaataaggatcagctgccgaatgccttgggccaatcccattacacacataaatagaccatgtaagaattttgcggtgtcatatttaactagtgtgactaaaatagactcgctctatataaactcattttctgattactgtgtgctgtttcctgggcacctacttgaataacagaagacataaaatattggaaaacttttgcctcactctccaaccattgggcctaactccattaggttgaatggaactaactcttgagttacttctcaaaagcaaggttgagtgcagacttccagaaagcctctcccctcagcaagtcagtgtgtggttttgggtgagtccagcagtgtcctctgcagaaggggaagtgaaaacatttgttcacatggatagtggacctatgtgaggttctggctrtccatgataaagcactggttaagtagacatggggcaccaaaaataatatcttttatagcccccaaacagcgtttgtcttttgtctttttccagggcgcaaccatgtcgccatttcttcggattggcttgtccaactttgactgcgggtcctgccagtcttgtcagggcgaggctgttaacccttactgtgctgtgctcgtcaaagagtatgtcgaatcaggtaagcttgaggggattttcaaagcgggggaggaggaggagaatcctgctatgaactgtgtatgaagcaaggtcttccaggacatttgacatcatctggtggaaccaaatcctgccatttaggacrctgatgcccagcaaagccaaggacttcctcatggacacacatttcgtgatggactctaaaccaggacccgatggcccaccggtgctctattgcactgtatcatttttcccacatatacaaagggaaagagaaagctgggttgaggaaattacataaggagttaatgggaaggaactctaatgagctgaagtagaacatagccctatgtggttaagcctggttactttaaataagtctaggtagattaagactgcataatcttccaaccaactctaaagactgcttactgctgctttggcraatcttcagtggatattacaaagcatctataattagccattagaatccaaatttcagaaaacgtacttttgcactcactaaggtcttggctgaatgaaagaatagtgatgtttcatcaagttcaaatacaggcagctcaaggtgagggggaaagtgggacagccacccaacgtcctgtttgtgggttcagaatgttccattccaacagtcttatgtgtagggaatgtctctgtggtcacgtcggccggcttccactctccaagatcttcacctctgcattggaagtttgccacggatttccaaaggaaaagtaggagggagtttagatcccacaactctcctgactgcacaccttttcttgtttccctacgtgcattttgattttagcagacactttgtagggaatgataatgatgatggatgcaggcttgcagtaactatggaagccatcacagttcacttacacaaaagtgtttacggagagaccactgcaagagtgctgggaccagagcrtagagggaaaaaaagtcaaacaagtaagctgaaggaactcaggaagactgccttccctttagagcatctattcttgcagaagaaagtggcaataaacaaaaatacaaacagcaggtaatgaaggaacaaaaagcagtgtaaagaagagagggactgggggcagggatgtgtgttattttatatagggttgtcctgcaaaggcctgtgagygagggacatttgcagatacaagaagaaactgactcagactttgagaacctcctgccagatgctcagagttcagattctggggttcccaaacctactattttgcatcccccaccaaaagcctttttgcttcacagctgactttgtccttccagccactctgaacacatcaaagccagagagactgtctgaatcatcttgatttcctttctgcccagagttctctcctgtttagttaaaagtgtgaatgccacttgctcccaacctaaaacctttcagatgtcacagacatctttgaagtgtaaaacgtctgagtttttcaaagccgcctttgacttaatgggtctcctggatccagttctctttaccatctcaggtctccctgacatttgcttcctgagggcttttttttttttttttttgcatttggccttgcctttgaacttggtctaatgagccatgtggatcgagagtccttgtcagaaaagaaggaaactggttttcctaaatattagcctgtggagttggagggagtttagagatttttgcttttgattttattttgggcttgttctgaaaagaaatcactctgaatattatcattcaatatttacttctacaggatttaaacacatttcagttcttggggtgtaaggctgcattttccacaatgagccaacagaacaaggacaaacaggctacggggctgcggggttgtgagtcgttaaaacggtaacactctacatagatagggccctctgtttaggtgattacaaacgtggcgaatgaaaatgtaaaaagtgccttgctttggggacttttgccccttctcagggtatttttggcccttttctccaggcacagagaatggttaccatcaaaaggaagtatcggaaagggaagcttcaggtctgtggaagtaaaatgttaccgtgatcattaatattgccgttggtttctaaaaagcccaatctccagtccaattttttttttaccaacccacaaaaaatgtcccctttctattccacgtttagtagtctcatggtttatgtctttcctagccaagtttatctaacatttgagtttcaagcttattcaactccttgtatacccccgaaataaatattaatttaacaaatgctaaatgtctgctctgtttagctttgtgtgttggacagaaggggccctcgaaagttagaagggctttatttcctggctttaagcagatttttccccttttgcttaatcgacatctctgaattgctaaatctgccacttaatgtgcttatgtcacaagaaacaaacactcaaatgcaggtttctgcttctgaaatgattaaagaataaataccagagaaaatccaatgtgcgtgaaagacaagaaaaaacttcttaattagtaaactctttgccaatcacagagcggctttagggaggtttcccctagactgaccttcctgtctacagatttgttactatttccagggctcctgcctacctgcctttactcacttgcaggctggcagtcggcttcagccttgctggctccatgggtaaagatcagcaccacctctctgacttgctcatcagcttttgctgagggtgcatggtacatgtaaaatgtatcttcacccaagaattagagaaggaaataatggctcattatgttttaaagatcattgtctcttactgtatttatgtcaaatggaaaaaaatgtaaatatttcttaaaggagcattcattatgcgctgaaattacgccactatgtctttcagatgaacacacagtagttttgtattgactatgtttaagctggggccagtgaggttaatcagtcataggatcaacactacagattaataaaggagaatctcaaaggcataaaagattttttaaaaagtttgttgctcaggtgtttaaacccagagtgaagcaactaactgttgaataggaaaataacattttgaaaccaacccaatagtcccatagacagttgtttttggctgattatagaaatggacccttctgatcttaaagcttggaatttacatttgttttatctgagtttcttcctcaagaaaggatccccacacctctcaaaaaaaatattaaagaactgaaactcaccagatcatggcatccagagactgaagcgccaggcccctggttcatcatgattgcttacttacccctcccragttcctgttttctcatacaaagttacatttcttccctgctatataaatccctagttttagttggtcatggagatggacttcagactgagctctcatctcctcggctgcagcacccaactaaagccttcttccttggcaattctcgtcatctcagtcattggctttctgtgcggtgagcagcagaacttagaatgcctggtgttttggtaacaatttccagtccaaggcattagcagattgttgtctgaattatcaacgctggacttataaggttcaatgcatcaccttgcatctggacccggggactgtctcattctgtcccatattgtctctgattgtttatgtgctacttttgtcttcccaacagaattctatatcccagagaacagagggagcaggtgctactgttgagytgractgaattattttccaggcctggctgaaggaataatgagaccttacgtttctgttcctagagaacgggcagatgtatatccagaaaaagcctaccatgtacccaccctgggacagcacttttgatgcccatatcaacaagggaagrgtcatgcagatcattgtgaaaggcaaaaacgtggacctcatctctgaaaccaccgtggagctctactcgctggctgagaggtgcaggaagaacaacgggaagacagaaatatgggtaacrttgcataaagtgtatgcacataagggataagcatgatggtagccgatgactggctcagaactcccatgtcaatctgagggtgtgattacactggcctcrggtcaccaggctccctaccacttcctactggtgatttgataatggcgatggttattctttatgggctgtagaacacattgacatcttcagatctctttgatgcctacatcaaagagatgtagaaagtctcttagactatgataaattatttaaaactgttaaagcaggcttggaatatctcaaattccccttaagtgggggatgagtttttgtctatcaatccagttgtcagtttcattcactttttcagttttgggaagaatatttgtatataaaacttaatcaagatttatgaaacaacaactctaatgctttttaacttagaaattacttgtttaacccagtagactcagaacacgttaagatatcaaaatcttaattttattaaacttcatcaatacacttttaaagtaagtaaaaagctatcagaatgcgagaggatagaacaaagatccatttaatgtttggtcttctctctctatactttgacaattcctacaatttttttcagctgtaatgaacttagcttactttgactaagaagtgcatcatacacaattcatcttagcacaccaagttgtcaaaaacctggattatggtagtaaatatttagaaatgttaaaaggaggagtaaaataatcaaagcgttaaaaaaattccaatgaaaatttctggggcacaaaataaaagaaaatatatcagtaagaaactgcttttacatgatctgaaatccagaaaatgttttcaaatgtttatatcatctgtgccaaaggagagaatcctgactttctgcttcttactttctataactcagatttttaaacatccacccaaaagattttaaactcagattttaagaaatccacccaaaagattttcaagaactcagattttaagaaatcctcccagaagattttcaagtcacaggtttcaaatgggaatgatacaagcctaaaaactaggtttttgtgtcagttttgtatttttgacctaaaaaaatggatgctttttaagaaagtataaaaatctttgctcgtatcactaaagtaatctttagagacaaatatatgccaagattttttttaaaaggtgctcaggcccatgcttagatatgtccaggtaatttagttgggcagtatctactcagcacttgtgtgttggcttgggaaaagggttcctggggccgggtgtggtggctcatgcctgtaatcccagcactttgggaggccaaggtgagcagttcacctgaggtcaggagttcaagaccagcctggccaacatggcgataccctgtctctactaaaaatacaaaaattagccaggcgtggtggcaggtgcctgtaatcccagctacttgggaggctgaggcaggagaatcacttgaacctgggaagcggaggttgcagtgagcctaattattttattaggtagaagcaggaatgggagaaactgaggaagaccagtttatttggtctacctaattttttttttaaagagtcgtcaattccccaattttaaaaatacgattctattcatgtttccttctcaattaatgaaaggataagtcggagggtgagtatctttttgttaagtagtcttcactgataggcaggttgctgttctatttgtatctcttcaagttgcatatgatttcttgcctaggattttgctgatttcatccttaacagacttttctttgcattctaggattatttagacataagcacatggtggcattcagatgctcatttaaccaactagcacattttttgcacttttaagctttggtgggtttttttgttttcttttttatttttttgccaaggttatttcttaatttacttttattttaagagccaacaggttgttgggacttatattttcccttgcttctattggaatctgcttttccaacactaatttctctaaagaaaatgattctctcaaatttgcctttcatgtttctcaacgccgtattgagagacaccttttgttttcccaaggttgtgactgttttcatggttgtctcccattcactccccaaaatgtgctggaatgtggctttctatgggtgctgtttttccagtagctaattggtttaatttcttccatcactactaagtactgaatactgccaaccttgtggtcacctggtgccaattttcattattccatttggaagcaggccccttaccatagctcttccatctccatttttgcctccatctttactccttattcacaagccagagaacaatggtrcatacatgccatgtcaaaagcacttttcttttcattaatctgttgaaactcatatgaaaatttatagttgttgcagcaatgcaagcttattttatcataaaattctcatggcagtaatgctgtgacataggcattgctattatgtctgtttttcagagatttcccaagacttagtgacttgcacaaggtcacataaccagaaaattatttagccacgattcagattcaatcctgagttccacaggacattacttgctatttcttagttactccggctcacgtggataacccatggacataatgaccaataatgaccttcaagtcattctttcttattctttttggtctgttaatggcatagtgggatggtttaatagattaacaacagygctcagcttgtcttgaacttggatttgtcctttcttctccttatgtcactttatgggagatcctacatcatcccttaaaatgacactttgttccgccctcttctacataataatacagtactgaagtatgtatttatatacatttataaattccttcccagatcagtgtaattagaattttctttagtggaccatccaagactttcctaaaaatacaatctctctttgtgaaagagaaaagccatccccattgaatgccctgattaacctagacatgcatcccaggtagaaaagaagacaggggcctggaggcggcctcaaagaggcaggatttatctttccctccaaaagaagagctttttccccaaggaagccagtcccagtgcctgtgattcttttgtcatgatgaagatctgggtctgccctgtgacagtccttcagatacgcagcattacagggcaagaaaaccaaatagaatctgttttaggattttatttcttccttatgtaagtttttctctccaaataaaattaatgaattgctgggatgttttaagaaaagaaaggcgattgtcacggttgctacagtcgtctgatgacaatgagtttgagtacagtggagagtaacaatgattgtattctgtggtggaaatctcctgccatcgtcagtagccagtgatgtcattgaactcagggcttgtttcacattctgactgatgtttctctccttctcccaaccagttagagctgaaacctcaaggccgaatgctaatgaatgcaagatactttctggaaatgagtggcaagtgacatttcttcttcctgtttgggggtgaggagggcatggccttctcctcaaatgcagcttattttacctttgcaattattgtagaagagaatcaggagaaaagagaggcacaaaattgttttaaaattctcagaggtgctcaggcatgactttaaaagacactatctgggccggaaaaacgtagaaatataaaacatttatagcacttgttttaagtgatgtgaatccatatgcccaaagctcttatactctgtctttagtttagtttgggaattcagtctaaatacaaaagactgttgatgtgtggttatgtgtgtacacattgtctatggttaaatgatgtgctctaagaagctaccatattatcagtagaatacaaaataagtaagaagtcaatcaatatattccataaaattagtaacaaaatgctaacacttgaagttagtcacctcaagtccttttaggaacaagaaaaggtgagaaaacacattgctaaagggttttgattccatgttacatgtggactttggccacagaagtgaaatttcccggtacgatgtgctgagacaggctgtcagggctgtgtatgtgaatcaaatccccctacttagaaaatcctaagtcacagcatggacatgtaaacttactgatggtaaattcacttcattttttcctaaattaattttactaccaagaagaagcaagtttaactttatacatttatggtgctttctgagtttcggcttaccatatataattcctccgtgtctaaattcaaacaaatacatcagagaaaacaatattatgaaataatcatagaaaacttgaacactcactagatatttgatgatattgaggcatggtgaattcatcttttaggtgtgataataatattgcggttatgtttctttaaaaggcacactgatcttttacatatatatgctgaaatattttagtaaaaggcgaaagatttattcgatctgaagaaaaaccagtgaatagctgaaatattttagataaaataatatgataccatagttttgcttcaaaataatccaatggtatggggtgtaggatggacagggtgtattgaaagagagtggccatcagttaataattgctgaaactgaatgattgatatatgaaaattgattatagtatttgctcaacttttaggtatatttgaaattttccataataaaatttttttaaaagaaagaaagaattactgagatgggaaaaatgtactctgaaattttatttatttttcctcttggaaggtgtagatatacagtacacatagtacaacttttgagttggctgaaatagagtgattgcaggatatccgaataaccagatttgcataaaatgtgaaagtgctgacctaaataatagtatcaatgatgtttaattccttgaataagagaaatacattcctcccattagtttaaatcatgacccaatgtaaattgaaaaagggtcytgtctgggcatggtggctcatgcctgtaattccagtactttgggaggccgaggtgggcagatcacttgagctcaggagttccagaccaggctaggcaacatggcaaaacccattctctaccaaaaatacaaaaattagccagagttggtggtgcgtgcctgtagtcccagctacttgtgaggctgaggtgggaggatcgcttaagcccaggttattgaggttgcagtgagcagtgatttcaccagtgcactgcagtgtggatgatacagtgaaagaaagaaaggaaagaaaggaaaggaaaggaaggaagggagggaaggaaggaaggaagggagagagagagagggtgagagagaggaaggaaggaaggaaggggaagggaaggagaaagaaagaaagaagaaaagaaagaaaaagaaagaaagaaaaggaaggaaggaaggaggagggagggagggaaggaaggaaggaaggagaaaaagggtccttcaaaagaaagaaagaaggaaggaagaaaggaaggaaggaaagaaagaaagaaaggagaaaaagtgtccttcatcagaatgcaagtatttttggtaaatgattttaagatccctgctttgaaaaacaattccatggatggtccttctattcctgtggaacttaaatattttattagaatgagagagcaaattcaatcgggcaaaaacaatgatattccgtaaacaataatgacataagcctaggaaatgttttaagaataaagctttggccgggcrcggtggctcacgcctgtaatcccagcactttgggaggccgaggcaggtggatccgaggtcaggagaccgagaccatcctggctaacatggtggaaccccgtctctactaaaaatacaaaaaattagccgggtatggcagtgtgtgcctgtagtcccagctactcgggaggctgaggcaggagaatggcatgaacccgggaggcggagcttgcagtgagccaagattgcaccactgcactccagcctgggagacagagtgagacaccatctcaaaaaaaaaaaaagaataaatctttgtaatatttaaaactttttatatctagatccaaattgacactccatctctaaatttttatrtgtcaaaaaaatctaattttaaaaaccaaagttatggaataacctaactagaaaattccttgttgatgacaaggaggagagcattcttttaagaaagctcattattagtataagaaatcgtcttctgaaggattcagaaaagcaaaacgtgttcttctcctcagggaacatatacccagaggtggtacagattagacaattagataaaattataacctaaaccacacaaatactgattaaccaagagatcagtgtgtgttgctttcatttcagtaagttccacagtgtgggcattaaaggttagcaagagttgagttttctaaagaagagggatggccttacaaggaggaaaaagtgaaggcttgagcaagaatatgccttgtgtgagggctgtggggagaacagcctaggtagaccagcaggctcctgctgaaaccagaatgaagagtcagagacagatgttggagggcaagaggagtgcatagtcttgggtcatgctttgaactaatgggaagaatatactttctcttactcaaggaattacacagtattggtctacaaaatttcacttatgttatggagaggtgataaaaatctgttctaagggtgtagctacaggaataaaataaaaggaacartctaaaagaaaatactgttgcagagagatttcatggtagagtagatgaaatatctacagaatgcctgttaagtgtacatagttgaaatgctttataattctttaaaaattaggctgggagcaatggctaatgcctataatcccagcactttgggggccaaggcaggaggatcacttgaatccaggagtttgagaccagcctgggcaatgtagagtgaccccatctctacaagaaaatttaaaaattacctgggtatggtggcacatgcctgtagtcccacctacttgagaggctgaggcaggaggatcacttgagcccatgacttcaaagataaagtgagccaagatagtgccactgcactctagcctgggcaacagaacaagaccctgtctccaaataataataataataattaatccttaaaaatgtaagttgaatgaagggaaaaaatgttgagaatatctcttaaaatagctagactgggaaaatggtagtcacagaagtgggagatatggaaagaggaggaaaatgattgggggataaggaattcaaatttggataacacttgagataataccatgtctcccatgtttctcttccatggaagcctcacctcctctacctcaccaggaagtaaatggctcagctctccataacagactactttgttctttctctttgaaatccccttctgttgggtttttgagcaggaatcattttttctcttcttcctctgttctcctattattactcttgtaacttcagaattccccaatgtcatctcatgcccccctgccaactttctatttcacaccttcctgtgcttctctatccattcagtaaccaaccttcaacccacatatcatcactcagaattctccacctccagggactcacactcagaacttgctttttcagagctcatcttcctcccctggcaattctgcccttattctcagacaataagtactagcctttagtccagtttctcttttaccctatttattagcccactttctggcattaactctacctagcctggytcccatgataagcctttgtcagcactctgctctcattagttcccctttgccatggatagtctgatctccaaaccttgcattctcccctctcattctccccggctttgctagaaaaagtcatacagctaagtgtgttacaaacagatggtattagatgacattcctatggttcagactctatgtttggcttcttagcagacctctctgaccagatttcctgtacttacacattttaaggggtcaaattaaactaagtatccaaaattacatttgccacattcacgagtaacctatttcttttgtaacttactatcgtacttaattatataataactcactccacaaaacctggaagtaatttttatagcctccttttctttcaacttccacatgaatgcatcagtcaatcatttgtgttcgtgttgtctagtcaatattttttccatttcatcatctaattacatcattactacctcctgccatatcccatccattctcctatggtggtcctagaagtaacgatgccaagctcaaatctgaccatatcaagcctctgcccctactgcagtgttccagcatctgcaaattgtctgcaggaaagtgttcaaactgatctgacacctacacatcttctggaagtgactgctgatcgtttctgcttcaccctctgcactctggcaatgcccagctagtgctggacccccacccacaccctgaggaaccttagctctgtagctttgcttgttcccttccacccagagagagcacctttggcttttccccaccataccttctcccacacattagtaggagttacctgtccagaattcagcacagaaacatttctgccaggacgtttcttttccaacttccctctttctctccttcacctacctccacctgccttagctggtatagtttcctcatttccgtggtcccacagcatcctgtgaatacctctgttctgacacatcgattttctttccctctggactcttaactccttgcagaacagccactgtcaaaacacgtctcattaattcctttaactgtggtgccaagtttctggtgaggcatgcaggaagtacacaatgaatgcctgctgaactgttcagctggactcaccttggcacttagaaatctccttcatttctttttgattcccacacaatggctattcctaccattcccatcctccttggtttctggggatgcctcaatctcctctgattctgggaggttgaccttgcctccaatataagtggtagagaccccatcttctttttatttaatttttttatgtattttttttttcttgagacagagtttcgctcatgtcgcccaggctggagtgcaatggtgctatgttggctcgccgcaacctccgcctcccgagttcaagcgattctcctgcctcagcctcctgagtatctgggattacaagcatgttccaccatgcccagctaattttgtattttttttagtagagacggggtttcaccatattggtcaggctggtctcaaactcccgacttcaggtgatctgcctgcctcggcctcccaaagtgctgggattacagttgtaagctaccacgcccagccgagaccctgtcttctgtttgtctctacactttaggatgcagttgcttcctcccgccttctcctcctgctcctctgcctcagagacagctgctccctttcttggttgcacacctctcatcccagcagtcctgctctatcaataaactttacctctgacatcctcaactcttccttctctctgcagtttcttccttattcccaagacatactgcattatgcatcttccccaatcttgaacaycatctcttcttttttttcacctttttacctccttgagtttttttttctttccctaacacattcctttaaaaagtagtttatatttatcagtttctttttcttcccttctacttctattcttagaccctaagactctgggtctccaagattatgagttctcacaagtggttcctgcttcttagccttcaatttccttgayatctctctatcatacaatgctgaaaacttcatttcttttcagcttgcctgatgtgatattgtccaggttttcctcttaatttttcagctgcctcttcttggtctcttttgccatttcttttcctacctcctaaaaaatatgggtacacatatctcggagcctattccacaccatcatatattgcctcttaaggttggctgttctgtgcctgtgccacgtctccctgacttgactgttagccatgcaagggtgaggaataatgtgtttcttcagcacactcagcaaggcagtttactcacagctgctcaggaaacttgtaatttgattgactacaaacaagtgataggttagaccacataaatagattagaatccattagtataaaagaaaaaaaaytgcaaaaaccaatgagctcattcaaaccagtaaatagagaaataaatatagtcaatacaaaaaaaattaaagaattctatgtttttacatttattcttttgtaatgattgaaatagagaataatgaaaatcacagaaaataacagggtattaattcatttctagaaattcctgatattttaaaaaaattatagtactatagtctaatgtagaaattgtgtatataactatatatttatagtttataaaaatataaactatatgtagacatatatgtatataaacatatatgtatagatatatgtayaaaatatgtttaatatacatataaacatatatgatttttacagtaaaaacctgtatagggtccccataataattcactttcattccctgcatttaaaagtgtatttatacttatttttattttattttatttcatctggaccaaaatagaaacaagtcacatgttataaacaaatgacctactatactagtcacaagttgtaaatagatttggacatttagaccagaacttgtggaagaaggtgattaactcagtgatccttaatttaacccctcatttaccaagccaaatctattatttccagcctagttccaggtaaaaagaccaaaattacctactcttaaagtattaggcaaagtattatgtcccatctgtggaactgttagagggttactggaaatgctttttgtctggaagttggggttgccataaaacaartctgcggacactacagaaaagacttcagtcctacaatgtgtcctgggatgtggctggattcctgggggaggtttctacccacacagctcctcctttgtctacctagagtgtttctaatctagccactgttagggattggacaataaggtatcttggaagataatttgccccaaacgcattgtcaggctactgccactgcttagccacaatagaagaaatttagtttgaatattattaactcattgtgaaatatgatgaacctgctttttaaatgaaacctcaatgttttgtatttgtaacaaaatagaagaagtaatccaagagtcttcaagctattacaaaattataactctgggatttaaattcattatccttatttatttattcacatatttatttgtgtatcatttttgttacagcagtggatatttttatttctttactgttccttgtgttattctctctcacctgctgtgtccactgtgctgtttaaccatgactgccttacaatttggtgtttcatgaggacctgggcttcagcaagggcatcctgagcattctcataatttgactatcttagtttttcaaccctttggaaagatgtcattcaggtatagggcactgtaaacagtgactatccaaagcactttcaccaatatttatgagcccagagtaaaatgaatagattgaatctgatggtttgatgctgatgactaggtaatgcacaggattacctagacaccaaaaaaatgcagtgagctattaattttctggcctttttcacattggtaaatatggttggcagctggtgtgtctgatcactgtggacatcaggaaccaggacacaatgtcccaaagttcctttctcctcacacaaaatcctggtcagctccccctagtctactccagcatgtctccaacaacctgctataaagcatcctggcacctctgaaatgctgttcccaagaggctgtcagtaaccatgtgattctctagaattacagacaggaaagcctttgccacttcctgccttttctgactgagtcatcattgatggtgacaaagagaggttgatagatcccttcaaagttctaatctctggttttgaaacttgaagaggatatatcgctcagcccagtcaaagaggagcgaaggattgagccagcaatccaacattgttttcaccctctaacaatatgycctatgatgaatctgtgttgtagaatttgaggaaagatgcttagtgtggtacccaccataatgagtacctggaatgttacagcaggtactcagagctggtcctcctccatcccttgcccatctccctcccctcctgacccagcttagaataggagtcgtccttttgcagaacttcactttcttcccctctctcttcctgtagacacaaaggacatgaatgaatttgagacggaaggcttctttgctttgcatcagcgccggggtgccatcaagcaggcaaaggtccaccacgtcaagtgccacgagttcactgccaccttcttcccacagcccacattttgctctgtctgccacgagtttgtctggtacagtaacttggcatctccctccaagcttcgggttatgcattttgttgcgtcttcttaatcctctacgctggcatgctccactgtggggggtgtgctggagtaaatgctacctcagcgttgtcagggaccttgcctgaactgagaaggttcaaatggtgtgatccaataaaagaggtgcatgaggaagccaggtctagtcaggaaaaatgcccatgggattttagtttctgcctcaatgggggggctattgggggtaagtgggaagraacagaagtgaaaggtatctttattacaaacagttttccagttttatagtcaaaacttcccccacctaatggcccaaccctgctggtgctactttttccagcaggcagcactctgccattgtagctaatggtttaaatgcttatgaggctcttgggtatcttaatagccatcaaacagatcagtttaaacctcagtaaccacatagcaaaggctatgacagagtggagacttgaaataactcctgtttctggctctcagcatcctagcctattaagggatactcttccctttaggctactgcagaaactgttaaagcacagctcctgtgtaaccagggtatccacatgccagatcgacttggcgggttttcatcagcctgctttcgtctaatcacttgaacctcctttctctctaatcatggatgtcactcaggaatcggtcctgcatgtgagactttgttggttgcaaatattctcagatgctcagaaagaggaaataaaatgttacagatgtctttgttcgtctgtagtgagctcagcgaggccatgaatttttaaatctagcacagggaaacgtrctacgaagagtctgtgatgcatgcattttcattcatgcattttaatctctatatgtttggaaaatacaaggatgataaatcagccagttctcatttatttaattatcaaactttttaaaamgcagcttcaaatgaaaaacactctgttaatactcttggcaaatgatacaacagggctgctgatcagaaactgctctgtgatcttagggggttatgagatctcatccatctcttaaatgctgttggtgctgatgttgatgccaacattgaaataaatcagcgtgtgctttattacaggggcctgaacaaacagggctaccagtgccgacgtaagtaagagggktttggttgcattaccatcattctttttatttagttattccttaggctatgaaaatcttaagctgtgatttttttcttcttttcagaatgcaatgcagcaattcacaagaagtgtattgataaagttatagcaaagtgcacaggatcagctatcaatagccgagaaaccatggtgagtatttacactcctctttgacgtgcagtgatttttatcagaacgttaaatgttacagcccacgaattcttcagaataatgccagaacttgcatcctcccatttatcagtgaacatccatctccccaaaactctttcctcttcaataatgattcttactgaattacccaaaccagaggatgaattagaaattagccaggcctggtggcataagcctgtaatcccagctactcaggaggttgaggcaggagaatctcttgaattcgggaggcggaggttgcagtgaaccaggaccatgccaccgcactccagtctgggcaacagagtgagactccatctcaaaaagaaaagaaaaaaaaaaaagaaatctgcacttgtacctcctaaatatacacaaattatatacaggaagaattttcattgctctacttttccagaaaaatggcatagaaagtggccagaaagcatagtttagattaattatatgagaataatccttgtggcacccccagctagaagtgacagtaaaagagtaaataaaggcaaatgatgataagatacagcaacatggcatttacaaggttagagataataacagaggcataattttatgttgagaagcaaatatttcttttagagtaaacgttgaggtataatcggaagacaaattacattttacctaatggaggggkgaaactgggctagcacatgggcagtgtatcattatgaattttaaatttttaaaaatttatatgtatttaggaggtacaagtgcagatttcttttttcaatttttttttttttttttttttttttgagatggaatcttactctgtttacccaggctggagtgcagtggtgtcatcttggttcactgcaacttccaccttccaggatcaagagattctcctgyctcagcctcctgagtagctgggattacgggcatatgccaccacgcctggctaattttcgtatttttagtagagatgcggtttcaccatgttggccaggctggtctcaaactcctgacctcaggtgattcacctgtcttggccttccaaagtgctgggattataggcatgagccaccacacctggcctacaagtacagatttcttctatgcctatattacctggtggggaagtctgggcttctagtgaacccaccatccgaagagtgaatattacacccaataggtaattttcaatcctccctccctcccatcctgccatctgtagtctccaatgtctattactccactctgtcactcattatgaaatcttttgacttccttctcccaccgtttcctttttcattccacaaatcctcactgggtatctgattcatggaagataccgcattcttccaatgacagcataacacaaaacagacgtggtcctgcgaagttggagaaacagataataaacagctatgtatggcttcgatttatattaagtgctacaaagatagtgaacaaggtgcaaggtggagagtaagcatgtggcctactgagactctgtggtccgggartctccccaacggagggaacattgaaactgacagctgaagagtgacagagctggttaggtgaagagcaggaggaaggaagctccttacaggctggaagaccctgctgagggagagtccaaygtgttccaggaactgaaatgggaccagtgtggtgacagctgcaagggctgcgcagactggaagcccacactggggaakgcaccaaggcctgggtcatgcggggtttctttggagcctggaaaaatgattgtattttgtgcaacttgtagtagaaagcccactttgggatgctgtagtagaaatagtgcgttgagatgtgaaagtgaaaccagaggagatggaaggaatcctccaagcggggaggttggtggtttataccagtgagacgtcagcagaggtggagcaaaggggcaggttctcaggtgattttgatgttagaaatgactggatttgccaaaagattagatgaaagaggtggatataaggatgatgccgcaggttctggcttctgcccgaggccgagcagtgtggtagataacagagccacgacggagtgaagaagactggaaggagagatgaatttttccagtttggacatgttgagtcggagaggtggacatccaagttgaagcatcaaatagacaatttcacatgagcttggaattcctctgggacaagggcccaaccctataaatttgacagtgaccatcatataggtagattttaaagttgctgaagagattgcctagtgaggaaatagagaaagttcaggactgactacaaaggaatctaaaatgagatgttaggtagaagataaaggacagagatagacattgagaaactgggctcagagaccgctcctcctacacccagagtctatgaagttacagaaaccagaagaagaagaggtgggttgtgttctgtgcagttgaggtgttgaaattgaggcccacgtgcagatcttcacaggcttaaatcagagaaatgtcaggggcatcttggaggcattagtctgattgacctgcatgaagggtgactgaggtgatgacatgaaaacaacctgtaagttgatattatgaagaaggtgaaccatgaaggagatgatggacagagaacagtggctgggaaatgagaccccaaggatggcaagtgctcccrtggccagggagagatggataaagctggagagacagataaacaaaacagtcaagtctgttggcaggaagcgaagagggcctgagctctggtggagactggtccctggagcttccacagtttaaccggaagggagtagggcaagacagttgctgatggggatrggtgtggagctttggtgatgggcacacaaaggcgcttcccttagactgcatgtgtcccccatggagtttgatggctggaggaaggaaaagagaaagcaacaagtgccttcgaggaaaaaggaagatctatgagataattatcttagagaaagcaaggtgactcgtgaaaagcagtcagactgtggagcagagctgaaagtccatttgaatttgacggagtcagcctgctcaggagtatgattttctccaacaaaggggcaggttcagagaaggcgaagtggctgggtttttccagagtagaatttctcctaacatttagaascagaaggagataaacttgtgctaaccggtgattctgctaagactcaaagaggttaaagtagtttgttcatgtttgatcacctgtacgtggcagagctggtactaaaattaagatcacaatctctcagaccatgtttttgcttgcttagatcaaattttcacctcccagacttcttcctttacttgatgccttcagcttttctagaaaaaaacgcaaatctctgaatcactgttaacctcaatgactaacaaagttcctggtacaaagtcttgagaaactgtcagctacataaataaatgtctgtgatattatcttctcccaggatattttgatttcttgttcactcaaggggacatcatctttgggattcttttgttcctctacccctggagyagtattgtccgatagaaataaatagaatgagggctacatgtgtaattttacatttccaagtagcccacattaaataaaggaaaaagcaatgggtgaaattaattttaataatacattttatttaatccaatctgttcaaatatcatttcaacaaaaaatcgacatttgaaaaattcagatatcttaagtaattttatacaaaagtcttcaaactccaggatgtattattttacacgtccagcacatctcaactctaactcaccacctttcaagtgttcgccagccccatgtagctcattggttttcatactggaaagcgtgtacatagcgtcttcatcagccatggtgtcttgagctgtttgcccctgcattcaagattcgaagtggtccccttccagcctggaccttgacctattaattgtccatatttaaactgtggaatataagtgagtcccgaaaattatttttttcttggttgaaaatggctgtagtaagtgctgagcaatttttaatcgattctacacaggctttctaaagaaccaacgctgaccagtacccctggcgggaacgttagatctattgctgtgctgatgaataaggcatctttgctatgcaccttcccaaaggaactgttgaattagaaacttctgcagagattataaacctttagaaaataaagcattttatcctgcacaagaatattsacattcttaccaggaatccaactatccaagtgytttgttgttcctgcaataagtttgatttaaactctggaaaactgttttttaaaaaaattccatgtcgatcactarcatccctctcccactcccctctccctaycccgataagccttcacatttattttgagacagaaaagagaatggctgggctctgattctgactgccaagcttatagatatcccagctctagagctgcgtgtcctgggcaagtttcttaccttctctgtgcttcatttcctcgtctgtcaaaggaggatactaatagaagcgacttcaaaaggggtattctgaggattacgtgagataycacctatgtaatagatgatgcgtgtgacatatttgttaaccgcacctggcaggaactgctccctcctcttgccacctcagttcatgaataataggtgtgaaaatgcttctcacattaggcagtaatactgataaacccatagaaatgtttcctttaaagaaggcattttttttttttttttttacatcttccaaaggttaaaagcactagttctggactgaaagagaaaaggaaatatttatagtaaaacaggaagggaatcttcatctatttaaatgggagcactgtttccttagcactttttaaaataaccctcatgcagtcttcctgagcttttagcctgtctgtgtgaatgcctcagatttcagctgtctgcaaggttcttgctacatgcagaaggcaagcatgccccgtcacgtacagttgctgaggctgcctgccttcttcaggcatgactgtagggcttgacaagtgacaatgatgrtttaaaatgcacacaatgccagygttttcattatgatctctgttagttatgctaaggtatctgcaagaacatccaaagtcggggccccaggaatacacagatttcaccttctgcctttctttcagttccacaaggagagattcaaaattgacatgccacacagatttaaagtctacaattacaagagcccgaccttctgtgaacactgtgggaccctgctgtggggactggcacggcaaggactcaagtgtgatggtgagtccagtgggggatgwgcatggcccgacgtggaccccctaggggatggagcaaggctttctggggaactggagggaggatgtagggggtaccacttccacayccagcccagacaagtcatgatcataagtatggtcttctggggcaataagccactatgttcctttccttgcaccctgcaacacccccacccacacatcccagaaaagagcacaacagttcaggttsaaggtcaaactcctagctccatcaccttctgccgtaccatagccctgggggaaatgaagacagtgtttctcctctcactggtctttctactactagtttcctcagtgggctctgggctgccccttcctaatcccaacaggtctagctgtgtggtaccctaacccttctcctttgcaccagccagtaagattctttctgtcatctcatcaaggagcaagcccagcacattcatttggctgacacatggtcctgcacagaaattctgtaacattagcttgagcatccatccctaaaccattgctgtgaactccaagtgcccagtaagaggctggcccrgttgtgaccgtcattgcctgttttctggtctttcctccaaggccaggatcgcagcagagcctaacctgccattcattattgatggagtttctcagacctaccatcaaaaaaggaaacaaggcaaggctttcttgctgtacaactccaagttgctaaggcgataacgtttagaagctgagatgctgttacactaggattaaggactagggaagaaaaaaaaaaaccctcaagaactgacaaggcactctgctttctggttggggagagacgtgggcagagcccagagaatagagccacaaaaggagaaccacctgttgcatacagacagcttctgatttttttcttcttcttttactttttttctgagacagggtctcactttgttgcccagactggagactggtgtgcagtggctcgatcacagctcactgcagacttgacttcttggactcaagcaatcctcccacctcagcctctcaagtagctgggaccatgggcatgtgctaccatgcctgtttttgttttttttgtttttctttgtttttttttttttttagagrtatggtcttgctatgttgcccaggctggtctcaaactcctgggttcaagcgatcttgtctcctcagcctccaaaagtgctaggattacaggagtgagtcaccatgcctggtgagcacagaccttttcttatgatgaagtattaaatatataagccactttattttttcttggcagccctattttgatcagtgctactgactaatgtatgtcctctcttttgagcaatgaggtacgtgatggaaggcggcacagcatcttccgcattctccccttcttcatcccaatcctgttcacatgtctggtggaacccagagcgacctctcagtggaggcaggaggrgttaggttttcaaatcattacctaaagcagacatcacaggaggccaacattagcctcaagaatccgttcctggccccaaaggacactgacacgcttttctctacacccctgttcaagaagacatggataggcagggtattaagagttcattaggaggtcagagacaaaacgtagtgtcccggcatcctgcatcctgacggtatccacagaaacaggagaaattctcgcctcttggttctcctgtgatggtctcaggtcgggttctctgtcctgggagcccgagaatccacttgcaagaagagctggtcccagcagcgccgcggcacagcttagaacttcccaggggttcctgggcgttatttcatggctcttctgcctgcttcgtttcatttctttcctygaatactctttcctttccgctccattcygttccccgctctctcctaccacctacatttcaagtgctcccctcccctttttcttttgtcccctctcctctccctcccctgccctggtttgttttccattcttgcttctgacactcccgggtccctgcccctccactgtgctcaccccgcctgctccgctcaccccgcatgcccccgcgtcctcctttctcgactcttctcgccctcttctccagctctcttccctccctctctgcctccctttcatcctgcctccttgcaggccgtcgtcttaagtagggcctccttagccttttaccctgccttctctttctccccacaataattcccaagaaaatagtcatccaaagggactctttgccctccaagaaactgagttacggcctgataggttagtaacaaagacttaggaccttctcgtggagatggtggtggcctttcttcgcggccatgcaagtcacagagaagcctagatgtggctacagttttaaggagcaaagtaaaactccatccctctatgttcaatcctagctgacaacctcacttggtgtcacggtgatgcataagaaaatggagctggggctaccgaagttgaaacctracaccttctaaatagggcgaatgtgagttatgcgagttttgccgacaatgtggaatttggagcacaatcatgaaaaaaaaaaatcctttctatagtaaagattttaggccgggcacggtaacagacctgtaatcccagcactttgggagggcaatgcggaaggatggcttgagcccaggagtttgagaccagcctgggcaacaaagtgagacccccatctctacgaaaaataaaaaaattagtcgggtgtagtggtgtgcacgcctgtggtctcagctacacaagaggctgaggcaagaggatggcttgaacccaggggtttgaggctgcagtgagctatgattgcaccactgcactccagcctgggcaacagagcaagaccctgtctcaagaacaacaacacaacaacaaagattttaaatatgcagaaaagattttgcttcaggtgaatttttctggctatatctatgcctatatactcggtctagtaatggttaatagttgaccgggcgcggtggctcacacctgtaatctcagcactttaggagaccgaggtgggcagatcacttgaggtcagaagttggagaccagcctggccaacatggcgaaaccctgtctctactaaaaacaaaaattagctgggygtggtgatgggcgcctgtaatcccagctactcaggaggctgaggcaggagaatctcttgaatccgggaggccgaggttgcagtgagccaaaatcgtgccactgcactccagcctgggtgacacagcgagactccatgtcaaaaaaaaaaaaaaaagtaatagttatttacatagaaaattctgctttattttattattgagctatttgaagaagagtggaccagtgaaaactacaggtgagggttgcccaaatttcacctaaatattttaatatctacatctatgcaataaatgatgaagatgaaaaggaagttgtatttgttgagcgcctgctcgatgccagtcattgtgctaagcttctttgcacacacatgtgcaaatcagcagataagattaagactgcatgatgtcatagcacctggtgcctgcttctattacaacactctctactcrcagactctgtcagctggagtttggaaatctttatatctgatttttctgtaytttaatggtgatgtttctttttttttttttttttgagacacagtctcgctctgtctcccaggctggagtacagtggcacratctcagctcactgcaacctccgcctcccaagttgaagtgattcttctgcctcagcctcctgagtagctgggattacagatgtgcaccaccacacctggctaatttttattgttattatttttagtagagatgaggtttcaccatgttggccaggctgctctcaaactcctgacctcaggtgatctgcccgcctcggcctcccaaagtgctgggattacaggtgtgagccaccacgcctggcctttaatggtgatgtttcattagcaaaatttgaatttctaaaactaataattgtctttacacagtcacatgggcacacgctctccagtccaagagggatctcttggtcactggcaatggaagttagattctatgctactgttttcaagattcatgaatcagaatactcaccctgaattgtaggatccccaagctagaatcctgtatagatcatgagtccagtgctggagatccttaatcgggagcccccagagcgttcatgacttgcccaaggtcacacagtgtccacgctgtgcaagctgccaccagcaccccgttctccacccacctgacaggtgctcgagtatttccctctcctctttctttttctttaacatcttatgtgacttataaagatgacagaaaactttggttctttttcttcgagttacctttcataacaggttgtagatgtcaatttacgccatcagttcatgcgtgcaagaaatatcactttctttatgactgtgagatccacttagttaacattctcatctagtaatccttggggccctctacccttcccataatcacacgaggttttcaggaggcatgggtacaggggcctggaaactggggaatgtgctcaaacacccggttgctgttggcctcctcatctaagcccacactggtgaagcctgtggctttatgtttccacaccgtgtgtagagtttgtgatttttttttcaaagctgaggtcctcatgcctggtccagtcttgctaggtgtgttctgccgtgacctctcctggcattgctagcctcctcctactccatcccttcccacatatacactccggctccaccgtctgatatccatctgcaggctgaggctgcctcctgggcttcaacctaaaggctgggggaagctcttcatggcccaggtgggaaaggggatgttttggacccagactggagtgggcaggaatattcttctgatgcagggcaggtgagccccaaagtggggcttagcccaggagagttcttggcttcgcccaggaagaattcaagggtcggctgttggtagaagaaaacagcttcattggccaacggtattacagttctgttggtgttacagctccatgactgctcctgcagagcagggctaccccagaggcagagagtagcagctcagggcagtgctgcaatcctatttataccacttttaactacatgcaaattaagttcctggaaaaagggtggtaacgtctgggtgttgccatggcaacactaaactgacatggcacgcaggtgggcatcttctggaaagctgcttctgccctgtccctgttttagctagtcttcaatttggtctggcgtctgaaccccacctccagagttgagtcccacctcctacctcacttcccttccagcacgaggatcactaccagggagagccagggtcaacttcctcccagccrtggcactttaggctttcctccctatcygcaaggctstgtcttacctccagagagagttgtttagcaccagggggttcttccactcttgctcactatctgccttcttccttccagcatgtggcatgaatgtgcatcatagatgccagacaaaggtggccaacctttgtggcataaaccagaagctaatggctgaagcgctggccatgatwgagagcactcaacaggtaggagcatgtgccgtggacacgttcccgccatggccgctcagcaaggatgtccatgcacttctgctgcttcacctgtggcagccctatgggaaatgccsggatgtatttctgagcaccggccttgcccttggctttcatatccatgcccacaccccctatctttgagatatttatttaatgcatttgtattatgcagatctttataaaatcttaaattcttcatggcatgagcattgcagaaacaaataaattcattaaagttattgaagattcattgacagctttatgtgaatatattcgggttatagaatagcctgggggaaaacacttatgtgctagcatcatcctcatggaacaccgagtccagggcaaatttggcctgctgtttactgttttggcattagctgaattcctagatccaaggataaaccctctttaagacttggcattgcctgtatcagctgttttcccatccattaactacctgtccttatttgtgatggaatgatgtagacagcatgagagaatcctgtcagccccagaaaagtgtgaaggaggcaaacgtgttcggctaatgcataaaatacagtagatagactctcccagaatatggggttccaaaagaacgttgaggataaggagatctttgktgaccctatgcatttaaacattttaaatggcctttgtccccatcgttagcaggctgagctgttccatcaatggtgggtgggtgggtggtctgactctctgtttgtcatccaggctcgctgcttaagagatactgaacagatcttcagagaaggtccggttgaaattggtctcccatgctccatcaaaaatgaagcaaggcygccatgtttaccgacaccgggaaaaagaggtagctgtcctgatcagcagtctaatcactgtcagtcattaatctcaattaaccctaacctaatgcccttggatttaagttatcagcttacctggtctgataggtgatccacctccagctaccaactaagaggctcccacttcttagaaaagaaactaaaaccttttacctttgtaaaaggcaggaggtgggggttagaaaatgggataggtctggagggaacaaccacaaatgttttcttagagtttcagcatgttacattctgtcagtgtcaaatggtttcacagaaataaatctgtcttaaaatttgatggtgggaaggccacagaagacattcttactctgcacctttgagacttaaatttaagggtaggaaagagaaggactcaaagccactttcatgacattatggcagtttttccagcctactgtttgaaagcagttcatgagtggatatgacccatgtttctgagacctgagtcgtttcagcatacattctaaaatacttagtgtccttggaagagtatgaaagataaacctagggatttaaaaatatagagactattgtaggcagggggaaattcctaaaaatttctcttatgttttctctgacttcmaatcaacttaaaaatgtaaatgaaaggtttgggttacatttaggaggggttgccaggcagtcaaggagactatgtcttagcaatgatcaacataggcagcatcttttttttttcttttttgaagacagagtcttgctctgtggcccaggctacaatgcagtggcacaatctcagctcactgtaacctctgccctgtgggttcaagggattctcctgcctcagcttcccgagtacctgggactacttgcgcacacaaccgcacccagckaattctttgtattttagtagagatggggcttcaccatgtcgcccaggctggcctcaaatgcctgagctcaggcaatccgcccacctcggcctcccgaagttgtcagattacatgtgtgagccaccatacccggccaacgtaggcagcatcttgacttgaattctgggatgaatgatgcagttcagatctttaaaaatctgctagatttcatttcctgtctctctcacgctgtaaattgtagaaattgatgccactgtgtttgtgagccatgcaaasaattgaaaatcatttttttcctaaaatttggttaaaatccctagatgtccttgatgtggcattattaacagtgcttgtgtattttgcatatatggtcttttactgattggaatttgtttcttaagttgaactatttcccagtctattgaagaaagagacatagtccacactccaaaatccaaatgccaggctcacagacagggggtgctgccctcacagacagatggaaaggtattaaagctgcctgaactgtaggaaaccctctaaacacccccaattactatgatggagcctcagcatgggaagtagaagagaaagcatgtgctctcagtaactagaatgacctccattactccatgttcatttttaaccaccagcttgcattttcagagcctcagggcatttcctgggagtctccgttggatgaggtggataaaatgtgccatcttccagaacctgaactgaacaaagaaagaccatctctgcagattaaactaaaaattgaggattttatcttgcacaaaatgttggggaaaggaagttttggcaaggtaagctaatgcacgggagaatgctatggcccaactccaggaactgatgagccaagttcctggtcaaagaaattaaactcatagggccactaggattgcatgtgagtgtcagagacagctttcctgagggagcgctgaataaatagggaccccgagggctctaggcccatagtagcctcagctttctggaaacctgtgtctccaaagctactttgcttggagagtgtacatctcacacgcctatgagtttgatgtctttgggcaccaaagaaataggaaggtgcctcagccacttcctgtttcacacggtgtttgtgtttgtttcattttgttttctcttcttttgcttcattctcaagcctggagtgttgttttagtttgcatgtgatttttttctctctctattaaatatcttccagcttgtataagtttccttggggtgtgatagggctcggctctgtgtccccacccaaatctcacgttgaattgtaataatccccaggtgtcatgggagggacccagtggaaggtgattgaatcatggggatgggtttttctgtgctgttcccatgatagtgagtaagtctcatgagatctgatgattttataaagaggagtttccctacacatgccctctcacctgccaccacgtaagacgtccctttgctcttcctttgtcttccaccatgattgcgaggcctccccagctgtgtggaaccgagtccattaaacctctttcctttataaattatccagtctcgggcatgtctttattagcagtgtgataacagactaatacaggctgctataacaaaatctcacatactggctggcttaaacagcagaaattcatgttctcgcaggtctggaggatggaagttcaccatcaaggtgttgtctggsttgtttcttcccaggcccctctccatgctttgcaatggtcgccctctctccatgccttcatatcatcttcctcctgtgcatgtctgcatccaagtgttctccttttttgagatgacgtctcactgtgttgcccaggctggtcttgacctcccgaacccaagtgatcctcctgtctcagctccctagtagctgggattacagttgtgccaccacactctgcttaaattttctcttcttgtgaaaacaccagtcatattggattaggacctgccttaataacctcatctaaccttaattacctctttgaaggtcctgtctccaaatacagtcactttccaaggtcctggggattggaacttcagtatagacacaattcagcccataagaaaactgtagcttgagagtcctggaaaaaaattgtggagaaagtccctcctctaaattcttcctgccatacatgcaggtggggggttgtctccatcactcacagatgacaaggagaggaaggaaagagggagaggaggagcaaaaaaaaaaaaaaggggaggtgagaagaaggaagaagagataatttaagaaattataaccaactaccggtgactgcagaaaattttcaagctggtgatttaaggagggatgatatggaatataggcttttaggtaatttttgatattaagggtatctcatgtattaacggggctcctatttgttttacattcttggatgggactcccaggaaaattttaatcagagatgactgttctatgaatctgtgcagccaaaggcagcattatacaccacaactgctcaccagactttggcaggatgtcttacccagtttatttaatattaaacaaactaaaatgcaactgagcggtcaccacagctgaataatattgagctccatttggggtttggatttaaacactgatgccttgcctttcagcagaatcgactctgtccagcacatggtagctgatattcakgaattctttttgttcagttccacaataatatgaaccacagtaggctcatttggtgctaatctgagcataataggcaatgttacagccagtcttcattgtaatttagcagcaattaatgtgcaattataacctgttaccaaaaattgaaagcacattatatagatggaaattgtctttttggcttcttagtttatggctggttttagggtgttttactgaaagaagcaattactaaaagaggacttttaattgttaatgaaatgtttatctttctttgttcccatgtggatttccacatttgaataaggttaataaggaagacattaagttaaacctacaagccttagtcggtatcccaaggtgcagctgggagccccaggtttccccyactccatgtccaaagctgtctacttcttttcatcaggaccctgggtccctatacacggagaggagaggagggggagatatcaaagcaagacaggatggctgtttctctttctcacaacactgagaatactccaaaacttgtcttttctctctcttctggctttatgtggaaagtatgtttcctcaccaagacctctatacccttgttctcaaacaamttttaagcctaagaaaacaaattgtgtgttctctggggatgtgagcatcattcatttgcctgaattcccatctaagtttcatcccttcccttctatcaagtcagctaccatcaagctacgaacctgctccgtcgcttttaaacctagacacttacatgttcagggctgttgtcacatcattgacttcggcctttcccaaaagtcaataasagaaacaaatgacaaatgactgaattttagcaactgtgattcagagatcattttagagtctactttcccaggtctcatcttacctgactttcacaacagtcctgtaagttagagaatgcagtagtaattggaaactgaagcccagaggggctaattcatctgcccacatttccacagctaataaatgtctgygaaataaaactagagctagaattttctgtatccaaatgccatgcccttaccattgccaacagtgtgttgctgcatcatttgcaaaaactaaaattgttgaaaccctccatcatatgccatctggtgtcctttgatataagagccacaaaatcaagtgggaaaagtagattttggagttaaatcttccctcatagctccaagaatctgagcaagttattctttgaactcagtgtttgttgttgatgttgttaacttctgtcttgcagagtgtgatgagctaagaattaaattagataatacaattaggtcgtaagtgtaaagtaggtagcagagtgtatgacacacagtaggtcctaaaatgtttcattcccattttggtgtcctttgatacgagagccacgaaatcaagtgggaaagtaaacttcggagttaaatctttccctagtagctcgaagaatctgagcaagttatcctttgaacccagtgtcagtcacattttaggacctactacatgccatacattctgctatgaataattcattgctgtgttgtcagagaaaatggtgtttacttatttatttttttttattttgagacacagtctcactctgacgcccaggctggagtgcagtggcatgatctcagttcaccacarcctccgcctcccaggttcaagcaattccccacctcagcctcccgagtagctgggactacaggcacccaccaccatgcccggctaatttttgkattttttttttttttttttttttttttttagtcgagayggggtttcaccatgttggccaggctggtctcgaactcctaacctcagatgatctgcctgccttgacctcccaaagtgctgggattataggcttgagccaccgcacctggccrgtgtttattttttaagtacacaaggagaactatatccctccattcttcttttggcctggaaaaactgggtaaaacgtaaagctaggatttatgtgcacttgcagtgatgtttcgagtacagtttctcctctccacactcaactcttctttcttcactgtgcactttatctctctggatttttattgtaccttcactcagatccctgagcaggcagggcacacttttaaaaatccattcaattgcttaataattttgtgaacccttggaaagagtacaaagatagtatgaaatagtgatgtcatgtccgaaaccagagaagtgctccattttgtctcaggaatggcctatgcaggatggatgggggttggagaaggaaccccttttcccacccaacacaggtgtctctcaggactctgtctcttttttaagaaatgggaatccaaattctaaaataaagttayttcttccctctccttctaggtcttcctggcagaattcaagaaaaccaatcaatttttcgcaataaaggccttaaagaaagatgtggtcttgatggacgatgatgttgagtgcacgatggtagagaagagagttctttccttggcctgggagcatccgtttctgacrcacatgttttgtacattycagaccaaggtatggcttctgctccgacaaccctacctcccctctaacctgtctcagcatgataccttcaatggcgccctcattaggagacacgagtcattgcctccatatttatcttacatttcggtgtacctgccatccatccaaacatcccttctacacaccatggaagtattacttagaatgttttagtgtcatcaattgggaaagatctttacttctagatttgtttgtctgttttcctgttttttagaatttggtttcatttagcataacaaccaggcttctcagcagtccgtgacttaggggaaaatgtaacaagtgtttgttcatctaccctgcatgtactggaagagataaaagttggaaaatagatcaaaacgcacgtacactattatttttctcttcaaggcyggcagaaaaagcagccttggagtgggctcatcagtgagcaagcccctgagctgggaggtggaggttggatgcgtctgcattcccactcggtgttgggaccctttccttatgctgaatttgccagaaggctgtgccgttctgggaggacttgcatcctggtctcctttttccttaaaaaaacaaaaattatccttttctttcctgactcaaaattattcaggatcattgtagaaaatttttataaactcaaagaagaaaatcacttataatcccaccacttaagatatactcgccattaatactttgaagtttctccttctatagattctctctgcagtggacttctaaaaacaaaaatagcaacccactgtaaatacctactgcactgtactctgcatttgttacactctattttgaacattttcttacgtctttggatattctacaacgtgatttaactagaacatctctaattttttgttctgatttaaataacactaaaatgaacatcctcgaagattagttttcatgcacatgcattatgattcttcttactggtttgtctcctctctgccaccccatcccggctgtccaccacccgcactaattagcagcctcaagtgggaccatatgactaagggccaaagaacacaaggggcggaggcttttccattttctgttttctttctttttgtttgtttgttttgtttgtttgttttgagacggagtctcactctgtcgcccaggctggagtgcaatggtgtgatctcagctcactgcaacctycgcctcccgggttcawgtgattctcctgcctcagcctcctgagtagctgggattacaggtgtgcaccaccacactcagctaatttttgtatttttagtagagacagggtttcaccatgttggccaggctggtctcaaactcctgacctcaggtgatccacccccctcagcctcccaaagtgctaggattacaggcgtgagccaacgcacccagcccttttcccattttctatctcaagccatgacgactggagagtgaatgagggaaaacttctaaggagacttgagccatgggaagaattaatgagggaaccagggaatgaatgaggaaagtggatggcaactggggcatccatcmccacctctgcagttcccagtagattctcagcatatgtgcaataaccaaatcaatgaataaatgcacttacctaagataaagagaagccagaccatggcaaagcacttactgagcatatgctgtgctcaaagcactgtggaggatacagaagtatataatacagctcccgaccttgagaacttcacactctaataagagtcaaggctgcatttctaacagtatgagtaatattagatcagaaggcagacacaaagtaccagagctgagagaaactagaaagaggaatttgaatgggcagaaagggccttgggcatgaaaggtgtggctgcaggagaggaagtagaaaagagtgaggtgtcctggtcaactatttaggagaatgcaggcccgcttcctgctgcagggagcaggctggaacttcccatgatgaaggctagaagagattttgtactagaaactccctcctggagatgataaatacccattggcctgggagggtgaaggtatgtcacctgcaggcaaagggacaaactctgccaccctctccatgctgttgggagggtgaaggtatgtcacctgcaggcaaggagacaaactctgccaccctctccgtactgttgtctagattttctgcacatgctggggctccctgtaatcttttccctttgcagtattttgaggcttgtagcaaactgctaaacacattttttcttttttgccataaataaagatttttactgtaaagctttcatagtagcgaaaaattggaaacaacacaaatacccaatgacagatttattgaataaattattatatggtcagagaaaataatactatataaccattttaaatgawgatgtaaatgcttaaacatcaatacagaatgttgtttatgaaatcrtaagtgagaatatatagtatttccttttaagcaagaacatttgcatgtataagcatgaaaaataatgaaaaactaacagttgttaattgggaggtaggattataactgattttatttttattatatctttctgtgtatgttactataaacacaytttagactgggcttctgggcacttaggcagttgtgcttctcttggtgccttttccccatttttttttttttttttgatttgcatgtatgacagttttcatgtcttacggggaaggctattgggaatcccactttgtagaagataggtatgctcctttctcttgcctgtccatcacagcttcaggcagcatttgtttctgtccctcttatgagagatctccttaacccatttatgcctgaggttgcaactttttgaattttgaaatcagaccttggtgatgaccttgagcagtargatataaataactcccacatgcttagcgttccaataatggaacactaggcataaatgagttccgtgcagctgggatgctttaccaagacctgagccacaagtgcatccacagcattggtgctgggagagaaaaaaaaacttcagcagagaatgtttacatgaaatgtaaatctgactggctcaagactcagatctcaaggaactgagtccttttagaaagaggaaagaaacaaaggaagaagcttgaatcaccttttccaacaccccgagttgttgtttttgagatgtcttaattattcaaaccttgcttgtcaaagtaastgattaaataccacaagtgaatgcaaaaggcaacgattgatacgtgatatggataatgctttgttctgggaacatgttgggaatgacctttcttgggaggacagttacctgtgtatgctagtgtagacatcagataagataaattaactatgtacttctccagggcattgttattttttaaaggaagttattcatctgctctctgcctccaaagagcgcacctgttgaataccagattattcaggagattctgaggacaggtattcacttgttattaattagggtcatttggattaaattgttaaagtttttaaagttcctagatgagggatatatcacctatggaagggtgaaaatatgataaakccatttaggaagctacaaaatgtgaaaattcctgtggacttggattccgaagttcaagcccagctctgccgtttatcaacagggctctgaggcacccactttacccctgcccaggacagagagtaagagttacaggcagaggggctgggagctgtaaaaccaggggccctaatgggacggcaccgtctggggacatagatgtrcaggataattcatgaaatctgaacctgaatctgaatgaggctcaaatcaaaagaatcttcacaatgaattttctgtgtgctagatcaaaatgactttgtacatcatccaggctctggcataaattactggctcagggtctaacgtagatcagcattctgagaggctgctgtcttggcaagaggaaagaagggctagctcttctttcttttactttttttctaacatttctttgttgttaatatttacattttctgtcttacaaagtctgcagggcttgaaattgcacgatcccttctcagtacccccttcagtgcggatgccagccaacttttgcactactagatttccaacttagatttttaacagtttccattacttacattttaaaaagtaaaaaaataggaaaatccacaataaaatttgtctacaagaagagttgtcataaatcttttaactatccacttacaagtagatttaaaacaattagaaaaaaataattaaccataaaactttgaaacacagggaaaaataaacactgaaacagtttccctctttttagttatgctgcagtaaaagaaagattaataactcaagtatccaaagtttctgtgttctatctctgataaaactgtggaaaaataagaggatttatttctaaaatttgtttggaaaggaaagatgcatctaacacagtaaggatgctatttctttttaatttcaaggaaataattttcccttaaaaattaaaagtgaactaaagtctaccttcctctgtgtctcctttgaattctgaaaggccgatctgtattctgacatttaagtagtgttactatttcacacctaagtagctctagatcctataggaacagctctgtctctgggtcgttccctcaggttggatttgagggcaggccgccgtggttttgcaggcctctgaagagaggcctcccagggtgatgccaagaggcagaacgctagtgttcctggattcacatcactgcccttgactcccacactcccaatatgcaccagttgaacattcttggtcaatatcactttgaaatttttcttttakgaaaaagaaaactgagtttcactttctattcatagaacacacaaagctctacttccggttatggcttcagggcatgagtgtgtgagttactttgaacaagtcacctaacatttctttgtgacactggttctccttttttgcttcctaaggataacgtgaaaaataataataataacaataatagcacttgcagagaagtttggatcttttttggagaaagtaccatactaactacaagatattattatcatttaaaattaaaaagaaaaactccttgaacttgatactttttaaaaagtatgtcatcctggtatttccatagttttaaggcaaaatccatctaagaaagtttttaatttcaagcattttattcagaaactgcttcatctgaagctctcaaaaatgctgcaatccatgaacctttcagttgagctaggagccctggaaattaccacaattgtagcaaagaaaagaaaacccacggaaaccacatccttccaaagacgtgtccctgcactaagacaagaattaacttttcatgctgcccccatctgtagtgacagataagcctcttttctttaacgtcctctggcggcgttctgatcctgagaacgcttacacgttgttatttcagaaactggggatcactcagacattctgcaggttcccctgctatgtaaccaaactgtgatttggcaaatgttagattttatagcaaatttacaaaaatgagtcgatttacagctgtcaacctgaaataatcaaaaaggccagaatctaatttaaagagcatttattcaaactcaaagtttgaggatggcccacctggaaacaccccaaaagaatgaagtcagagttgtaaaggagggaactttagggtttccatagggagagacasaggcatttttagcaggattacattttttcatacaaggctggtgcatagttccaggaacttggttacaggcagtgtttctttttgggaaagggacatttaacatcttttacagagtgtgctatagtcatgggttttctgtcatctggtctaaggaaaataggacaaaaaaaggaaaaggtaatctttaacaagattcattaattaaaaaggcaggaggcggccaggcacggtggctcacacctgtaatcccagcactttggaggctgaagcgggtggatcaccttggggtcaggagtttgagaccagcctggccaacatggcgaaactctgtctccactaaaaatacaaaaattagccaggcrgggtggtgggcacctataatcccagctactcaggaggctgaggcaggataatcacttgaacccatggggcggaggttgcagtgagctgagaccacaccactgcactccagcatgggcgaaacagtgaaactccgtctcaaaaagaaaaaaagaataaaagaagtcaggaagtgtttgtccctgacaattgtttaattctctctagtcattgtacagaacaagagaaaaaaggaagcaagttaatctataatctgagaaacagaagttgtaaccatatgtgactcagatcacagtcgcatctctctcaaggcgtaaaacgcattttaggaattctaacaccttttaaatgttatttattttcacacagtaatttatgggaaattaatgttgcactcacaatgtttccttacagttttctcgtccaaatacacaggaaataacgggcaatgagtgaatacatattcaggaattcttggactaaaagaacaagacactcactcagtgcatctgaaatgccgcatctttcctacatgcctgctttttttttgtttgtttttttctgagatggagtctcgctctgtcgcccagcctggagtgcagtggtgcgatctcggctcactgcaagctctgcctcccgggttcacgccattctcctgcctcagcttcccaagtagctgggactacaggcgcccaccaccatgcctggctaattttttgtatatttagtagagatggggtttcaccgtgttagccaggatagtctcaatctcctgaccttgtgatacacccacctcggcctcccagagtgctrggattacgggcgtgagccaccgcgcccggcccctacacgcccactttttaagctcacagatctgttctcatcttgatgtgactctgtaatattcttccaggctcatggcccatattatctgcccattcctttgtcagccattctcacaaagtcccaaaagtattgtcaccagcttcccagaagacatgagcatttgacatctccttcaagagagtgcctcaggaaagtgcatgccttctgtgaatctactatccctcttttgttttttgttgttgttgttgtcattgttgtgtttgtttstttgttttgaraaggagtctcactctgtcgcccagattggagtacagtggaacgatctcggctcactgcaacctccatctcctgggttcaagtgatcctcctacctcagcctcccaagtagctggaattacaagcgtgcgccactgcgcccagctaatttttttttcttggtattttagtagagatggggtttcaccatgttggccaggctggtctcaaactcctgacctcaagtgatccacccacctcggcctcccaaagtgctgggatcacaggyatgagycaccatgcccagcctactctccctcctttgaaaccttgctgacaaactacctactctataaatcacgctcagatacactaaatcctacttgtcattcagacgctcaggcttctcagcttacgtgacccagaaagatgattttgctcctgtactgctgggtgtcttctgtgacttctttcatatgttctgtttaaataataccttgtctatgtaaataatacattccttgataccaagatgcatgtttcgctcttttcttttgtttcatttgcccgtagagtgctagataatgttcaggggctgggcacaggggggagcggaagagaaaaagaaagataaatggtctgactgtagatcatactggctaactcaggtgccaggaaggctggtcccgaatagaactgcagaggagaagtctatctttgacaaaccctcttcccacccctctctgacctcctgtttcattattttccccttcatcccagagttcacatgatcttgtacccactgtagctatcaggtctctgccttgattttttttttttttgcgacagtctcactctgttgcccaggcggctcaatacaacctccacctcctgggttcaagtgattctcctgcctcagcctcccargtagctggggttacaggtgtgtgccaccatgcctggctaatttttgtatttttggtagagatgggatttcaccatattggccaggctggtcttgaactcctgacctctagtgatccacccacctcaggctcccaaaatgctgggattataggcatgagccaccgcgcttggcctctgccttgatccttgatggcaaaatcgttcttctccatctccttgtctytcccccttaaaacttctgtcacttcaggaacctcttctccaccaccagtcttagagaaatatctgataaatagcatagagcagtttaatatgtgttgttcctagcaacgatttcttcctaaagtggagcagagtggagtttccttattagacccaacattacgttgtatttgaggtgattacagttcccatcctgaggaggtgacacgcatgggactcttcaggggaaactgtgggaatatatgagcgtcagaatcaacgtactgcagaaattcaagtgctaaaccacagaaaagccctcttttacaaagtaggaggaagagcaggggggaaaggtgatagggaggatcccttggggtggtaagaagaggaacagaggagttaggagtatcggaggacaggagaggaaagaatttcaagagagaaaggatcatatatttaatgtggtgaagagttgacaatcaaaaactgagtgtggaatgtgtcatggaggaggaacagacaatacagtgtgaaggagtgagtggtggataggcagattcagtggtgatacagaaatcttccagaaagagttttcagaagatggaagctcattatgactgcagagtgtaagggatgagaatcatgggaaatgcttgagccagagatggagaaaccagacaagagggagactattcaggttgtagccttttcagataggcttctttcacttaagaatatgcatttaagggttcttcttttctttctgtggcttgagaactcatttttcattgctcagtaatattccattgacaactaatgatttgttatgttcttttgttttccttawaatgacagactccatggatcaagaattttagagtagggaggggtggtagaggttatcaagtcagatcccctcattttgcagcaaaggaaatggagctccagagaagataagcctagctggtcacaggagagtgctcttttctgtggtcaatccaaaattattagtaaagttgagacttcaagatacctaaacacaaatccaactcacaacttatttaattggaaaattgttcattccatgtcctaaaccttagacccaagcaagaggggttccgcccagcccctcacttagaatcctccctttggcctttctcaaaccacactccttcctgtgaagccaagaggtcgtctctgttcctaaactactycccaggacctcggaattccatacctaaacagcctcaagcctgtgtagacatctccctaggttctgtccttgaaaggggcaggaggagactttcccgatatggccaattaactggtgcagaattttgagggatcctgaatttgtcacgatccttcttggtcattatgaagttatatttcccaagagacagaacatataggaatgtagagcatatttaattgaattgttggtgagcttgattaataacacttaaacctggggacccacagtgtggggcctccctctgcacactcgctccaaatcttgcaaaggttggggctgtcctttttctgattataatgcaacttaatgcttttcttccctgtgtgataaataataacaatgtatgtgataaagttaatacataaggagttcttgctatatgccaggcacagggytaaatactttatatgaattctttcatttaattttaaatatgaacgatagctcccctttcttcttcagagcagaattcccaactctttccatcggctgtcctatgagatgtcccaaagaagagttgaattctatctctggttttcatcttgttgtactacagtcttcgctgttgtaacatttgttacgtgtccttaacatatgatactttgaaaggtgtgatggtaaatttagatgttttgtcataaatattttgatcttaattttatttattttgcagagattgcaaatattctcttgtgtaaaatttattacgttggtttactagccttcggagaaaaaagatacctcgaaaaaaatgactataattattcttttccttcttttcccatcttgtttttctggagagggagtctacaaatctgatcttatttgcatgatatttgccaagttctcagtgcatttacaaaattaactgttattagtctgataaaaatmatgagtttatttctttaatgctataaacctgtcattcatcctataatatatgcacatttgccagccatttccttgtttactcaatatttgattagctgtgttgaatagtcatcacaactaaacacttttccattctctttattctcattctctcctttgaaaagtgtaatcactgtaagaagaaagcagtgtagaagctaggttgtattaaataacttttgaggccacttttacaattcaccctttactaattctagaatattcacaaaatgtcctattcctccctttaaagaactatcttgtgttttaaataatgatatattttgacagctctaggacctttatctgctccaaatgatatttgtgtatgcaaacgcagtcctatgagaattatacaactgattttgttaaatctatcactttgatcttgtatttaatcatcattttttttaagacagggtctcactctgttgcccaggctggctttgkactcctaggctcaagtgaacctccagcctcagcttcatgaatagctgagattacaggcatgcacctctgcacccaacttaaataccatttctttaaaacatcaataacacaaacataagagtcatacagctttgattacccacctatctacagaatgtcaacattgtttattgccttcagttgtctggaaatcacaacaaagctgtaggtaatggtgactctctcattttcatggacagggttcatttttcagaggaggaaaccaaggccctgtgatggtgggatttacctgatcacacagctgattagcgacagtctcatttctcacagactagaatttccattcgacagatgctttgccaggagttgttgacagtcggcaagactgggacgcgtttggcatgtcccatcccccaatgccatcacagcttcaattctcacccaccggaaagaatcatttgcctcggttaatgtattacccgccataaagacgtgaggtctagactagtaagtgacatttacaattaacccaacacaggccacattctctccctccctccctccccaccatctctctctctctctctctctctctctctctctctctgtctgtctctctctgtctctctctctctctctgtctctctctctctctctctctgtctgtctctctctgtctctctctctctctctctctcagcctgcttggtatcctctctcagcaggtggccagaacctaaacggcagcccaggagggaatctaattctgttttcttctttctttcgagagccatcggccagagaactgttcatttgcttcttctgggaagtatttgctggtttttggattggttttggttttgtctttcctggcttttaaattgcttcctagaaggacagctgccatcagttatcaattgcccactgaggaccaatgcagagattcatttccacacacactattttgtttaatacccacagcaaccctaggaggtaggagtattactaccccatttcacaaactaaatgaagctcaggagaggttaagtcacgtctccagagttataaatagaggggctttgaacccagggctgagtaaggatgaagcccacattctttgcaattactctgagtctcattcttcttggtttgtttctatctatgccagcccagagtctttccagcaggcagacacttctttttgcttgcggttctgcagaggttctagtcagctgtgggttgccttcaactctgagctctccttccccagctgtttatgaaagtttgagcctattatatttgtatttaccttttatgatgggattttggattcagcttttaaaaggcttatccatccctcaaaatgtgctcctcaaaatccaaacctctggacygtgtagtttgtatgtgcatacatttgtgctaattttatcacagagcagaacagatatttgacagatttattgtggagcctgcagttctcttgggagggttaaatgtggggcatccaacatactataaatctccattgctgttaattaataatcactagtaacgtagtcttcttctcaccctcatgktagtaaacactgactgtgccctgtgatctcttagactttaatggccaattcaacccccccaatgctcaccactagtgtggcgtctgattcagacctgagaataggtgggaaggtgtgtggaatgcatgggagtggggctgaactgttgcctccagtcccctcccaccactttctccacatctaaattgacagtgttaaattctgaaatgtcagcctttctaggaatttgtaagcatccaaacacttagaagaaaccgttcactcaagcactgttggaaatggtttcgctctacactttcatacgctttgctctcgtgactacttaaaagaagattccacctttgtggcttgtatagggccattatagtttgagtaaaaagctgaggttagaacagaagctctttctgtggtgctgatgagagcaagaggtagcatgagaaagcaggtgtgtgcaggcaaagccaatgacgactctcaaattgggtttgaaatctgtgttaagtcatgatttatgtcagctgagaatttgggcctgtccagaagagaaaagggtgggcttcacttaaagatatatggaattagtaaatcagatcggaaactaacattgaaaaaagacggatgcttaccttgacctggattattgagataattgccacaatacttggtttccccattctgtggtgaccaggcaaggagtctcactgtcagaccagaacaatgtttctactattacctcctatgccccacggcctcggttgggttcacatcaaaacrtaaaggttaattctgttaagaaaccacccaggtgagactttcagatgcaaattcatgcccagacgcaccgaaggtcctcacactttatggattactgattctgtgatgcattacaaccctttaaaaaatcaggtttctctaaagtgttataaatacatttattggaaaaaaaaattgtctcacatcattgagttgctgaggctggttacaatcctggctgatatgcccaccacagcctgaagaccacccagccctacttctgactgtggccactcgagggccccagctctactgacatacatcatgtcctctgccagaagaactccgtcataaactgtggcttgcctctgccatgagttaagtcaggactggagaaaaataaggttaaacttgattgcaagcttcagggaggaatgactgacatgacccgcccactccccccacgccacgcccacagaatatgctcagtagctaattactgagtgttgagtgaatgaatgttttcaagctccgcccttggagtcagagaccaaaacacattctccttatcaccctgcaccctgtcactttcaataagtatacaatcggcacatgctaagtgccctaagtgcctggcaccatcccattgtctggccagcaggtcaactggactctcscttgtgccccccgctcatctgctgggttgtaacacgcaagcatctagatgccacagggcatcccacctagattccccaggcttcctggggctcaaaaacatagattgtttaaatgattttgacagtcttctgataagtgatttcacaacagaattagttcccctgaaatgatctaatccatttaaaaagtagtcctccttgttgtattttctctaaagagctaaaaattggaactgtgactgggtatggyggctcacgcctgtaatcccagcactttgggaggccaaggtgggcggatcacctgaggtcaagagttggagaccagcctggctaacatggcgaaaccccatctctgctaaaaatacaaaaattagctgggcctggtggtgcatgcctgtagtcccagctactagggaggctgacgggagaatctcttgaagccaggaggcggaggttgcagtgacccgagatcacgccactgcactccagcctgggagacagagtgagaccctgtcttggacaaaataaataaataaaaatgaaatgaaataaaagttggaattgttttgtttttccacaggaaaacctcttttttgtgatggagtacctcaacggaggggacttaatgtaccacatccaaagctgccacaagttcgacctttccagagcgacgtaagaggctttaaagggtttgggagttttccactgttcttgtcagttcttgctggtttttttttccttttttcccacttggcatgcctgaatcccagggccaggtgaacccttgggaatacatcgagcaaggcgacagttttcccaggttgtgaaactgaaattcgtgtcagtttggtttcatttctctgtgatttaaaactaactacttagtttcttaaggaaccatcccgattcatcaggcttctaactaacctgagcacagaagcaaatatgtamcctttggaaaggaagcagtgaaatggactgcagacctcaagggtggtccccagggatggagcttrtagctgaggcatcttatggaaagcctgatgtggaggcataaagctttagggagcaggaagaggcacttagtccatctgagaacaaagcttctccttcctagtgccggcagcctgagacacctggagacggggcagsctgtgtgtacctggtgggactgcacctgcatccacagttctcaccaccactcctgcccatgctgttccctttgggtcccacttcctgctccccatgacatgcaagtaaaagaaagctctgccactgggctccttggaaaatgatgagtacatgctagcttcctttgctcagcgctcaataatccctccctcccatctgcatgaacactttgagtggtttaggttgaagtgggttgagaaatggatttggtccgccagcttcttaaaatccctggctggaatggctgtttatcacatctagtgggtagcactctgctgagatcattgctctgggaaacctcagcaatgcacccagaggtaattttactggatttctgcagcagagaaatcatcgggcatttttcatgccggaaagaattcacttagtccactgtcgtctccagccagcccggacccacgctatccatcctgtcctaaatgccttccaggaaggagaattttgcattcttccacaagatccagcaagcttcccttccaggaagctatctcttatatccgaccttaatcccaccagtgatggggtaaactcatttcctttaaccttgtcaccattgaagatgaagtgtaacttatcttgcatctgctaatatcctcttttccacctcatgggctgtaagtgttgcccaggctaaaggttctcagtacgaaaataaaccagctagttctattcagaatggtgcatacaggtctatgggtgccaaccagagtttaaaacaaagggagaaattatttgcctattatctatactattacttttttttttttttttgagtcagagtcttgctcygtcgtccatgctggagtgcagtggtgtgatctcagctcactgcaacctctgcctcccaggttcaagtgattatcaagcctcagcttcctgagtagatggggctacaggckcccaacaccatgccctgctaatttttgtatttttactagagatggtgtttcaccatgttgcccatgctggtcttgaactcctgacttcaagtgatccacctgcttgggcctcccaaagtgctaggattacaggcgtgagccaccgtacctggcctatactatyacttttaatgtctgtgtatgttttattagcaatagcaaaaacaacaaaaaaaatgacaatgtgagcattattgtttaaaatataagaacaagtactagatacaggcaggactcacttaagatgccagctctgttttatgctgttaggactgaggctggaggtgtctgagcctctactttcttatgtgtagaatgaatggacaacatcttccttgttaggattaaacagagttatgtgtgtatgccatttagccatacacagcatgtcagaaaaaggtcagtctgggtttgggattttatttcgttccatgacaacattcatgttgaaccttggttctccttcccccaggttttatgctgctgaaatcattcttggtctgcagttccttcattccaaaggaatagtctacaggtaaattttgckttgtggaaacaaatgctaagatatcggctttcctggctcagttaatttaatcattgcaccgagtgctgtgagacagcccatgtgatttcctgggagtaagctccacacataggtctsctgcccacartgattacatggatgatgacttacaaccaaggaagacattccagtctcaacagcaggaaagtgctgagctcattctgtcctttatgctggttctcacttgaattccttctttcaccttccttttcccattttcactgtcctgttttctctttcttatcataccttacggtttctttctcttttgtccccttcatacctcttatttttgcttgtctttgctttgagccacctagaaatgcttatggaattttcttcttctctgctgtatgacatcatttcacgttcttctgtccaagctcttagattgacactattgtatctcaatctcctcacttcttttctcaaaatgtagttggcacttatttaacatacaaacctttacaagcttactgtcagatttccaactcactgcagattaggaggaaaaatagaaaggaaaaaaaagaaaggatctagtgaggaggatggctgagctgctggagagcagataattagtattgaagctttggtgcttacagagtgtagaattcacttaacaaggaaggatctctccattttctgagggtgcagtcaagtgagggttgccctatttggagtcacacaactaaaggcttagaggaggtttgagaagtaagtattcttaagcagcctctttgaatgtaattttttttggtctwtctacaaaatcatagattaagaatctgttttataattttttaatcttcaggaaattgagaaatactcaccagaatattatttwaaaactcttagcagaatttttttaaatttttctttatatgtgtaaggcctgcaatgtatctaaaatatttttgtacctaggcactgactaaattgtgtggggtggatggatagatggatggatggatgatggatgagtgaacagatggttggatgaatggatgaacagatatttggatggatggatgggtgtggatggttgaatggatggacaaatgatggatgaatgatgaatggatgaacagatggttgaatggatggatgaatggatggatgtggatggatggatggatggatggatggataaatgatggataaatgatggatgaatgatgagtagatgaacagatggttggatggatggatgaatggatgtacctggatggatggatggataaatgatggatggatgaggaatggatgaacagatgggtggatggatgatgtatggatgatggatggatggacaacggatggatgaacagatggttggacggatggatggatgggtatggatggatgggtgatgggtaaattgaacagatggttggatggatggatgggatggatggatggatggtgatggattggagatatggatggatggatgggatgatggatggatggtgatggatgggtggggagataaataaatgaaaggggctgggcacagtggctcacacctgtaaatcccagcactttgggaggccaaggcagatggatcacctggggttaggagttggaaaccagcctggccgacatgacaaatcctgtctctactaaaaatacaaaaattagctgggtgtagtggcccttgcctgtaatcccagctactttagaagctgaggcacaagaatcacttgaacctgttaggcggaggttgcagtgagctgagatcacaccattgcactccagcctgggcaacagagcaacagtccatctcaaaaaatttaaaaagttaaaaaaaaaaarggggaagtaggaataaaaattaggagggactggagagagagagagacagagatcttagactggaagggaccccgtgaaacctaaacccacatgcctcggggcattttatttccctgtgtcacaaagcttctttctatcatgtcaccatgtaaattattaacactcagaacaaaaaaaaaaaagcaatagatgtccataagtagctttactatcacaacaaattgtacccattttcgagtcttaccctgcccatgcatggaagttatgttctttaagccttcttaggcaccaacaagaaaaaaaaatgagtttattttttgtgctcattaggttgcaggagaccctwgaaagtcatcatcaaatagttataactgaggataggtcaccagacaagtatgctggctttaaaactggcctgctgcataataagaaataagttgccttataataagttgaatagtaagaaattattcaactgtctgtgtgtaatttgactcacctaaacttttaatttggcaactgaattaacaaaaggattcaattcatttctttcttttgacctcataggataataattttctgaatttgttcacaaaactgatacattagttttgaagggctgccataagaaattaccccaaatttggtggcttattctggaagctagacatttggaagcaagatgtgggcagggccatgcccccaccaagccctcgatttaccagcctctggtggctgcaggcattccttggcttgtggctgcatcacccagtctctgcctctgtcttcccatggccttctcttgcccccatctgtcttttctaagaacacttgatggatttagggcccacctcgataatcaaggataatctcaccttgatatctttaacttaattacatctttaacttaattacatttggaaaaaaagaccctttttccaaataaggtcacatctacaaggttctgggggttctgacatgaacatacctggacatatcttctgggggccaccattccacccatacagctgatatcacagaccatgtgtgctctggatgtgcaggtctttgtcaagcatggcagtgggtactaaacatagagaagtcccaacccccagaaacctgatgagccactttctggggtttcttcagaggtagaatggattgatgatgaatggatgaacagatgaaaagacacaagctgtacattcaaaaaatgtccaagtgaatgttattccaattaaaagtgcaagagctgaaaggaaaaaatatatcaccagacttaagtaggggagatggcaaacaaaaattcttctgtgaaggtagactttttagagtggaagaggctttgcagatggaagaagtgactccaggaaaggcacagcaataggaaaatggaggaatattcaacaggtgcatccagcttcaggggcaaggctgctgttggtcgatgaaaagcatgagatgtggagaagcaggtgtggtggcgtcactcaccatctgccagaggaaccacaaaatcgacggcatcttcaaagatgatgtaagccctggtttgggtcaaatgtaaaaccacagagccggraagtatgcagatgtggaaagaagaatctagaacttccaatcttagagtattagaactaagaagaaccttaagwttatattttattgacaataaaactgggcccaacccatgtgtttgaagccactttcaatgctttcacgtgattctcattggacgttacaggaccccatgagacaagcaaggcaagtgtcatggtccctgttccttggatgagtcttggaggctgccagaggggaaatggtgaggcggagccagccggccgtaatgctgggattgggaagccaactgtgatgcccactccacctcttccaaatagaaaagctttgcctccgttaacctcatgatggaatgaaagggtgcccctggatgttctcttctgcttgatgccatgatggcctgcttctcctctgacagatgaaagcttgcagagacatgcacaggctgtggactctgaagttctcccctgggtcctgatgccccatagggtgtaagcatgacatgcctcagaataccctgggcctctgggttctctgccctctccagctggctccaggggtcctcactggtcttccttggcactccttcctcacccccatggggggctggcttcacatggcagcctttcagaacctttcccatattgacctagatccctcagagctggccagkcgcagtggctcacgcctataatcccagcattttgagtctgaggcagaaggattgcttaatgtcaggagttcatgaccagccttggcaacrtagtgagaccttgyctctamaaaaaattttaaaaattagccaggcatggcgatggcacacatgtggtcaagagtctgaggtgggaggactgcttgctcaagaggttgaggctgcagtgaactgacatcatgccactgcactccagcctggatgacagggaaagacctcgtctcaggggaaaaaaaaaaacctgatatcaagggaagcacctgaattatctttaaaaaatcaatttcacaagtacagaatgagaagaaactgggataatggcacttcataaaggaaagcagaaaaacacctgaaggttttagtttacaataaactcaatattgggcattactgtgatgaaactatgaaaaatatggtgcaggatcttagtccaccrtggcaaaaggcaagaggatggtaatggagctctgggtgccgctgtaacctgcaccaatcagattgtctctctggaggattctggcttcattctgagccaagtcagtcragaagaaaacggacaaattcaagatatttggaaggtagaggccagaatgtttgcccttcatccagtttcccccagtggccacatctcatgcagctgtggtacaaggtcaaaagggtctgaaaaccacatcatgaggagcgaagtccctgatcttggtgagagaagagaaaacttgatgtcatttttttcaaatatttggggtgtcacatatggtaacaatagaaagcccccttggaccaataggtgacatcacatggaagcaaagttcggttaattgttttttaaaaaatattatcagttacatttccctaagaatggaatgggttcttttaagaggatactagttctccaaggaaacagaagtttgttggcatgacattctggcgttggatggattccggttctcaaggggttcagtattagttaggaacaaacttcatcaactggacttggaattaggtgcagtataattcattcacaaatatgtagaaaatggcatacagtaagtatattttttaggttttcctccttcgtcattaccctcaggaaagtcctgggatcaagggtctccaatgggtatgggtgctctgtcctccttatactgagctgcaccccttggtaaatcagagaaagaatccatagcagccagcgtgcccttgcagaatctgctttgtctacaccccacttggtgtgcaagtggatagatacataagcgcctctcgtgagcccctctcaggctgcaatgagacaaactccctcgcctcctatggaattttatgttaaccaaattatattgattaatgtgasatttgcttcacttttgtttttcagggacctgaagctagataacatcctgttagacaaagatggacatatcaagatygcggattttggaatgtgcaaggagaacatgttaggagatgccaagacgaataccttctgtgggacacctgactacatcgccccagaggtaggaatgcagtgacaggctgctcccacctcaccatgccctggccacatgccattgcttctttagcccctgaaaakcagaaggttttaaatatcttcattcaagatttgtacctgttttcttaagtatctcataaacgccaccatgcatgtgggtttctattattattttgtggggagcgctacttttacaaatcacatctctccaaggcttgcagagtttggcatttcctttcccccagccttaaaacatattcactctgctcagacctaccagaaggaacagctagtgaagagccaggtggagcaagygtccacccaagtcaagtggtgaaactgtggggtcagaagacctggactgagtttctaagccaccactgatgtaagcacagagtgattgccaaagtctcactgacttccatttcctcttctgtaaaatgggtataatgctgatgtcattgtgttattgtgagcattagatgagaaagagtgtgaaagttaaaactcacccctgcccccattaaaaaataagaagaagacactgctgtcacattctggacacacaaagaagtgacatttgcacagaaggcatccatcaattcaactaaacccacctccccccttttcacagaatcctccccagctgcccacccagggagattagtgacacccctcccacttggtctttcccatggcacagcacttgttctggttgctttttcatcttcaaatctccctgcatgactggatatttgctctgcagtcatggacagattcatattcactttttaaaaattttcatttcgaaataattgtagattcacaggaatttgcaaaacatagtccagaaatatctcccaactgtgcccttcatccagtttcccccagtggtcacatctcatgtagctgcagtacaatgtcaaagccaggaaactgatgtccatccaaagtgtacatggtgctatgccatcttctctcatgggtagatttgtgtgatcttgttcacttttacatctaaggacctagtgcaggtgttggcatattaaggtgctaatagataccttctagaagagtaaatggatgaactaactaataaacgtgtgattggagatggttgtttgataaagactctggcagacctctgatttcctgggtaaaattattcagcagcaagttcctgtcattgccaaaggagttgtggccatctgagtcctrgaactatgtagctttgccctgtggttgggtgatatgtaatttgaatttagccttggcttctattccatgaggaatgatgtcttttagcttacatggcattgttgaactcacagarcgaggcttattgattaaataactttctgatcgtagaaatctatgtttcattcagtttggcacagatacaggttttgatgctataaaccattttcatttgaagtgaaaccaaagctcatcaaagcacgagtgatggggacttaagaggacggactcaactcaattactgaattcccctttgtaacaattctgaaatatgcccaaatgcactctgctcagaccaccctcactgccatccccagcagcagtctcctttgtcactccctcagcctcacctgagccatctcaatttctttcctcttcaccttgcaacaccttggtgtggctgccttactctgatgtattcctgtctacagattttgggtgccgggtcttttccmcggcawaccttccttcccgatttccatctgcttcttgcagaatccggcttccacagcttgcttctctctgcagcttcactcccttcttttcttttacgtgtgcttgtctccacgtgattcagtgcttggtcctcttctcttcttactctacatcctccacgagcaacttcattgatgactgtggtcttcgctgtagagtcaatatggcccacctgcacttcttcctgctgcagacactacgtccactttcctgcttgagacctccaagtaaatgcatgagtccttcaaagacagcaggtccaaaactctctctgttgaacttgctccctacttcactctttccttttctttcttggtgaattacatgtcatccatccagtcttctagagagaaaactaggaattatacaaatttcccctttctttcttacccttcaaatccacccaaacaccaacaccttctataattggaccctctcatgtccattcactsccctaaacttgtgactgaattcagactctcccttgattccttctccaagctcaaacaaatccccttgatccagctccgcccagatctccaggtcctctcgcccttactgctgttaccctagtgcagaacatgagcatctcttgcctggctcttggtgacacccttccatctgctttcctcccttatcatccatcaccagggcatgctctttacatatcttcatgccttttgatctgttagaaaagcatccccaagatctgtctatttatatatgaatcatatacattgtcaccagctaagatagactgtgtgttatcaatgcctaaaaaggaatatgatcaggttatactaacaataatatatagtttaaaataactaaattgcattaatttatttattattattatactttaagttttagggtacatgtgcataatgtgcaggttagttacatatctatacatgtgccatgctggtgtgctgcacccattaactcgtcatttagcattaggtatatctcctaatgctatccctccccgctccccccaccccacaacagtccccagagtgtgatgttccccttcctgtgtccatgtgttctcattgttcaattcccatctatgagtgagaacatgcggtgtttggttttttgtccttgcgatagtttactgagaatgatgatttccagtttcatccatgtccctacaaaggacatgaactcatcatttttttatggctgcatagtattccatggtgtatatgtgccacattttcttaatccagtctatcatttttggacatttgggttggttccaagtctttgctattgtgaatagtgccacaacaaacagatgtgtgcatgtgtctttatagcagcatgatttmtartcctttgggtatatacccagtaatgggatggctgggtcaaatggtatttctagttctagatccctgaggaatcgccacactgacttccacaatggttgaactagttggcagtcccaccaacagtgtaaaagtgttcctatttctccacatcctctccagcatctgttgtttcctgactttttaatgattgccattctaactggtgtgagatggtatctcattgtggttttgaawtgcatttctctgatggccagtsatgatgagcattttttcatgtgtcttttggctgcataaatgtcttcttttgagaagtgtctgttcatatccttcgcccactttttgatggggttgtttttttcttgtaaatttgtttgagttcattgtagattctggatattagccctttgtcagatgagtaggttgcgaaaattttctctcattttgtaggttgcctgttcactctgatggtagtttcttttgctgtgcagaagctctttagttgaattagatcccatttgtcaattttggcttttgttgccattgcttttggtattttagacatgaagtccttgcccatgcctatgtcctgaatggtaatgcctaggttttcttctagggtttttatggttttaggtctaacatttaagtctttaatccatcttgaattaatttttgtataaggtgtaaggaagggatccagtttcagctttctacatatggctagccagttttcccagcaccatttattaaatagggaatcctttccccattgcttgtttttctcaggtttgtcaaagatcagatagttgtagataagtggcattatttctgagggctctgttctgttccattgatctatatctctgttttggtaccagtaccatgctgttttggttactgtagccttgtagtatagtttgargtcaggtagcgtgatgcttccagctttgttcttttggcttaggattgacttggtgatgcgggttcttttttggttccatatgaactttraagtagttttttccaattctgtgaagaaagtcatcgatagcttgatggggatggcattgaatctataaattaccttgggcagtatggccattttcacgatattgattcttcctacccatgagcatggaatgttcttccattggtttgtatcctcttttatatcattgagcagtggtttgtagttctccttgaagaggtccttcaygtcccttgtaagttggattcctaggtattttattctctttgaagcaatcgtgaatgggagttcactcaagatttggctctctgtctgttattggtgtctaagaatgcttgtgatttttgtacattgattttgtatgctgagactttgctgaagttgcttatcagcttaaggagattttgggctgagacaatggggttttctagatatacaatcatgtcatctgcaaacaggacaatttgacttcctcttttcctaattgaataccctttatttccttctcctgcctaattgccctggccagaacttccaacactatgttgaataggagtggtgagagagggcatccctgtcttgtgccagttttcaaagggaatgcttccagtttttgcccattccgtatgatattggctgtgggtttgtcatagmtagctcttatgattttgagatacatcccatcaatacttaatttattgagagtttttagcatgaagggttgttgaattttgtcaaaggccttttctgcatctattgagtaatcatgtggtttttgtctttggctctgtttatatgctggattacrtttattgatttgcatatattgaaccagccttgcatcccagggatgaagcccatttgatcatggtggataagctttttaatgtgctgctggattcggtttgccagtattttattgaggatttttgcatcaatgttcatcaaggatattggtctaaaattctcttttttggttgtgtctctgcctggctttggtatcaggatgatgctggcctcatcaaatgagttaaggaggattccctttttttctatttagtggaatagtttcagaaggaatggtaccagttcctccttgtacctctggtagaattcggctgtggatccatctggtcctagactctttttggttggtaagctattgattattgccacaatttcagatcctgttattggtctattcagagattcaacttcttcctggtttagtcttgggagagtgtatatgtcraggaatttatccgtttcttctagattttctagtttatttgtgtagaggtgtttgtagtattctctgatggtagtttgtatttctgtgggatcrgtggtgatatcccctttatcattttttattgcgtctatttgattcttctctctttttttctttattagtcttgctagcggtctatcaattttgttgatcctttcaaaaaaccagctcctggattcattaattttttgaagggttttttgtgtctctatttccttcagttctgctctgattttagttatttcttgccttctgctagcttttgaatgtgtttgctcttgcttttctagttcttttaattgtgatgttagggtgtcagttttggatttttcctgctttctcttgtgggcatttagtgctataaatttccctctacacactgctttgaatgtgtcccagagattctggtatgttgtgtctttgttctcattgatttcaaagaacatctttatttctgccttcatttcgttatgtacccagtagtcattcaggagcagattgttcagtttccacacagttgagcagttttgagtgagtttcttaatcctgagttctagtttgattgcactgtggtctgagagacagtttgttataatttctgttcttttacatttgctgaggagagctttacttccaactatgtggtcaattttggaataggtgtggtgctgaaaaaaatgtatattctgttgmtttggggtggagaattctgtagatgtctattaggtctgcttggtgcagagctgagttcaattcctgggtatccttgttaactttctgtctcattgatctgtctaatgttgacagtggggtgttaaaagtctcccattattattgtgtgggagtctaagtctctttataggtcactcaggacttgctttatgaatctgggtgctccygtattggatgcatatatatttaggatagttagctcttcttgttgaattgatccctttaccattatgtaatggccttgtctcttttgatctttgttggtttaaagtctgttttatcagagactaggattgcaacccctgcctttttttgttttccatttgcttggtagatcttcctccatccttttattttgagcctatgtgtgtctctgcacatgagatgggtttcctgaatacagcacactgatgggtcttgactctttatccaatttgccagtctgtgtcttttaattggagcatttagtccatttacrtttaaagttaatattgttatgtgtgaatttgatcctgtcattatgatgttagctggttattttgctcgttagttgatgcagtttcttcctagtctygatggtctttacattttggcatgattttgcagcagctggtaccagttgtgcctttccatgtttagtgcttccttcaggagctcttttagggcaggcctggtggtgacaaaatccctcagcattttcttgtctgtaaagtattttatttctccttcacttatgaagcttagtttggctggatatgaaattgtgggttgaaaattcttttctttaagaatgttgaatattggtccccactgtcttctggcttgtagagtttctgcygagagwtcagctgttagtctgacgggcttccctttgtgggtaacccgacctttctctctggctgcccttaacattttttccttcatttcaactttggtgaatctgacaattatgtgtcttggagtygctcttctcgaggagtatctttgtggcgttctctgtatttcctgaatctgaatgttggcctgccttgctagattggggaagttctcctggataatatcctgcagagtgttttccaacttggttccattctccctgtcactttcaggtacaccaatcagacacagatttggtcttttcacatagtcccatatttcttggaggctttgttcgtttctttttattcttttttctctaaacttcccttctcacttcatttcattcatttcatcttccatcactgatactctttcttccagttgatcgcatcagctcctgaggcttctgcattcttcaygtagttctcgagccttggctttcagctccatcagctcctttaagcacttctctstattgsttattctagttatacattcgtctaaatttttttcaaagttttcaacttctttgcctttggtttgaatttcctcctgtagctcggagtagtttgatcatctgaagmcttcttctctcaactcgtcaaagtcattctccatccagctttgttccgttgctggtgaggaactgcgttcctttggaggaggagaggcactctgctttttagagtttccagtttttctgctctgttttttccccatctttgtggttttatctacttttggtctttgatgatggtgatgtacagatgggtttttggtgtggatgtcctttctgtttgttagttttccttctaacaaacaggaccctcagctgcaggtctgttggagtttgctagaggtccactccagaccctgtttgcctgggtatcagcagcggtrtctgcagaactatatttattaatactacaaaaatatctatgcttcatcaaaataatgagattaaatgactttttaaaaatcttggttttggccaggtgcagtggctcacacctgtaatcccagcactttggtaggctgaggcgggtggatcatgaggtcaggagatcaagmccrtagtggctaacacggtgaaaccccgtctctactaaaatataaaaaattagctgggtgtggtggcacgtacctgtaatcccagctgctcaggaggctgaggcagggcaattgcctgaacccgggaggcggaggttkcagtgagccgagatcgtgccactgcactccagcttggtgacagagtgagactctgactcaaaaaaaaaaaaattaagtgctaccttccctggccaggccacactgtgcctctctgccattgcacatccttggtctgtgaccctcccctcaaacagtcaccttctccctaaagttgccaccggctttaggaatcacctgctgttcccttccctgtgcaaccacagcaccyctacatccacctgaccaatccattgagcttctccccatcagggaccatggcttatccactcacaggctggagcagcagccctcagctccttcctgaataaacgaccacacaaagtcaaacaccctaaaagttcatctctaagtgtatactgaattccccacctctgggcgtcttttgttaaataaccctccccagcttccccctactccacctggaaaaatcccacccctggtcggaggctgccctcccaccatccacttggtgaagttttctttcacctcactcagttccccattgccccttttgccctcaaaaaccaaacaaaactggagctgtgttctccctcctcagtgccttagagaaatgttagcctctcttgtgtgattctaagtcratgctgccctgcagggtctttatgagtgttccgctgctgtctcwcctacaaacrtgtctgtaagcaccttcagggaggggactctgtggcctggggaaggccgactaggtgaggcagagaattaaaacacaggaacacacaactgctgggacagaggccatctggcaggcacccrtcrttcctgtgaggagaactcaaatctcagaagctcatgcatttcgtagcagagtcaggagctacacatgaaaaacacacctgtgctccctcaactggggatcgtctcactaggctgcacctcctgagagctaaagtgcgtctcaaaagccccactgttccccctgtgttcctataataggagcaaagagaggctgatgtctctttggaggtgcaaactcattttgacaaagaatagcaaggcagttaaacagggaaatatcgtactttttttttttttttttgaggtggagtcttgctctgttgcccaggctggagtgcagtggcacaatcatggctcgctgcaacctccgcctcccaggttcaggcaattctcctgcctcagcctcccaagtagctgggactacaggcgcgtgccaccatgcccggctaatttatgtatttttagtagagacagggtttcaccatgttggccaggatggtctcgatctcttaacctcatgatccgcccrccttggcctcccaaagtgctgggattacaggygtgagccactgcgcccagccggaaacatcatactttctatggcacactagacactcagtaaatccagatgggattgcaatgcatggaagcagctccctggagaaagtcggatttccctggaaaccacactggtattggccccaggaggtcactgactgctggggcagcactcacccagttgcacatcatggtggcagagccccgcctgtccagacctgacttcccagcttctgaggctgaaggagaacagatgaggcttgctctggcgtcgttcggtgaaaccactgttcctctctcgctgctttcccgggtttccttrtgcattttgagctgtgcatctgattctttgggtcaaagcaaggactgaaaaagagcagaacacaagaagagatcacaatgaggcaaggtcccggggctgagagagaaaggggccacccttgctggtgtttctccaccacagtctctttaaaaattgggcatgggccgggcatggtggctcatgcctataatcccaggactttgggaggcggaggtaggcggatcacctgaggtcaggagttcgagaccagcctggccaacatggtgaaaccccgtctctactaaaaatacaaaaattagctggatgtggtggcacacacctgtaatcccagctccccaggaggctaaagtaggagaatcgcttgaacttgggaggcggaggttgcagtgagctgagatcgcgccactgcactccagcctggccaacataagcgagactctgtctccaaaaaaaaaaaaaaaaaaaaaaaactgagcatagtgtgaccatgacagcttgaggtttaaaaccaagaggcacattatgctatggaaggaacatcacgtggtaaaatcctgaaagaccagattcagaacattgctctcagctcactaactaggagactttaagtaagacctttggcctttctaagcccaatcatcaccccctataggagagggataactgtgcctagctcaggggggttcttatcaataaaagacataacgtctgcaaaactcctaacacatatcagtattcctgaggcgaacactctgctgcacgtgtgagtttgcgttttacttcttcctcctaaggtaaaactgaaattttttaccaacatcgccaagctttgaagccttaatttgcaccacagctgtctcctgtccttccaaattttctttttgtttgtcctgccaaaacgaagttgtttacaaagatatgtggttcagagacgtttctggttgctttgacgccgccttgtgggcaagtctcggaaattgcatgtgtccctggcccagcaaattgagcaaagattktattaggtgcatcttatatttccttatcattctccctgggtctaccttcagatgattccttaaggcaaagcctattttttctaaattataaagtaaactttagcatgtaaatatcgaggtaagagtagtgggtagcatttttatattggaaatcagtaacattgcaaaattctgtttgcaacwttattttcagaaacggggacaagtgcatcatcaaagcagatatttatcataacatttatagttgtcccataagacaaatcatcttgactttgctacttttcactggatctcacaagaagcttataagaagcgggccagatatgattcccgtttttcacaaacragaagggtgaaagggtcctcccaaaactacacaataagggattaagccagaagtagagcctgtgacgttttacatggccagaaaaactcttgtgctgctgttgatattgttcttctgtttgtttagcaagtctgccttagagaracttcacagcacccctgggcctcacttagcactgatctgtctcccaggagtgggccccggggtggtggagggtcagggatggggttgccgtgcacatcagtctgctccatctaaaaaagctcaccgacatcaaaacatgtggctttcctagaaaatactggaatgtctggaatttttttttttttttttttttttttttttttgacagagtcttgctctgtcacctaggctggagtgcagaggcgcgatcttggctcactacagcctccacctcccgggttcaagcgattctcctgcctcagcctcccgagtagctgggattacaggcgtgcgccaccacacccagctaatttctgtgtttttagtagagacggggtttcgccatgttggccaggctggtctcaaactcctgacctcgggtgatccacccgcctcagcctcccaaagggctgggagaatggctggaattgtggtgtcattttcttttcaaggccatcagtgctgcaattctgccattcattccaaaggcccattagagaaggaagagaaaaattccatgtcatacgagtagcgccaacaaaaaaataccttctgcgtgcgtgtgtgtgtgtgtgtatttatgtgtgtctgttcacagatgcacccagctaagcccaaacacattacaaggtagwacagatgttcatccccaagagagtctgactgtcttgcttttaagtttagtgcctcaatcctattattccttctccattttgttttggctaataaagcaacttgcccgcaactcatccttggagcagcagtcatgaattaacgaagattttttttccctcttttccattaaaaaaaattttatgtgccactaytatgtcctagggttttgtttttaattgtgggaaaatacacgtaacatgaaatttaccatctgaactatttttgtgtacagttcagtaatgttaaaaatagtgccaggtgcggttaatcccagcactttggaggccgaggtgggtggatcacttgaggtcaggagatcaagaccagcctgatcaacatgtgaaaccctgtctctaccaaaaatacaaaaattatctgggcatggtggtatgcacctgtaatcccagctactcgggaggctgaggcaggagaattacttgaacccaggaggcagaggttgcagtgagccgagattgtgccactgcactccagcctgggtgacagagcgagactccatttcaaaaataaatagataaataaaataaagtgtattgtatagttgtgcaatcaatctccagaaggttttcatcttgaaaaaccaaaactctgtccccattaaataccagctccctattccccctccccacagctcctggcagccactattccacttcctktctctagaatttaactattaggytggtgcagaagtagttacggtttttgtcactgaaagtaagggcaaaaacttctgttaatacttaaggtaccttatgtaagtggaatcattcagtatttgtctttccctgcctggcttacttcacttagcataatgttatcaaggttcactcacgtagcatgtgacaggtttcccttcaccttgaaggctgaataatattcctctgtgtggakgtaccacattttcttcaacgccttccctatccctcctccctaccctctgcccagaccctggcgactgccactctcagcttctatgagttcaacgtgtttacgtttcacatataaatgagatcttgcagcatttgtttttctgtgcctggcttgcttcactcaacatcatgttttccaggttcatccatgttgttgcaagtagagattttctcctttttcagggctgatactcccctgtgtatatatagcacagtttctgtatccatttatccactgatggacacttrgagtccatatcttggctattgtgaatgaagctgcaatgagcaagcaagtgcagctgtctcctctacatactggttttatttccgttggtaatttacccaccggcacattttccttatttctttcatccatggatgggtcctaccatgtaccatctcagagaagcttaggcacagtttgttgggatgtcagacgctgagcagaatggcgcgtgccctctaccttccaatgtccaaaaaggaattcattgaaagatcaacatacaaagccttttttgccagaagagtgggttggtgaaaggataggaatctttcaaaatgttaggtaggcttccagactttaaatcctcctccctaacagatagactcagaccccgctatcgagctgtaggtagctcttagagatctttcatttctagatttgagtgctttggggttttttttgtttttgagwtggagtttctctcttgttgcccaagctggagtgcattggcatgatcttggctcactgcaaccactgcctcccaggttcaagcgattctcctgcctcagcttccrgagtagctaggattacaagcacccaccaccacacctggttaatttttgtagttttagtagagatagggtttcaccacgttggccaggctggtctcaaactcccgacctcaggtgatccactagcctcggcctcccaaagtgctggaattacaggagtgagccactgcacccggcctagatttgagcactttgctatcctaggttctctttcctggcacaggacacaatttgattctgcatgtcagtgattagagttgtgccccctgaactgaacagccatagatagcaaggctttaaggaagggaactgtccagatgacctctttggatgcctgattactacagagtttatgcaaagactcaggacagtacaagtcagcaaagcacgtaggcttggtttccaggctcacaccagagccactgaagaacttagacacataccagctttcttaggtccaatatctgccacctaagttcccatgtcactgatgggaaaataaaaactaatggcatagtttcattgtttctttataagcagaggaaaagtacaaattgaaactgaaaagtgtttactcagactcaaactcaaaaatttcagcattgtttagacactgctctccagtcattggcttcccaagagatgggtttcagggtgatctttcttgcacaccatcatcctcgaccatttactgagtggccttgagacgctcaggaagagttgtcactcctcagcctcattcctgttaatttcctgtctgccttttggttgtgcagatcttgctgggtcagaaatacaaccactctgtggactggtggtccttyggggttctcctttatgaaatgctgattggtcagtcgcctttccacgggcaggatgaggaggagctcttccactccatccgcatggacaatcccttttacccacggtggctggagaaggaagcaaaggaccttctggtgaaggtaagaagcgaagccaagagcgtcttcataagacgagcattaggtcttctggtcagttttctgttcctcttagtttccaacttgcatgtggcaaacaatgattattattgaactgggtttaaatgggatgtgcaccgtctgtgttttaatagaggcaccaatattatgagcattaaatgtcaaaatgagtgtaagagaaaccctcatgtgcatcagttataacataacggcccaggaaccagttccatgaccttgaatacgctcacctggagatgtagttggttcattaaacaagcacagtgtgtggcttaaaaatcaatcttctagctacttgggaggttgaggcaggaggattgaagttggaagtgtgaggtcagcctgggcaatgtatcgagacccctgtctccaaaacaataaagggaaaaaaaaaagaaacaaaatgggcatttaggctgggygcagtagctcacacctgtaatcccagcactttgggaggccaaggtgagcggatcacctgaggtcaggagtttgagaccagcctgaccaacatggagaaacacggtctctactgaaaatacaaaattagccaggcatagtggcacacgcctgtgatcccagctactcagaaggctgaggcaggagaaaatgggcatttatgttatatagagggtttttttttattttactcagtcttttgtttcccatagttttttattagaaatattcagtccagttcatcttcccctgcctctggttgaaatcttggacaggatgtatgactttttggcctgctcttagataaaagacaacctattgtcactcttatgttatgaaacactgtctcagtggggaaattaaaaccatccagtctgggatattattcatcacataacttttttcttttttgagacagtctcactccctcacccaggctgcagtgcagtggcatgatcttggctcactgcaacctccacctcccaggttaaagcgattctcctgcctcagcctcctgagtagctgggatcacaggtgcaygaccacactcasctaaatttttgtatttttagtagaggtggagtttcaccatgttggccaagctggtcttgaactcctgacctcaagggatctgcccgcctcggcctcccaaagtgctgggactacagatgtgagccaccatgcccagcctcatcacataaattttaattttaaagctgggactcctgcttcctttcctctgctcagagctcgtgattggcagctgctcactactggaggagacagtgttgtcatgctcttgctggctgtgttcttgttctcttccattctaactcctgagtttctgcttcagaccttaccaggtagaagctgagagaggaaagaggatgagcagaaaaaaacagttcttattcggctggcagcctcctacccctgaactggaggatggctaaagctgagacttcaatgaggcactctactaggttctgcagaaatacttatccttgcagatgtgtttggctgaaacccttgagatacaggcattcagtccagtccctggcctatatactgtaccaacgstgattctgcaagactctctcactgttggtttcctgcccagcagattgtcytgggcagtgtactagtctgttctcatgctgctgtaaggacatacctaatactgggtaatttataaaggaaagaggtttaactgactcacagttctgcatggctggggaggcctcaggaaacttgcaatcatggcagaaggcacctcttcacagggcagcaggagagagaatgagagccaagcgggaagggggaagccccttatgaaactatactctcactatcataagaacagcatggggggaaaccgcccccatgattcaatcacctcccatcragtccctcccgtgacacatggggattataggattataattcaagatgagattctgggtggggacacaaagccaaaccatatcagccagtacagttgacctttgaacagctcagcagttagaggagccaacctcctatgcaatgacaaatctgcatatagcttttgagtcccccaaaacgaccaccaataacctactgttgaccagaagccttaccaataacacaaagtcaattaacacatgtgttatatgttatatgtatgatatactgtattcttacaatctaagaagctacagaagaaaattctattaagaaaattataggaaaatgtgtttactgttcattaagtggaagtagatcatcataaagatcttcatccttgtcttcatgttgagagggctgaggaagagggggagttggtcttgctgtcttaggagtggcagaggcaaaagaggtggaggaggtggaagggaggcaggagaggcaggcacacttggtgtaaatttgattgaaaaaatctacatattagtggactggtgcagttcaaatcyaggttcatcaagggtcaattgcacttaaaatacctacagaccagctctccccaacctgccctacccactgtccaccagaaatattgttgacttcttcactctaacaaactctgagagtacaggctattaccatcttagcagcaatctccagaattcaccatcaaaacggaattcagcgccctatccgtggtagcccaggatccatcgagaatacaggcacagtattacaggtggaaactgggctctgagaatcacaaggtgtgagccaggagctcccaaggcaaacccacgtggagacagaggaacacctgagagccatcaagaaagatctggactctagacagactcagagttggccttttttgaggatgcgaaatattctccacagtgtatgggcgtagcaagttgtagaatgaaatgaatcatgtcaatacaacatgctaaatacatagaagaataataaggacctacatatactgagctgtcccagcaaatatttgggtcaaagagacccatcactgtaatcaagagcctagcacatctaggctgggtgtggtggctcatgcctggaaccctcgccctttgaaaggctaaggtgggaggattgcttgagcagcccgaaattcaagaccagcctgggcaacatagcaagaccccatctctacaaaaaatctaaaaattagccaggtagggtggctggcgcctatggtctcagctactcaggaggctgagatgggaggatcacttgagcccacaaggtggaggttacaatgagccatgatcacaccactgcactccagcctaggtgacagagcaagaccctgtcccccccgcaaaaaaaaaagagtctagcacatctaaaggaagtggaccaagaatgcaggtgttttggaagaaacattgttttgatttctggcatttcatatgtcagctggttaaaaaataatcatcatttagagaaataatttttagccttgttcgtgctatattgaaaatgggaataggataagatccttcaacattggaagctatccatgggttctaaattaaaaactagaaaaatattagcaggctcatcttttttcactaatctacttttttgcttttgaagaagtacttagaattaaatgtaaagggaatacacttccacctctctaataaaagtgacaacttgtcttgggcattagaaacttggaggcaactccagggctctccctggaaaatcaagatcttgaatmtgagaagtgctgacaaagccctcacaggatccccagcccaggggtaaaggaacaagatgtttaaaaatttgagccacttccattcagctttcactttctgactatgatccaaacaagcaatarcttagaaaactccctcaacaatcaattaaaggcacttttaatgaccaaacacagataaaatgaaaactaatctcaaaattaaccaatttttttaaaaaggctgacaacagtaaaaataagttagtgggagccgggcacggtggctcacgcctgtaatcccagcactttgggaggccgagatgggcgrgtcatgaggtcaggagatccagaccatcctggcttacacggtgaaaccccatctctactaaaaatacaaaaaaaattagccaggtgttgtggcgggcgcctgtggtcccagctacttgggaggctgaggcaggaaaatggtgtgaacccgggaggcggagcttgtagtgaaccgagatcacaccactgcactccagcctgggcgacagagcaagactccatctcaaaaaaataaaaaataaaaaaaataataagttagtgggatctggatataaagttttttattttatataaaggcaggttcaaacactattacaattgctacatttgtagcaataaatgtagcaatcgtaataatgaactcagtgtgaaatgtgtcagcttgggctccataacaagatatcacagactgagtgggttaaacaacagacatttctttctcacagttttagaggcagaaagtccaagattaaggtccagcagtgtcagttcctgatgaggactctcttcctggctkgtagacagctgccttcttgttgtgtccttacagcagagagagagagagataaactctggtctctctttcatgtgagacttctagccctattggatcaagaccttaccccatgacctcatttaacccgaattatctccataaagcccttacctacagttacattgtgggttagggcatcaacatrtgtattttgagaggacgccattcagtccaaagcatgaggctgcactgcaaagcctgggccagcaaaacccactggaaaaaagtgagcacaaggcttagtctgtacaacctgaggcgtgagagcacctccagactcaggggctgtctccaagtgagtcccaaggtggaggctctggagggagagtcacaatcccccaacacccctcatggcccataaatgccagcttccccctgtgcttcacaaacccagcctaccttgaggatatgcaatacttcaggccaggacggagagtgaaggagggacagaggtaaccagaagtaattccgtggagagaagttggaagtgatgatttccaaggagagaaagattggatgggaagaaagggttccttccagttggaggagaaaaggtgaaaagccgtgtgctggaatcctactcagcaatgaaaaggaacaaactattgatctataaaacaacccaaggcattatgctgagtgcaaaaagccaatctcaaaagatcacatactctctgagtccattgatataacttcattaaagtggcaacaccatagaaatggaagtcagattagtggttgcctggggttggggtgctggggacaggagggtgggcgtgactctcaggatgcagcacaggtagatctttgcagttatggaacagtttgtatcttgcttggcgtggaggttgcccatatctgcacatgtgataaaatggcataagtagtatatacacacacggtaccaggccagctcctaatcttatgctatcattacgtgggatggaaccgttgggagaaatagggtgaagagcacccaggacatctctgtactgtcttatcaacatcctgtgaatctataattatttaaaaacaaaactaaatctaaggctaaatgccttgcaaacacccaaataaaaagtcatctgcagagtttcagtggcaagagaaagagttgccacaagagaagaaaataaatttggttgaatagagcagaaactaagataataaagtttaaagaagcaaacaagaggactggtgggtgaaagaggttcttttcttttttaagacagagtgtcgctctgtcacccaggctggagtgcagtggtgcagtctcagctcactgcagcctatgcttcccaggctcaagcaattctccagcctcagtcttccatgaagctgggactacaggtgcatgccaccaatgcccagctgatttttgtattttttgtagagacrggttttgccatgttccccaggcaggtctcaaattctggagctcaaagcaatctgcccgcctcagcctcccaatgtgctgggattacaggcatgagccaccattctcagtaaaaagaagttctaaatgaagcttgcccaacccacgccctgcatacagcccaggatggctttgaatgcagcccaacacaaattcctaaactttatgacattacgacattttttgtgatttttgttttagttcatcagctattgttagtgttagtgtattttaggtgtggcccaagacaatccttcttccaatgcggcccaaggaagccaaaagattggacactgctgttcaaagttgacatagaagagtttggacttgttatttcccatgtgagttagtaaaacttccatgaactttctcttacacatattcttgcagttgggctgataaaattaatttccattatgcaatctgctgcccataaactggcttgcagctttatctctattcctcctttgctttgatccaacagcccccacattcttgagccccatttgttgcaaaaataaaaggtaatgccctttctcagaaacgtcttctagggaatttgacaaaatgttatgaaacccagaagtcataggtcctcyggaaaagctgaggatagcagcatttcatggcatctgtgacagcagcagtgccagacccgttgccattggcccacctagggcatggatgcatgtcgtgcactgaacaattgcccactgggagaggctgtgctctggcaagaattccagtggggacactgctgtccagttgatgattgccaaagaaacaccctttactccccgtctctactaaaagtacaaaaaattagccaggtgtggtggtgggcgcctgtagtcccagctactcgggaggctgaggcaagagaatggcatgaacgcgggaggcggagcttgcagtgagccgagatcgcgccactgcactccagcctgggtgacagagcaagactccatctcaaaaaaaagaaaaaaaacactctttacttcctcatttatccatccaggatgtcctgtctatttgtttgaaaatgatgggaaactaatgatatagaacataaatatctcttcctttcatagaaagacatatctgaggagggactgaagagggaaggcaggytccaggtacaatctgtcagcactactgctggctgtcctctgcagcctggagctgctttcttgcacagactgtccaataaacttaaacaaacttcaactacatcctggctattttttcccatcaatgtaaacctccgtcctgacagcttttacagacaaaatcaagtcttcaggtattttatttcctcagtgcagctttccaggggcggagcttccagcctggccccactcccatgaggtcacctgtcatcctcaggacctcagtgggttgagtcgctgcaaggcagaacatatactaatttaccgttctgtgcaaaactggaaagaatattgacgctcagagctggagaccatatgctcttctcattacacatttwattttttaaaatatatttttaaattttgcaggtacacatccaagctaagaaagcccattgacatgatcctcttggtacaaataccacatgttcactggaagaaatagaatagaaaacccagcctgcagcacacacggcccagggcagttacttccagcctactttgctgaagcatctcattagaacaacatgagcgaggttttggccccttcctgagacacttacgccatctatctaatctcgtttcatccaaatgtccttaagaagcagagaccaatcatttatcatttagtatcattgtttcaggagaagggatatagggcaagtcacttattccttttgcttccttttttttttttttttttttaaggagtcttgctctgttgcccaggctggagtgcagtggtggtgcratctcggctcactgcaacctccacctcccaggttcaaatgattctcctgcctcagcctcccgcatagctggggttacaggygtccaccaccacacccggctaatttttgtatttttagtagagatggggtttcactatgttggctaggctggtctcaaactcctgacctcaggtgatccacccacctcagcctcccaaagtgacgggattacaggcatgagccaccgtgcccagcccctctttgcttckaaaacatcaatcagctccatgtgatgactcctgctgttttatggtttgtataaatgtatggggtgcaggtgtcatttcgttacctatgtggattgcacagtggtgatgaagggcttttagtacccactccattttctgagtctacagaaaaatatatcttaccgtgaacttggtgcttcttttctatgctgaaaacaggcaaccgagataaaatgaggatagaagatgcgtgatctgcagataaacaaaatggaaagacagcttattcacttactctgcaggcatctactgagcatctatgttgtgcacggcactatgctagcttctgtaaggaatagatatgtcaatggtgcccggcctccagagcttacagtgtggtaggaaagaagacaaccttggaaraaagatacaatgtgctaattctccagtggagcgaagatgttgtgtggtacacagatgagagattatccatcaggatgagggggaaggaggccrcttgtcatcaaagtgctagatcctctgaagctcggcttcctcagcygacaactgggatgatgaatttgtttctcttagaatttgtttgaaaatcactgaggcatctagcacagtgcctgcctctcaaagaacattggttggagtggatgwtgtatcagtcgtaagaatcatgagtgatgtgaatgatgtatgatagggtgatcaatcctgaatatgacttgaacagaagagagagagctccctgtcaggggaggtaatcaaagaaagtttcacaaggaaaagggggtgaaagctgagccctgaaagataaggcagaatttaaagatgaggggagggaagcaggagtcgactaggggagggtrtctcatggcaagatggaaatgtcattagtgagggacagagacaggaaggcaggtggtgttttcggtgagcagaaatgtctggactggagagggtcctaatgggaaatggwaggtcctgtgagtcagcgtcagactccagagagccttgaatgccagccgaggrcccgaggatgtcagaactctccaagccctagagatcaccttgtctagcccttcctttacacacgaggaaactgagactcagaaaacttatccaaggcgacgtgggtagtcagtctctcggatagctgtcgtgttatttccaccgygcagtggctttctaattgggtactttggaaccccaagtttccctagagagtcctcagcagtccccatatggtaagggggagagaggaagttgagactgctaagaatttgccaatcagatacaccgggtgattgcacaaacatttcaccyggaactttaaaagattctcctactttttttwaaaaaagcgaaaaaacttcactttacaatagcatgttgtttggtctttatatttttttggtagaacggagcctttgaagattttcaagtactcagataacacaagtgaagcactatttcagaacatgcaggctggctatgtttatgagcagtaaaaacaagagactcgcaatttaggtgtgaatggaggtcaagtccctgggaaagcctcctggaaaatcacgcgttccaccatgttttctgttttaaagaaccttaggctccttaaaatgccctataactcatggttacttcataaataaacatctagctgatgtaagaataacyggtaactactccagacacccaggggacctgttacttttctaagttaatgtttagactctcctgtttcttaatgcccttgacaggttttatttaagtttgaaaaatatccaagtttctttcctgtcttgccagtgttcattttaacttcttaggcagaaagaacaggagaaggaacagtgcagagaggaatgtacatatgtatgtatgtgccagctcagaaattattagatggaccttgaattaaatattgctcctccagcaggtttgcaggagctgagggtaattctcttcactcagatgccttgtagagtccaaagctgactgtctgggactagtttctattatacctgagtccccacaatgctggaatcattctaagaatgcagctttgtaagaaatcagactggagtgatggataattgatcaaatgacaaattatcactgactctatgctgttgggtgtaacagaccaggagttatactgcacaaatgcgtgcgtgtgtgtgcatgtgttcctgtacgtgtgtgtatgcgtgtgtatgcctgtccgtgtgcgtgtgctcacatttgtgttttagtgggtgtgcaggtgtatgtgttcatgtccatgtgcatgtgtatgcatgtgttcatgtgtatgtatgtctgcacgtgctcacatttatgtgcatgtgtgccagtgtgtgtttatgtccatgtgtgtatgccgtcacatgtgcctgtctgtgtgcacgtgtgtgcctgtctatgtgcgtgtttgtgtgtgtattgctgtcttataaatcgtcacatcagccctgttaggagggcmcttggcttactttacaggtgaggaaactgactcaggtttgtcagttgcctaaggtccaattaataacacagggcaaagccggtttcaaatcaggtctatgcacctcagaagataacgygtcagactccagcaaatttagaaaggcttcttcaagggagagtgccaggacaggttgactttagtcagtcctgatgaaggtgagtagaaaaatgaggttagaaaagaaggggctggtgcaccaggaagcaccacgmcctcctgatgcaaaagggtcatccctggagacctcagggctcctgctctgctccctttcagctcttcgtgmgagaacctgagaagaggctgggcgtgaggggagacatccgccagcaccctttgtttcgggagatcaactgggaggaacttgaacggaaggagattgacccaccgttccggccgaaagtggtaaggactcgctcatgggccgcttggtgtcagccactctccctccgctcagggccgtctgcctgtccaagtcaccgcagctgctcacccctgccggtgccccaactccccaccagccccactctccaggaggaatgcacgtctctaacacatgttactgggctggtggggcagggaggggaggtcactcttgtttgcaaaatttaatctctgtcgtcaagatgcgcctgcatgaagaatggattgctgtgtgtccacgccttaggttgaatatgaatttgtgagggtgactattaaacaagatgggggttgtgcacatgacacatacgtacttaatggtccagtctgggtaacccaaacttggacataaaccctgcatcctacgtcaggaattttggagctgttttttccatgatgtttattaaagtatctgtaaagtgctcatataacgacatttcctaagggtaattgttaggtgttctttggtttaagggagaaactaactaaatccgtgctttaaaaaakataggtctgtacatttccatttatgtcctcactggcaaaagtcattaagctacatcagcaaaggcagaatgacctggctcacctgcgagacgggccaccataaagtgaagtcaaaaataaagcaaggttgggctgggcatggtggctcacgcctgtaatcccagcactttggaaagccgaggcgggtggatcacctgaggtcaggagttcgagrtcagcctggccaacatggtgaaaccttgtctctactaaaaatacaaaaattagctgggcatggttgcgggcrcctataatcctggctactcgggaggctgaggtgggaggattgcctgagcccagaagtttgagactagcctaggcaacatagtgaaaccccatctctacaaaattaagtgggcttggtggtgcatgcctgtagttcaaactcctcggtaggccaagacaggaggattacttgagcccaagaggatgcagtgagctgggttcacaccactgcactccagcctggtgacagagcgagagactgtctccaaaaataaaactttttagaaaaacaacaaaaaaaagtcattaagaaagtaaattttaagttatgtatatcacaatttctaaaaataatgatttttaaaagagtagagcaaagttgtgggtttgccagccttaaccattccctgtgattgcctggatagacatgggccatatccgygctgaagggggccaggctcatggacttcccaacagattccaccccagagaacgcacaggctattagtcatgatagcgaatggccagaagaagcaggtgcatctcattcccagggcaagaatagttgttctcaacatctgtcccaagctccagtgatgttccaaggacccaacaggccagcctcaagcactctaattayttgtgacagaaccacatctaatacrtgggttagtcatttgtgataaaataaaaattttaccttgtttttagctatcagaactattaaaccatgtctcaccttccactgcagattaaaattgacttaatattttgcacataaaaatcaaaactttgatctaagcttaccctaaaggacattcccagttctgccagtaggaaactttccctgacctgtggtctgagctgccattgacctcacagccccagggccccttggagggtgggaggggcctggttcttcatttcgcttctctgtgttcatagcactttctgttgataatggttgttctcaatcttgggacactgaattgaacaccatactgaacagcatgtatgaaatagatgtttgctttccctttctctgttgtttggtttggttttggtttttttgccatgaaaaccaatggaccaagtggtctgaaaggagtctgtcccagtctgtgctgtctaaaaaagcccaagatacttactaataaaattaacaagggcaggggactgacaacagccaagaacgttgataaaagaacaggaatatgtaattgtgaaattccttctctcttcccatccctccgctcacaccccctcactccctctccccaccaccctcccttatccccaccttgtgttccatgaaaactgaagaggcagaggtcaaattcaggtggatcactttttcaaaggttgccaaccctgcttcatgtaaaccattagaaacattagatcccatttgaatgtctacagtcgtagtctttctgtgaatttatgaatttatattattattaagctgaggacacaggatcacagccatgttcaatgagagctgggcatggtcatctgtaggcattgcctccatttagtgtctctgcaaacaccaactttgccatacgcagatcacggcctagataacaaaagtgaagatcatgaacttaatggctratttttcttctctttctttcttcccttaaactctgactaagaaatcaccatttgactgcagcaatttcgacaaagaattcttaaacgagaagccccggctgtcatttgccgacagagcactgatcaacagcatggaccagaatatgttcaggaacttttccttcatgaaccccgggatggagcggctgatatcctgaatcttgcccctccagagacaggaaagaatttgccttctccctgggaactggttcaagagacacwgcttgggttcctttttcaacttggaaaaagaaagaaacactcaacaataaakactgagacccgttcgcccccrtgtgacttttatctgtagcagaaaccaagtctacttcactaatgacgatgccgtgtgtctcgtctcctgacatgtctcacagacgctcctgaagttaggtcattactaaccatagttatttacttgaaagatgggtctccgcacttggaaaggtttcaagacttgatactgcaataaattatggctcttcacctgggcgccaactgctgatcaaygaaatgcttgttgaatcaggggcaaacggagtacagacgtctcaagactgaaacggccccrttgcctggtctagtagcggatctcactcagccgcagacaagtaatcactaacccgttttattctattcctatctgtggatgtrtaaatggctggggggccagccctggataggtttttatgggaattctttacaataaacatagcttgtaacttgagatctacaaatccattcatcctgattgggcatgaaatccatggtcaagaggacaagtggaaagtgagagggaaggtttgctagacaccttcgcttgttatcttgtcaagatagaaaagatagtatcatttcacccttgccagtaaaaacctttccatccacccattctcagcagactccagtattggcacagtcactcactgccattctcacactataacaagaaaagaaatgaagtgcataagtctcctgggaaaagaaccttaaccccttctcrtgccatgactggtgatttcatgactcataagcccctccgtaggcatcattcaagatcaatggcccatgcatgctgtttgcagcagtcaattgagttgaattagaattccaaccatacattttaaaggtatttgtgctgtgtgtatattttgataaaatgttgtgacttmatggcaaacaggtggatgtgtaaaaatggaataaaaaaaaaaaaagagtcctcttaatcgtttacttccccgcttgccccccacaagaacttgcttctgctgtgtcagtcctcaaaatgtagctagcattgagatgatgttttacagttgggggattggctgggcacgatggctcacgcctgtaatcccagcactttgggaggccaatgtgggcagatcacctaaggtcaggagttcgagaccagcctggccaatatggtgaaaccctgtctctactaaaaatacaaaaattagccaggcgtggtggcgggggcctataatcccagctacctgggaggctgaggcaggagtagagtaagacaaagggtgaggaagtcagatgacattaaggcaattgtaagaaaagcaagtctgcataatattyggagtcactagcctacctcatcacatggctggaaataactttagatattatatttaaaatagaataattaatataagcagactgttgacagtctgcaggtgtgctggaacattttcctgactatacggagctcttgtgattttttttaaatagacactcccctaaaatgaacacgagtaacctcatttaaggatgggcatctatcttcagatgtgtccattcaggtgtccgggccctttgttctgaaaatagcaccatgactacaaacctctagttatgtgagaaggcgacacttgtcctccccttgctccaaatgaaaatgctcacacatgtttaccaaattcacctgcttgaaggagggagagggtcctttaaggccctggatgggccagtggagggcagggagccgcccgttctgttctgatctctgctctgctttgcatttgctgtgaagccctgaacaagtcatttcatcttttggggcctccaagtaatggaggtgaagatgctgtctaaagtcccgtctcactagagtgatggggtcggtgaagacgctatctaaagtcccttctcactagagcaatggggttggtgaagacgctatctaaagtcctcactagagcgctttctggttctaaatctgaatcaaaatcctgcaaagttaaaaggtcagtgagcaacactttccaaaacacagacactcgtggattccactcgctgcaggcctgggggcagctctaccccattttccttccagtcgtcctctcctcactctgggttcccacatacccctgccccagcacccagcatcctcctgacacccagagaccccaacaggacccctaccaggagacaaataagtgaagactgttggctcttagaaacaggaaccaacgcaacttttatcccctccactagaccaaaataaggtctattcatcatttggttttgtttgttttattttttatttttttgaattagagacagagtctccctatgtttcctaggctggtcttgaactcctggactcaaatgatccccctgcctcactctaccaaagtgctgggattacaggcctcatcatttgtttttaataaatgtcatctgtatgaatatgtcaggtgactaacaagcttactatttgcttcgtatttctgagtgtgcgaagtacttgttacttccttctattctttcaggtgtcctctgaaattgcttattaatatccctatttaataggtgagagacctggccaggtgcggtggttcacgcctgtaatcccagcactttgggagacccaggcaggcagatcatgaggtcaggagtttgagaccagcctgaccaacatggtgaaaccccgtctactaaaaatacaaaaaattagctgagcatggtggcacgcgtctgtaatcccagctactcaggaggctgaggcaggagaatcgcttgaactcgggaggcggaggtcgcagtgagctgagatcgcgctactgcactccagcctgggcgacagagcaagactctgtttcaaaaaaaaaaaaaaaaatagaggagagacctgaggcccagggagaccataaagcttacactagagggttgaccagtggagacttgaacccagaactcttagcatcagatcttgcttcattccagagtgcagggtttcagcgacatccaccaatcagcatctgatgattgttcactaaagttttaagtggacttcctaattcagggccacacctggcttacctgtcccccttctaggggacgcagtgcgggggccagtctcttcgatgccggtcctctcatcaccactcccagttcccctccactttgcactttagcctagactcaaccttgccaatagaaatgagaactttacctcagggtatagttaaaggttttggaaaaagagagatcagtgcttctttttggaagatacagactgagagtttggctgagagctccctgtgcacgagaggctggccacagagagagcattgaccaggattttctcagatcccgtccagcaagaccatgcttaggagagaggaagaagtcgtaaatcagccagagaagaagaaatgcctttgttacatcataaaactgcaggcaggggtctgagctctcagagcctctgtctccaatggacccatcaatgatggccaacagaggaagcatcagccttaaacacccacagaccgggaacatcccagaacccactcacaacaatgcaaaccaaggaagacttctcctgccacctctctcctttctctgtcctttcccaacttcggggaagaaggagcagaaaccatggtcatcggactgcggaaggagaggactgagcatgggcgggtgagaagtatgaagacgctgaccacgtgccttccccaccacaagccaccagcactgccctctcgagctagatgagaggacagggtcaactttaaatcggttttcaattattcatggcattgcacatgtaagttacagaaatgaatcttgagggagcaactgaaggacatgtctaatgtcaccggaaaggtcatgggacctctgagatttcagccaaagtttggaagaatgagccccacagagcaggtctgaatggatggtgggcgcaaataataaaggtgttggtttggtttggttttgccccgagaattttgcttgtttacacacagacaagccctagagtgacagtgatgttgctcttggtgccacagctacacaggagatttcttgcacgtagggaccacgctctttaccaccgagcctaccaccctggcagacactcctccatcacgtgcatttgttgagtgagtgggtgaataggatgtgggtgagcacgtctctacaatcctctgtctgtgtggggcctggcacacgagaatgcctggtggaaattacttcgtcctacaggcactacaggattaactggacttaggtatcaggtcctctctcctgaagaattttagacagaggcaaaaaccagatggccaagagaagaggcatttggtaaagaccacaaggcagccaaagggatgggcagcagaagccaggaggtagggtcggtcacagtagcagagacacagggtcgtcctgccaccgcagtgtgggtgactcaaggagggctaagactagcaacttccagtaagttgctctcacttcccggagttactgaggggtccccaaggtgctgggagtcttgcaggcagccctccagtcagtcctgtgttattcctctctctgactcagggaaccatcctgatgggcagcagcccccagccgacggcaggccggggaatgaagccactggctgctctccttccctcaatgccgtctgctcagtctcctggagggtcagtgatgagggaaggagccccaacttccttgtttctccctgcgtcctaaataagtccggaacccaaagagactgagtgtgtccctggggcatgcgtgtgcctgtgtgtgtatatcagagcaagacaccacactgccgtgagcaccaggctggctgactcattgttccctacatgcctgatgtctgctcctgctctagggcttttactcattctctcctaccaggctgaaagggccaacacatctcataaacaaccccaaagccaacccaccccaggcctggctgcagcatcagcctcctgcctttgctgaccacaccagctgttgctgtccagagatgcctcccacctctatttgtcctctgaaataagcatagtgaagagctgggccaaactcccagagcccagagatatttggaaatggagtaggcgccacccaagtttgtttctgtacagcacccaactcactgtctgagaaggaccctcagaggttggcagcaactcccaccagggggtcatctgagaggcacagtgaccacagtgatcaatgatgtctcaccatgaggacaggaaggaaatgcccagccagggaacatgttttctgcccccagcttctgccttccatgtcgtttcttcactctactgcggatgaagctttgactataaaatatgctgttggaatgcaccaactgccctactcccaggtggcagaaggagagctcagttttccttctggaaaattcttgcaattaccaggtactgggtgaagtgctttgtgtatattacctcatttaacccctgacgacaatctctgaggacagcatcattgtctccattttatcaacaaggacactgaggtttggaaagattacacatctttcccagaatcatagaagaagagctggaactagatcccaagcctgtttgatgacaaagcttgtccctctatcaccataaggggagggacagcaagtgggttatggagtcaggatgcccgggtcacacccagcctcacccccgatgtggtgtataaccttggacaagtcacttaaacactcagcctcagtctcctcctttctaaaatgaggaccaaaaaataaagacaaaaaataaaataaaataaggacaataatagtgctagcctcacaagccatatgagaagtgaataacgccatctatgcaaagcacttggaagagtacctaatgtggaataggcacccactaacatagtattattattttattgctgcatcccaacataaatcatttagagacctctttcataggaaaaataattctatctgattgatcacaaagaaagggggtatcaaacctaaatatgaagaagtaaaaaataaaaacttctgctttatttttcttatacagctataaaagcaagatacaatttgtaaaagttaatacaaagaaaactacaaaagtaataacactgacagaacaagactgattttatggtgatgatgacattacgaggctaaaactaaacgactaccctccatgtcaatgtgtcttaactaccatggtgtggtttcttctgagttcagcacggttagatgagcacacatggtgcagtgactcgatctatgcaccacctttctctactggaactatcaaggaagagccagctgtgcagtgtgtcttgatgtcattcaaccttcatttgtcaaaaatgcttaagtgcatctaggctttttcttatagcacatgacaaattaataccattggtggaaatgaagtcatgaacaaaatgcaccacaaactctgaattctgacaccgtctaacagaactttctgctgtgatggaaatgtaccacatctgcactgcacagtatggtagccactagccacatggagctattgttggcttgaaatgtagctgagatgaagaaactgaatttttctttctttgagacaggcctcactgtgtcacccaggatggagtgtattggcacaaatacagctcactgcagcctccacgtcctgggctcaggtgatcctccaatctcagcctcccaagtagctgggaccacagatgtgcaccaccatgcctgattaattttttgagtttttgtagagacagggtctcactttgttacccaggctggtctcaaattcttgggctcaagggatccttcccccttagccttccaaagtgctgggattacaggcatgagctaccatgcccaggctacaacaattattatcttcagaaacactaaggatgtattacat

SEQ ID NO: 5669 - DNA, 30192 bp, Homo sapiens
tactcctgacctcaggtgatcgcccacctcggcctcccaaagtgctgggattacaggcgtgagccaccgtgcctggcctgtttccagtttttggctattacaaacaaagctgctgtgaataattgtgtgcaggtttttatgtggacatacgttttcatttcttagggataaaatgcccaggagtgcaattgctgggtcatctggtaggtatattttgtttagtttttcaggaaaccggcaaactgttttccagagtagctggaccactttgcatccccaccagtcgtgtgtgaatgtttcaagttcacagcatcctcaccagtgtttggtgttgtcattattggttatttaattttagctgttctaaagcggtatcttgtcatgggtttcaatttgcatttcactaatggctggtgatgtgagacatcttttcatgtgcttatttgccttctatataccttcttcagggaaaggtgtcatcatgtcttttgcctattttctaactggactgttttttatttatttatttatttatttatttatttatttatttatttagagacagagtctcactctgtcgcccaggctggagtgcagtggtgggatctcagctcactgcaacctccgcctcctgggctcaggtgactctcctgcctcagcttcctgagcagctgggattataggcgcacaccaccatgcctgctaatttttgtatttttagtagagatggggttttgccatgttggccaggctggtcttgaactcctgacctcaggtgatccactttgcttcccaaagtgctgggattacaggtgtgagccatcgtgcccagcctgatttttattttatatatatatatatgtacacacacacacacaatatacatacacacacatatatgcacacatatgtgtgttaaagctgtatgtaaagctgttatatattacatatatactacatatataacagctttgctgagatataattcacataccataaaacacacccatgtaaaatgtccaattgaatggttttgggtctattcactgaatkatgcaaccatcaccacaaccagttttagaacatttcatcaccccaaaataatctcacatccattagcagtcactcttcatttcctcttacctttcccaccccaccccagccctacgcaaccgctacatctacttctgtctctacagatttgccttttctgaatatttcacgtgaatggaatcatacaatatgtgacattttgtgattggcttctttcacttaatgttttcaaagttcatccatatccaggcgccgtggctcacgcctgtaatcccagcactttgggaggccaaggcgggtggatcacctgaggtcaggagttcaggaccagtctggccaacatggtaaaaccccgtctctactaacaatatgaataattagctgggcgtggtggcggatgcctgtaatcccagtcactcagaaggttgaggcaggagaatcgcttgaacctgggaggcagaggttgcagtgagccgagatggcaccactgcactccagcctgggcaacaagtgaaactcggtctcgaaaaaaagttcatccatgttgtagtatctatcagtacttcattcctttttattatcaaataatattttattgtttaggtctcccatattttctttattcattcatctcttcatggacatgtgggttgtttctgctttttggctttcatgaataatgctgctgtaaacatttgtgttcaagtttctgggtgaacatgttcttatttctcttggttatatatgtaagagtggagatgcaggagtgtatggtaattctatgcttaatctttggaggaactgttttgagacttttttccagagtggctggacaattttatattcacactagcaatatataaatgatttagtttccatacatctttccagtatttgatactatcttttattttagctgttcttatagatgttagtagtgatatctcatcatggtcttaacctgtctaaaggctagtgatgttgaatatctttttagataattattttctatccatatatccccttgggtgaaatttctctttatatcttttgccagtcttctaattggatgatttgatttttttatgtagtgtttctatgttgaatttgagagttctttatatatttgttctagataggagtcctttgtcagatatgtggtttgcaaatattttctcttagtctgtaatttgtcttttcattctcttaactaggtcttttacagagcaaaaaaaaattaattttgatgaagttggattgatttttttagggatcatgcctttggtgtcatgtctaagaacacttcatcaagctctaagtctcacagattttctcctatgttatcttccagaggttttttgtttttattttattttactttttaattaagacagagtttcgctctgttgcccaggctggagtgcagtggcaggatctcagctcactgcaacctccgcctcccaggttcaagtgatcctcctgccttggcctcctgagtagctgggactacaggcacgcaccacccaactggctaattttttgcatttttatgtggttgctttcgagaattttctctgcctcttgtttttagaagtttgactatgatgtgtcttggcatgaatttctttgggtttatcctgtttgtgatgcgctcagcttcttgaatctgtagacatatgttgtgcgtgtgtgttgtcaaatgaagataatttgcagccattacttcttggaatatttttttaaggcccaccctccttttcctccccttctgggacttcaatgacaaaatgttagatcttcttttattatagttactcatgtccttgaggctttgttccattttctttcatctattttctttccattgttcagaatgggtaatttctattgttatacgttttgtttcactgcttctttcttctatactctccattctgctattgagcccatccattatggtttttatttcagctcttgtattttttagttgtattttttagttctaaagtttccatttggttcttctttatattttctatttctttgctgatactttttattattttatttgtttcaagcacatttataatttctcagtgaaacacttttatgatggctgctccaaaatctttgtcagataattctaacatctgtgtcgtcttgatgtttgtgtctgttaattatcttttgttattcagtttgagaatgcctgattcctagtatgacaagtgatttgccattgaagtcaggatattctgggcactgtgttataagattctggatcttctttaaatattttgttttagtgggcttccctttatactgctccagcgaaataaagtagggcactgcctgattgcttccagacagggataaaagtccaggttctccatccagcctttcctgaacctggggggttgggagagatgaggcctccatgttattgtttggtaagggtagaagttcaggttccccactaggaatccatgacaactccctggctgggagtgggagggatgcttcattactgctccctatgtggctttcactgacactgtgtgtggcagagagaggggggtgcttgttaccactgagtggtggcgaaagtcccaactctccaccaggccccctttgacactactccaatggggccgggtggaatgcctcatttctgcattggggtggcagtggatgtccaggctgcccacatggtttccaccaacaccacatcgggggagggtgatcccagtggggaggaatgtcccagctccaactctagcatcactctggctgagtatgggagtggcctagggttctttgttacagcctggtgaaggtgaatgtctaggttttccatccggcctttgctgacaagggtgatgatggaacttggatggagcggagcaggtatggactaaaagagctctgtctttctaggatgcccctttcctcgttctttggctagaaaagcatagttttgctagaacttgttctgttgggactttttcttgtttgtgccccttggcattttcagttgttggcttctccagtattcagcctgagatatatgaggcaaagagaaatcccagggaattcaccaccattccttaagtcccgaggttcctaaccagtctgcttctctccatctttcagtcttcttatgcttgtcttgtcacgttcaaggttttcagttatacttggcagaataaataaatacatctactccatctttccagaacatcactgctttttgttcattttatttatttattatttactgagacaaggtcttactttgttgcctgggctggagtgcagtggtgctatcatggctgactgaagccttgaactcccaggctcaagcgatcctcctgcctcagcctcccaagtagtttggaccacaggcatgggccaccatgcccagctacttttcattttttgcttttgttgactagccccacagagttttgctgtgttgttcaggttggtctcaaacttctggccttaagcaatcctcttgccttgctctcccaaagcgtattacaggcgtaagtcaccacacccagccctatcggtgcttttggaagaaggtgttcttccctctctctgtttccctccctatggccagctgcccatagagggcagtggtgctggagtgaagacctctcagcgcatccctcttcatctgtaggatgtgcatggcttccaatgctgtctgttctgctcctgagacactcgctggctacaggattataaaggtgatgaggtttcagcctaaagactctccattcaataacacttcctacaagatatcttttttgtttttttgtttttttgagacaggatctggctctgtcacccaggctggagtgccacagcgcgatctgctcactgcaacctcagcctctcgggcttaagtgattctcctgccttagcctcctgagtagctgggaccacaggcgcccgccaccacacccagctaatttttggattttttttttttttttttttagtagagatggggttttaccatgttgcccaagctggtcttgaactcctgagctcaggcaatccacccgccttggccacccaaagcgctaggattacaggcatgagccaccatgcccagtcctacaagatatcttttctttttcttcctttctttctttctttctttttttttttttgagacagagtctcactctgtcacccaggctggactgcagtggtgtgatctcttctcactgcagcctccgcctcctgggctcaagtgattctcctgcctcagccccctgagtagctgggactacaggcgcctgccaaaacacttagctaattttttgtatttttagtagagacggaatttcaccatgttcgccaggctggtctcgaattcctgacctcaagtgatccacccgcctcagcctcccaaagtgttgggattccaggcatgagccaccgcacccggccgagatatctttttcctcctcaatatctatgtgctcctccctcaacccttgggggcttcagtgtaggtggtcagattccccaccatttatgcctatgatgaaaagagtggaaatggtaataactggatggtgtcactaaactacaaatactttcaggtaggcctgtgcctttttcagcgggctgcagttctcctgcttggcttgagtcattcgcatttcctgagagctgggtagagggggagttgtggaggagcccattctgaaactgatctgatattgcaaacccatacacggaaaggaagaactgcccatacgtattcgagtcttccaatctgactccgagcccgcatccccctcaatcgtctcttttccccactccccagatcacggtgctgcttggtccccctcagagccatagagaagcagggggtgtggccatggaggggaaacctctgtcaccagagactttactgtacttctccttttgctctcagatgctgccagggtccctgaagagggaagacacgcggaaacaggtaaaaatcattttgcttttattttgcattcaacaagcaagttattacggaacagcagttatgggccaggcatacctcccagagctgggaacacagtggggacctccctggctctctcttaccggtgttacaacaggttgtagacagacccctgtcttgagcatcctccttgccaggcctgctgagtcttctgagagtagggtaggttattggatgcccaggagggaagaaggagccagggaggtcagccccaaggttctgcaaggccctcaacaggcctggactgaggaggtctggacagcatggccctgtcctgagcctctgtgcataataactgctgtccctaacctccaccccaccctcagccttccaattcccgggcctggggccctactcctgtgctccagagactcctggagctccttgaggcagcacacagtcctgctctggaggcgcccatctcccactcatgctgggatgctccagcccgtcccagagcaggttgtggctggagggtgctggcagaggagggacaatggcccggctcctggaggcaagtgttggctgcagggaacggagtctagtccttgccacagcccttgttaccccttaggtaaccttaaggggatttcaaagaactctggctctgcaaccctgctaagttttttatggaacatgtaaaatagatcccatggccaaagaagtatggacaatgtattatactatactctaatccccatgtctagagattaatggtgtagatagagtttactgaaaggtttttaaagtcctgcagtaaagaatcttacttaagccaggtgcggtggctcacgcctgtcatctcagcactttgggaggccaagttggggggatcacctgaggtcaggagtttgaaaccagcctggccaacatggtgaaaccccatctctactaaaacaaacaaacaaacaaacaaatcagacgggtgtggtggcacatgcctatagtcccagctactcaggaggctgaggcaggagaatcacttgaaccctggaggcagaggatgcagtgaactgagatcacaccactgcacttcagcctgggcgacagaagaatgagactctgtctcaaaagaaaaaaaaagaatcttacttaactcttttaccctgcctttctcaagtgtatgtgaccttgaagatgttttttgcatgtgacatgatgagtacctgcggggctgatgtcagctctgcctggggaatctgcctcagcttcagaccctgcaccccaaattcatgcttagcccaggccagacccccttcctgctgtcggcaagcagcttagctttccgcacacccatgaacagatacccagcagcctttggcatgagccatgtggcccgaggagataaacagacagagagaggaacattgatgcgtgtgaaatgttggcaggtgagtgggaggggcttgggttggtgctgagaccggagacacactctgctgtcacatccttcagggtccccgggggccagcacggagggccatgatcatgtaaattgggacttaaatttaactctatgtaaatataactctatgcagaggtcagggatggtagaggacaagctcactgcagagaaagaaagaaagatgggcaacagttgcagaacctaacccacagataggttttgtttgaccagctctgtacatttttagtttattttttatctttttgagacagggtcttgccctgtcgcccaggctggagtgcagttgcatgatctcggctcattccaacttctacttcccgggttcaagcaattctcctgcctcagcctcatgagtatctgggattacaggtgtacgccaccacgcctggctaattttttgcattttgagtaaagatggggttttgccatgttggccaggctggtcttgaactcctgacctcaagtgatctgcctgccttggcatcccaaagtattgggattacaggtgtgagccactgcgcctggctcacccatactttgttactggttttagaattcctttttacctggtctttcaaaccaagttttgaccatgtctgtccctgagtataatccttgatgagtagcaccagagagagctccacgttacccggggcctggcattcaaagcactcagtggtctggtgccactcaaagcctgtgagccaggcaggaagtttataaaattagagatggatgaatggatggatgggaaaaagcaagcaagggaggaaggaaggaagaaaggaaggagttctgggaagagagagaggctgcccccgcagggctctcagtttgaaggagaggtgcagcacactcagaaaaaactcccggccaggagtggtggctcacacctgtagtrccagcactttgggaggccaaggctggcagatcacctgagatcaggagttcaagaccagccaggccaacatggtgaaaccccatctctactgaaaatacaaaaatcagccaggcgtggtggcacctgcctttacccagctacttggggggctgaggccagagaaacgcttgagcctgggaagcagaggttgcagtgagcrgagatcacaccactgcactctagcctgggagacagagcaagactctgtctcaaaaaaaaagaaagaactccgtgagcatcccaaatgccacatccccataatgcaaccagacccggtcctcccggatccaggggaagggtcggagctcagtgggtgagcaagaaaagccacgtggaagaagtaagcggccagatggctcaaagacaaactctcccctgctcaggcttgcacccagacacgacaccatgcatctcctcggcccctggctcctgctcctgggtaaggactgtggcctgggctagtactggggttctgggatgtcagtgggcactggaggaggaggaaagacccaggcagagaggcgtcaacatagggtagggtgggggcagcggtgtgtatagataaatgtacatacaaatatatatgtttcccatatatacatacacttctctcattgcatcctgctgtctttgtgtatctctgtatttctcccactatcttcagagggaattctttagtctttagaaagctctctgctgggtgcagtggctcatgcctgaaatctcagcactttgtgaggctgaggtgggaggatcacttgaggtcaggagttcaaggccagcttggacaacatagcaagacccctatctctaaaaagaataaaaaattaaacaaattttaaaataaaaaataacttttaaaagaaggctctcatgcccccttagtaatgctttctkatcactgtggtgagttctagaatacttggctttctctgactcaagtaaatgggtttttgagcaccctgaaaccctctacgcctgggagggggcctgcgtctggatcccctgcacctacagagccctagatggtgacctggaaagcttcatcctgttccacaatcctgartataacaagaacacctcgaagtttgatgggacaagactctatgaaagcacaaaggatgggaaggttccttctgagcagaaaagggtgcaattcctgggagacaagaataagaactgcacactgagtatccacccggtgcacctcaatgacagtggtcagctggggctgaggatggagtccaagactgagaaatggatggaacgaatacacctcaatgtctctggtaaggccttcggggagcgggtcctctgctctgggcaggggtgagtgggaggcaggaaatacctgactcctggcacagagctcacaaaccgagcttcctgcagagctcaggcaggggacgccagcggatgacgatggcgatgcagcagcactagacagagctgcgggacctyggatgtcccatctgaccctcagttcctgcccctctgggacctggattccaaagttatcggatctcctgatctttccctctttctttctcaccatgtatttttcagcttttgtgacaaactcgtgtttggccttagtactggaaccatccaagcaccgcattcctttagtggggtgggtctgcatgtaaccagcctcagctctcccccaggctggaccgcccccttcagacattggggtctgaagctgcatcgctcaccccaaacttagggctgctcagagctccctatagaggaaactgggtgtggaacggagtaaccacactccctagggcagaggccccagacctgtgtttgatgggtcaaatccacccctacatgtgcagtgccataactgagcctgtgttataaaaatcataaaatgtttgttttactttttttcctcttcttttccccttccccttcctttccctttttatgagacagggtctcgcactgtcatcacccaggctggagtgcagtggcgcgatctcagctcactgcagccttgatctcccgggttcaagcaatcctcccacctccaaagtagctaggatcacaggtgcatgccaccatgcccagctaactttttaatttgttgtagaaatgggtcttgctatgttgccaggctggtcttgaactcctggcctcaagcaatcctcctgcttcaacctctcaaagcattrggattacaggcatgagtcaccgcacccggcctgatcttctgatttttcaagagacgatggaaatctagattttccagtgaaatctcccagcatgttaatgttcatggcaagttctcatgagctcttcaaggtcagatgacactgttgttgaaccccaaaggccaggtttgagctcccgatgcgtagtcagccaaacactgacatctcagtgcttagaagctgagataggattatttaatttagccaaagcaaggggacagaagagagaaactctcaaatctgacctgactttgagcgttagtgggggcttttatgagtaaagtaggtgtgcaggaggtgacctcccgatcgtcaaagctgttgtgcccctcggctcatcaaatttctggatgtcatcaaggaggtctgtgtgacctaaggawcattgttctttgaaagagagacaagttcatttatcttgcaggcagctgccagggagtcaggwtgtaagttaaacaattatgagtgaattaatggttacctgctactgaaatgaccaaatgtaactaatcatgcatggaggaaggaaaggacaaagagaaaagaaaagaagtaaaacgaacatcttataatttttataacataggttcagttatagcactgcacatgtaggggtggctttgacccatcaaacacaggtgtggggggcccctgccacagggagtgtggtcactccgttccacaccgtttcccggatgggcagttctgagcagccttaaatttggggtgagcaatgcaacttcagaccccgctgtctgaaggaggtggtccagccttggggagagctgaggctgggtgcacacagacccactccactaaaggaatgcggtgcgtggatggctgcaatactgaaggaagccatgaaagtaacacaagtttgtcaaagctgaaaagtccgtgaactaaactgataaaattcacttagaggtggtgggaataggccgggcacggtggctcacrcctgtaatcccagaactttgggaggccgaggcaggcggatcacaaggtcaggagatcgagaccatcctgactaacacagtgaaaccctgtctctactaaaaatgcaaaaagttagccaggcrtggtggcaggcgcctgtagtcccagctactcaggrggctgaggcaggagaatggcgtgaacccggaaggtggagcttgcagtgagctgagatcacgccactacactccagtccgggcgacagagcgagactctgtctcaaaaaaaaaaaaaaaaaaaaaagaggtggtgaggtggtgggaatagaactttgcaatcattcagaaagcagacatccggcaatgagcatgaaagaaaagtagatcacagttcccaaggaggcttagtgtggtcaaggcctttcagaggggatttcgggtgwgcaaaagtgattcaaagtggagaaaagcaggactgcrttgggtgcagtggttcccgcctgtaaccccagcactttgggaggctgagatcggaggatcgtttgagcycaggagtttgagaccagcctgggtaacatggcaagaccctgtctctacaaaatgtttaaaaaactagctaggtgtggtggcacatgcctgtagtcccagttactcagggggctgaggtgagaggattgcttgagcctaggaggttgaggctacagtgagctaggattgcgccactgcactccagcctgggtgacaaagcaagaccctgtctctaaagaaaaaaagaggccgggtgtggtggcttacacctgtaatcccagcactttgggaggccaaggcgggaggatcacttgaggtcaggagttcaagaccagcctggccaacatggcgaaaccctgtctctactagaaatacaraaaaattagctgggtgtggtggtgggcacctgtaatcccagctactcgggaggctgaggcaggaggatcacttgaactggggaggtagaggttacagcgagccaagatcgcgccactgcactccagcctgggtgacagagggaaactccatctcaaaaaaacaacaacacaacaacaacaacaataacaacaaaaaaacaaagcaggactggagagaggtggaatgaagtggcaaggggttcctgaggggtgatttgggacaggacatctaaagccaggtgtacgctcacgtcctcagtsccccaggctcctgcacgggctctgttcttttgcagaaaggccttttccacctcatatccagctccctccagaaattcaagagtcccaggaagtcactctgacctgcttgctgaatttctcctgctatgggtatccgatccaattgcagtggctcctagagggggttccaatgaggcaggctgctgtcacctcgacctccttgaccatcaagtctgtcttcacccggagcgagctcaagttctccccacagtggagtcaccatgggaagattgtgacctgccagcttcaggatgcagatgggaagttcctctccaatgacacggtgcagctgaacgtgaagcgtgagtctccccrgcatgcctgtgggaagggcaaggtctgtgtcaccttctccccagccccgcagggggcatgcacccagggcagggggaagcctgcacagacggcggcatcctccagccctggtcacgccgccttgtcagccctggtgtttcgggaaaaagatttgctctagcctaacagaataaaatggtccatcctcaagccatgacatgaattggggattatctggttaggtctttttgttcccctcttggtggggatttttttcgcatcattatcttgtgcctcattcattcaataaatacgtatcatgaacctactaggtaccaggccttattacggctgccaatggggggcatggggcggtgggcagggtgcagcagtgagcaaaactcttgccccacgcggagccagcgctgcagtgaaagagacagacaacaaatggattaccaaagaaatacagagcatgagccaagacattagaatctggaacaaagcaatgttaacaaagaaatatacaacactattgtaggtagtgatatgtgtgttaggaaaaaaataaggccgagagaggggagtgatggagagagacctctctaagaaggtgagcacttaggccgggtgcggtggctcacgcctgtaatcctagcactttggaaggccgaggcggggggatcacaaggtcaggagatcgagaccatcctggctaacatggtgaaaccccatctctagtaaaaatacaaaaaattagccaggcatgatggcaggcgcctgtagtcccagctacttgggaggccaaggcaggagaatgacatgaacccaggaggcggagcttgcagtgagctgagatcgcaccactgcactccaacctgggtgacgagtgagactccatctcaaaaaaagaaaaaaaaagaaggtgagcacttaagctgactggaacggagggagtggctgaggccggcacatatttgggagaggaggatttcagggaaagagaagggcaggttcaaagctttgaggcagcagctgggtgggaggacctcagaggctgaagttcaccgcctctgagggccacatggtaggacaggaggcaggagatggagcaggactctggatcccgagggctgaggtgagggtttgggattctatgcaaagcacagaacccgctcgtggtttccagcaggattggcgaggtctggtagatggtgttaggaaccctgcgtgctgctggtggagaccaagaagtagaggaagtgggagggggaagctgagagccgagttaggaggctgtgaccatcacctgggtgaagggactggcaggccatggctttgtcagaataaaagcactttccacaccctccaccctctgaggattccccgccccctccccgactgcccctctgctcctccagacaccccgaagttggagatcaaggtcactcccagtgatgccatagtgagggagggggactctgtgaccatgacctgcgaggtcagcagcagcaacccggagtacacgacggtatcctggctcaaggatgggacctcgctgaagaagcagaatacattcacgctaaacctgcgcgaagtgaccaaggaccagagtgggaagtactgctgtcaggtctccaatgacgtgggcccgggaaggtcggaagaagtgttcctgcaagtgcagtgtgagcccctcggagctggggacaggccaggcagggaggtagcaggggtggacccggagaggggagccacgggggctctcggggccgtgtgcacaggttgggggtgctctcctcacccctccactcgcctctgccccctcttccagatgccccggaaccttccacggttcagatcctccactcaccggctgtggagggaagtcaagtcgagtttctttgcatgtcactggccaatcctcttccaacaaattacacgtggtaccacaatgggaaagaaatgcagggaaggacagaggagaaagtccacatcccaaagatcctcccctggcacrctgggacttattcctgtgtggcagaaaacattcttggtactggacagaggggcccgggarctgagytggatgtccagtgtgagtagccacggagcctctggttctagggagagaagatggacacagggaacggggaaggcagatggggtgcagggcattccggggtcctggagtcaagagcaaggagcagccagggtctcctgttcacaactgctgtctcagctcctagcatagggcctggctcatggagggtgctyggtagatgcttgtttttttgtgttttagttttttttgagatggagtctccctctgtctcccaggctggagtgcagtggcacaatctcggctcactgcaagctccaccttcccgggttcatgccattctcctgtctcagcctcctgagtagctgggatgacaggcgcccgccaccacgcccggctaattatttgtacttttagtagagacggggtttcaccgtgttagccaggatggtctcgatctcctgacctcgtgatccacccgcctcggcctcccaaagtgctgggattagaggcgtgagccaccgcacccggcctgtagatgcttgttgaatgaatgaggccaggtgcggtggctcccgcctgcaatcccagctctttaggaggctgaggcaggagggtctcttgaacccaggagtttgaaaccagcctgggccacacagcgagataccatctctacaaaaaaatacaaaaattagctgagcatggtggtgcgtgcctgtggtcccagctactggggaggctgaggagggagaatcacttgagcccaggaagtgaaggctgcagactgaactatgttcctgctactgcactcyagcctgggtgacagagcaagacctgggtctcaaaaagaaaaagaaaatgctgggactgggattataggtgtgagctgggcacagtggctcacacttgtaatcccagcactttgggaggccaaggtaggcagctcacttgaggccacgagttcaagcccagcctgggcaacatggtaaaaccccatctctacaaaaaaaaattagcctggcatggtcatgcatgcctgtagtctcagctacccaggaggctgaggtgggaggatcacctgagcctggaagtagaggctgcagtgagcctgtgatcatgccgctgcactccagcctgggtgactgagtgagaccttgtctcaaaaaaaagaatggattggccaggcatggtggcttrcgcctgtaatcccagcactttgggaggccaaggtgggcagatcacctgaggtcaggagttcgagaccagcctggccaacatggcgaaaccctgtctctactaaaaatacaaaaaattagccgggcatggtggcaggcacctgaaatccacctacctgggaggctgaggcaggagaatcgcttgaacccaggaggcagaggttgcaatgagctgagatcatgtcactgcactctagcctgggtagagtgagattctgtctccaaaaaaaaagaataattaactgcaagataccaggactccatgagggacacagagacttagcgtccctaggcagtggctgagtcttgagagatcttgaaatttttaatgagaactggggcaaactgtctcattacctctccattgtaagacccttttaacacagtgaatcttgttaccatgtagagcacaggacaaaaagaacacataagctcgatccttggaccctgagatgtcatatgtgctaacaggacaggggtgcccaaatcctgagcatctcagacagctggatgcgtgaccacagcagccacagtgatgtttgtggagtgtttgccacacgccacactctgctctaagggagtcatctcatttccttcttgaaacaattcccaggaggttaggaactctcaggactcaccccccacccaccccgcactgcctcttgtttttaagatggagtctccctctgttgcccaggctggagtgcagtggcttgatctcggctcactgcaacctccacctcccgggttcaagcgattctcttgcctcgaccacctgagtagctgggactacagacatgcaccagcatgcatagctaatttttaaaatttttagtagagacagggttttgctgtgttggccaggtctcgaactcctgacctcaggtgatctgcccacctcggcctcccaaagtgctgaaattacaagcgtgagccaccatgcccggcctcaggaccccatttgacagacgtgtaaactgagacctgcagcccatgcccgtgcrcctctcagcagccgtctggcttcagcgctgtgccctgaacccctgcaccaaaccacagccaggccagagagccagggcagggtttctgttctcacacagatgcaggaaggaygcacaagcccccctttgattaatttaggacctgtgcagatgcccgggacaggtagcgggagaagaggaagcaggagggaaggggtactgtggacagctggcttttctttactcacctctctggttttcttccagatcctcccaagaaggtgaccacagtgattcaaaaccccatgccgattcgagaaggagacacagtgaccctttcctgtaactacaattccagtaaccccagtgttacccggtatgaatggaaaccccatggcgcctgggaggagccatcgcttggggtgctgaagatccaaaacgttggctgggacaacacaaccatcgcctgygcagcttgtaatagttggtgctcgtgggcctcccctgtcgccctgaatgtccagtgtgagtccctgggctaggcagggggatctgggaggtggcccggctgggatgaggggatgaaggcaacgaggccggagcctgggccagtgtcttcaacagaattgagggacaggagcctggcgtcagggccaaggggaggggaggcctggggacagcaaaagggacagggagcggagaggtcagcttgggacccttgccctccagatgccccccgagacgtgagggtccggaaaatcaagcccctttccgagattcactctggaaactcggtcagcctccaatgtgacttctcaagcagccaccccaaagaagtccagttcttctgggagaaaaatggcaggcttctgrggaaagaaagccagctgaattttgactccatctccccagaagatgctgggagttacagctgctgggtgaacaactccataggacagacagcgtccaaggcctggacacttgaagtgctgtgtgagtgagggccggaggctgggagtggagcagagaagggaccagtggcctgcctggtagtgacttcgcaccccctccccctgcccgccatgcagatgcacccaggaggctgcgtgtgtccatgagcccgggggaccaagtgatggaggggaagagtgcaaccctgacctgtgagagygacgccaaccctcccgtctcccactacacctggtttgactggaataaccaaagcctccccyaccacagccagaagctgagattggagccggtgaaggtccagcactcgggtgcctactggtgccaggggaccaacagtgtgggcaagggccgttcgcctctcagcaccctcaccgtctactgtaaggcctcttcctgctcttgttcttcttggtggtggtcagtccttccttccttccttccttccttccttccttccttccttccttccttccttcctttctctctttcttttcctcctcctcttcttcccctcctcctcctcttcctcctycttcttcttcttctgctttctccctctcctcctcctctttcttctccttctccttccttcttcttcttcttatagagacaaggtcttactctgtcacccaggctggagtgcagtcgcataatgacacctcactgcagcctccaattcctgggctcaagcaatcctttcgcctcagcctcctgagtagctgggactatagacatgcaccaccacatccggctaatttttacatttttgtagagatggggtcttactatgttgaccaggctggtttcaaactcctgacctcaagtgacccttctgcctcagcttccyaaagccctgggattagagccatgagccactgtgcctctccctgtttcctctcatgctcctctctggccctgtctsctccagtgacttcccgaaaagccttccagaccagctggccccttcttccccacctcactgtcccctttcccattcacaccccttgctccaggccatctgccgctgtgctggaggagtcgtcttgtcctgcgtcaccagtctctctttttctacctcccctgcagtctctcctgcctccctctagggtcccctctcaggctgctccaccttccagaagtcctgagctcctactgggtccctgtctctctctctctgactactctgtctctctcagccctgacaggctccttgtttttatcttttaaaacgtaaatgattttttttttaaacggagtctcgatctgtcacccaggctggagtgcagtggcgtgatcacggctcactgcaagctctgcctcccgggttcacgccattctcctgcctcagctccccgagtagctgggactacaggcgcctgccaccatgcccggctaattttttgtatttttagtagagatgtggtttcaccgtggtctcagtctcctgacctcgtgatccgctcgcctcggccttccaaagtgctgggattacaggcgtgagccaccgcacccggctgattttttttttttttttttgagacagggtctcaccctgttgcacaggttggagtgcagtggcacaatctcagctcctgcagcctcgaccccctaggctcaagtgatactcctgcctcggcctccacagtagtaaacttgagtggtttttaaacagatcatacaagcacctggtaaaaaaataaaatgtaagcatgaaagggtaaatagtggaaagacagacgcggctcactcttgatccctgagaactctcatccccaccaaaggtcctcactgcacacagtcttcccatctcactgcacacagtcttcccatctcctccaggggtatttttcacacgcacaattcacacacagaggtctgtgcctatatacccttcctcatgacacagacgaggcagagcccacactttgcctgggaattttctttgcttttttccatgtaataatactgtttggacattgttctgtatctatgcatacacagagtgtctaaagtctggaggctgggcatggtggttcatgcctgtaatcccaacactttgagaggccatggtgggaggatcacttgagcccaggagtttgagaccagcctgggcaacatagcccacacctcatagcaagatctcatctctacaaaaaataccaaaaaaaattttaaaaacgaacaaacaaaacaataacaacaacaaaaaagagtctgaaagcatatggaagatacctaattaatttattgtactttttcagattaataattggaaacatggccttaaattgagggaacctgaccaggcacagtggctcacgcctgtaatcccagcactttgggaggccaaagtgggtggccacaagcactttgggaggccacaaggtgggtggatcacttgaggccaggagttccagaccagcctggccaatggtgaaaccccatctctactaaaaatacaaaaattagctgggtgtggtggcgcgcacctgtagtcccaactactcgggaggctgaggcaggagaatcgcttgaacccgggaggcagaggttgcagtgagccaagatctcaccactgcactccagcctgggtgaaagagcgagactctgtctcaatcaatcaatcagtcaatctagggaaccatcaccagcacggccgaaggccaaaggaaaacatctgaaacatgttatctggaaatgtaacagacacatcccatcatataaaaccattgttccctgggtatcccctttgcagacagcctgagagcctcctctttttcctggggccatggagtcctcgcgtatgaaggttgcatacatcctcctcccagtgccctcttcagggcctaggtctgcagcctcttgttttgggcacgcctgcaaggacagttgcaagatgcattcccatgtggaattgctgggtggaagacaggtgcactttcagagctgatcacacagctatactgccgtgaagagctgcacccatttatgcgggtgcgggtcacaggctctgggcgtgccacgtctgtgggaaaagcagctcctcaggagaattagtgccttattcctaaagggaggcccagagcaagcaggggccrttgtcaccctcttcctctgcacccctgcacgcatgcaggrgagaaggacgagtctggctgcagagagaagtccaggatgccttccaggcaaaggctgccagggagagctggcccctcagttgattaaggtctctcctttctccacccagatagcccrgagaccatcggcaggcgagtggctgtgggactcgggtcctgcctcgccatcctcatcctggcaatctgtgggctcaagctccagcgacggtgagctcctgccatcccccaccacctcctctatcccttggcagaggcccgtgtccagttgctccatctcgaagcctccagcctgtggagtccctgaccctcacacatgtgyctttatttctcagttggaagaggacacagagccagcaggggcttcaggagaattccagcggccagagcttctttgtgaggaataaaaaggtaggatggggctgggcacgatggctcatgcctgtaatcccagcactttgggaggctgaggcaggtggatcacctgaggtcaggagttcgagaccagcgtagccaacatggtgaaaccctgtctctacaaaaartattttaaaaattagccgggcgtgatggtccatgcctgtaattccagctactcgggaggctgaggcaggagaatcgcttgaacctgggaggcagaggttgcagtgagccaagattgcgccattgcactccagcctgggtgacatactgwgactctgcctcaaaamaaaaaaaaaaaaaaaaaaaagggtaggcatgaggcagactgtgaagctgagtggggaaacaaggtgaaggaaggggataaaatgtcctctgaggagacctgggctgtcagaggccagggaaggggacgagggttggggaacaggtggttagcacttcatcctcgtctccctcccaggttagaagggcccccctctctgaagrcccccactccctgggatgctacaatccaatgatggaagatggcattagctacaccaccctgcgctttccmgagatgaacataccacgaactgggtactgagggtaccaggagggtgaccctgcaccctgggagggaggcgggaggaaaagctctgtcccgcctgccctctttgtgccaggcccatgccaggcaccctgatacatgctctgcctcattcccrctcggcaacaagcctctgrgtaagggccagtctccagaagtggacctgctccttcaagtcagcagcacacatgcscagtccgttcttatcacaaagatcaagasctcrtgatacacacccacgcctactccctccacgcacatttgcacgagctcctactgtgagctttgggcactggggaggccacaggttttacataaggggctgaggttggggtgctgttgggggctctgggtgttgagagggaggagagttcgtgggagatgcttcatgcgtggtcgtctatctgccctgtctctcagagatgcagagtcctcagagatgcagagacctcccccggactgcgatgacacggtcacttattcagcattgcacaagcgccaagtggtaaggaggrtctccccaggtctccccagaggggctgtggaaggctggggacagggcctggcctcagtggtgggtcccacataggaaggagttgggtaggcatccgtggtggcagaggttgggtgttggagacggttgctccggcagagctggccagagccaggcaggtacctccaggtcctggatgccggccacagccagtttcctgacacgaggacacccgcctgggcttttggacccccgggtggaatgaaggagagaatgcggagaaaagcggcggtggaggctgrcgacagtggggccaggctaaccaccatgcggttttctcagggcgactatgagaacgtcattccagattttccagaagatgaggggattcattactcagagctgatccagtttggggtcggggagcggcctcaggcacaagaaaatgtggactatgtgatcctcaaacattgacactggatgggctgcagcagaggcactgggggcagcgggggccagggaagtccccgagtttccccagacaccgccacatggcttcctcctgcgcgcatgtgcgcrcacacacacacacacgcasacacacacacacacactcactgcggagaaccttgtgcctggctcagagccagtctttttggtgagggtaaccccaaacctccaaaactcctgcccctgttctcttccactctccttgctacccagaaatccatctaaatacctgccctgacatgcacacctccccctgcccccaccacggccactggccatctccacccccagctgcttgtgtccctcctgggatctgctcgtcatcatttttccttcccttctccatctctctggccctctacccctgatctgacatccccactcacgaatattatgcccagtttctgcctctgagggaaagcccagaaaaggacagaaaygaagtagaaaggggcccagtcctggcctggcttctcctttggaagtgaggcattgcacrgggagacgtacgtatcagcggccccttgactctggggactccgggtttgagatggacacactggtgtggattaacctgccagggagacagagctcacaataaaaatggctcagatgccacttcaaagaaccagtgaactcttttcagtctgtggagtcagagtggggatgaggagaggggaaagtcttcatggggcctggggggaaggaaatggagtcacagtggtttactgatcaaaccagcagattagagagtctggtgtcttgttaggaaaagcatactggctttgcagacagacaaacatgagaacttgaatcttgattcttcggcttaactagcccggtgatcttggcagggctcgccagcttgcctgagtctcggcttctccatctgtaaagtggagagggaaaggccactgcctaccacgcaggtggcccacgataggaagtgaggcatcgtcttctatatgctggagccacattgagacccagcacagaagccgaaagtcccccagaaaaccaacctccatcctttatttgcatttttcgaagaatgtgaaaaggggaagccgattcaaaacagctcttcccaaaagtgacgctacccaattcttgcacaacccatagctgccagagaaagtcttgaagaccagccaccctgagaaacctcacagcttttctgtcattcgaggtcctctgcacccgttctctaattctgttcactgattcagactttccagttaggtgccccagctcccctctccgcttctcgggtttgatctttctccacccattcacctgcttctgcaaaggggctaaagcccattctccttagagggcaggggtgtaattatctgatcatcagggagattggctcctggcacgtggcaggtgtccccaaactgccaccttcctctcccaccttcctttccctcccatctctgctcagtacccggacggtaactctaggaattatggttcagggaggccttgatcgccccatcaatccactttgtccctggtttgattctcgtgagcaccattaacttttctggaggaaggtgaggctttaagaactgtttaaagcccaggcgtggtggatcacgcctgtaatcacagcactctgggaggccaaggtgggcagatcacctgaggtcaggagttcaagaccagcctagccaacatggtaaaatcctgtctctaccaaaaatacaaaaattagctgagcgtggtgattcacacctgtaatctcagctacttgggaggctgaggcaggagagtcgcttgaacctgggaggcggaggtagcggtgagccgagatcacgccactgcactccagcctatgcaacagagtgagactccgcctcaaaacaacaacaacaaaaactgtttaaatgagacaggagggtgttggggtgtctgtgcccaaaatggggtctggtgtcattcaactctttcttcattcattctgcacacagatactgagcacctggaaatgcacccagtacagagccagttgttaggacaccaaaaagataaggcgtaggaccaaccttggggatctctagtcgagagccgccaagggtttttaaggcaagataccctggagggagctgaggcagtcctaagcctgaagggcctggcttaagctccctggcaaccatcgagcatcttccccttcccaccctgtccctcagcacagctgctgacataaacctactacatggctgattgaccatgagatatggccatcaatagacattgctgaggcgtgaagagcaggtgaagagcaggtggccaggaagctagggggccaggactccagacgcaggccgccctccacaaccccagctctcacagtcctcccagggtccagacaatggatcgtgcatttaggttcccaaacacctgctgtgcaacgtgtagtagacaaagcagaccaaagcctttgccctcaggaggccggcattctagctcaggagccagccaagacgatgtcgcactgaagaaagacaacaaaagtgagattcacaggagggatgagtgtggctgaggcacccgggaaggccctcggagaaggtgaccttgggcaaagatccagacgccaggtgggtggggccaaagcagagaagatctggaaaacccaatggctccccagggcttcgctcttgctgcaggaggggaaaccacactgctgtggattcttcctccattctgtccatttctcagttcccaacaacacactgaacagtaggaggccagttctccgctcacagcgggcgctgcaccccaggtgctgctctcgagaaaaaggcgagcatggaccaatttagtggctccgaggtatgaaaagcagtgagatggtgtctttgagggagttagtgataggctgagacccccttgctgtcccccctgaagcctggtgaccagagctgccaggaggccacacagagagaggtttatgatgggggacctggaattcggaaggggcagagtggtcaggtgacccatacacgcctgagaaaactgatgtggagagctgtgttgtcattctgaggcaggaaatagagacagactgacagacagacagaaagacacgggcacattgagagacagagacagaatcacagagcagagctggcttctcaccagcaggcgtgggcacacctgagagagcatccagagaggttagaaatcttccttaggtcctcctgggaggctcaggtgaccccagtgggaaacatgaaaggctgggaggacttccagggctgagagaaggaagctacgcagccggccggtgccacattccctgtgccttggggagtgtcccccagtgtccccagccatgcaccctggggggagtcggcttggacatctgtgccaccccttgacaggcagagtgggggccacaacctgggccctccagtgctggtcagcagaggctgcccccgccccttgccttcctcctcccgctccttcctccagccctgggaaggtcggaagccaccaccatggggctagtgcggaagcagagggagaacagaggggccctcctcgcaaaaactaaaacaagcccacagcctgtgcagaaccgcacccgggtgtgatcactccttaccccacacacccactgccacttggagatggcttcatggctgcagtcacagggcaccctgtgttgtcaggggtgagccagtgaggcccgggacctgcccaggggtgcatcaagggtggagaagacctggccccagcgcaggtgtgaacaggcaggagggctggggagggaatagcgctgggttgtggccgagcccccaagccctgctcttgagaggcactggctacacactcggcccctacccagacaggaccccaattcctccctggcccctctgtgttcctgcatcttcccagcccctcacctcctctggcgtggcctcacctccagccgggatgccccattagctgctcacccaagctgctagaacctcaggctaatggccctgtcacccgccctcctccccttccggctcactgcccatcccgggcatcctccatcagcccgctgaggggactgctgagcctcagagacatctggcagcaccaggaggtgggtccctctctctgtggctcctctcttcacctgactgttccccagacccccagaccccctgcccaggtggcccctgagaactgctaagctcaaccgtgacatggatggggccyrgctgacccttgggctctccctgggggacccccttttcctgtccctggccacaccctcaccttatccacacccttctcctccctgctgccccgccggctttccaatgtgggtggggggtgggggcagctcctgccttgccagggaaccagggagggcagtgggctcaggagtcaaactcccattcccagggaaggctcaggctgtgggcccagccctgttctgaattctctccacccctcctccccacagagtctcagaaatcgagaagctttcttcctctgggacctgtgcgccacatcctatctcctgtgacgctgcaggagcttccctggttttaagaggtgacatggtggagagaaagcacaggactgggggccacaggycctggcttctcatccaggctccgctgctccctgactgctgcctttctctgtgggcctcgtttcctccctgatcccaccaggtgaattgtaattctccacacagggctggaacccgcgagtgatcccaggagcccctcctctccggggccccaagatctgaggacagggagccaggttgcacacaggagccgtgcaggccaggacggcggccccatggacctgcccccgcagctctccttcggcctctatgtggccgcctttgcgctgggcttcccgctcaacgtcctggccatccgaggcgcgacggcccacgcccggctccgtctcacccctagcctggtctacgccctgaacctgggctgctccgacctgctgctgacagtctctctgcccctgaaggcggtggaggcgctagcctccggggcctggcctctgccggcctcgctgtgccccgtcttcgcggtggcccacttcttcccactctatgccggcgggggcttcctggccgccctgagtgcaggccgctacctgggagcagccttccccttgggctaccaagccttccggaggccgtgctattcctggggggtgtgcgcggccatctgggccctcgtcctgtgtcacctgggtctggtctttgggttggaggctccaggaggctggctggaccacagcaacacctccctgggcatcaacacaccggtcaacggctctccsgtctgcctggaggcctgggacccggcctctgccggcccggcccgcttcagcctctctctcctgctcttttttctgcccttggccatcacagccttctgctacgtgggctgcctccgggcactggcccrctccggcctgacgcacaggcggaagctgcgggccgcctgggtggccggcggggccctcctcacgctgctgctctgcgtaggaccctacaacgcctccaacgtggccagcttcctgtaccccaatctaggaggctcctggcggaagctggggctcatcacgggtgcctggagtgtggtgcttaatccgctggtgaccggttacttgggaaggggtcctggcctgaagacagtgtgtgcggcaagaacgcaagggggcaagtcccagaagtaacgccactgctcgggggaaggagcatggggcaggagggcccggctgcttctccaggcccctgcggggggctgcttcggaggaactgcagggcagcctggcccggaggcctccctggagccactcaagcagagagcggcgcctgctgagggcagcaccccagtcaagagaggagcaccgagccagagcacggtggcagggggaggtaagtttgcccctgcacgtgtcgaggaagtttgtcccttcctcgcctatctttctctcccctctgcacgtcctcacctgcctgtcttccgtgggccgcgagcagaggccttgtacttacgggaaggaggaggcagtctgtttctgacycacaggaactgccactccggtgatgcacttgaggacagctactctgaaatcagttcccaggagagaacatttgatttccgagtaggagaggaggcaggaggcaggataatgacgctgttataccatgtgaaactcgcaagggggcagccttggagcttggaacggaggctggcaggaaaagatgcttcagccggggagggaaaatgcaaggtcccgcagtgatgggcaaaggctacggagttgactcttgaacaacgtggggatggggtgccgaacccccacgcagtggaaaatctgtgcatgactttgactcccccaaagttcaactactaatagcctactgttgaccaaaagctttacccagtatataaacaattgagtaagacatatttgaagccaggcacagtggcttatgcctgtaatcccagcactttaggaggccgaggcgggaagactgctcgaagccaggagttcaagagcagcctgggcaagatagtgagacccccacctctacaaataataaaaataaaaataattagctgggcgtggtggtgc

SEQ ID NO: 5670 - DNA, 33988 bp, Homo sapiens
attattattagagagagtgtccctctgttgtccatgctggagtgcagtgatgcaatcacagctcactgtagcctcaaactcctgggctcaagggatcttcccacttcagcctcctgagtagctgagattataggcatacgccaccacactctgctaattcacttattttttggaaagatggggtcttgctgcatggtccaagccagacttacattcctgggctcaagcgatcctcccacctcaacctcccaaaacattgagattacaggtctgagccaccgcaccctgcccattctacttcctggctcttaaatatgactactctagatacctcatataagtggaatcatacagtatttgtctttgtaactggttcattttacttggcataatgtcctgaaggttcatcctcatcgtagtgtgtgtcagaatgcccttccttttaaaggatgaataatattcccttgtgtggatatatcacatgttgtttatccactcatcattgatggatgcctgtgttgcttccacttttggctgctatggaaaatgctgctatgaatacgggtgtgcaaatattcatttgagtccataattttgattgttttttctttttgagacagagtctcacactgctgtccaggctacagttcagtggcgcaatcttggctcattgcaacctccacttcccgggttgaagtcattctcctgccttagcctcccgagtagctgggattacaggtatccgccatcacacctggccaatttttgtatttttagtagagacagggtttcaccatgttggagactggtctcaaattcctggcctcaaatgatccacccacctcggtctcccaaagtgctgggattacagtgagccaccatgccgagtccataattttgatttttaaatggtggctactaagtttttctggcaccccttaaattttgtcaggcacttgccttaccctagtcctggccccagtttgggttgtcacagcaaggtggaagtgtactgaaaagctcgtgttttatctttatacatttacatggggccccaaaaagggggaaaacccactttgatagggatatgacacagggacgcaggagccaaccgaaagagcccccagtggccaaagatggagcaacttgagcaacaaaataaataaagtaagcatcaaattatagcccaaagtataaaataagtgtctatgagtctatactcacatagatgatttaatacattcatattaataaatgggagagcactttgagaggccaaggtgggcagatcacttgagcccaggagtctgagaccagattaggcactgtgatgaaaccctgtctctaccaaaaacacaaaaattagctgggcatggtgggrcatgcctatagttccagttacttgggaggctggggagggaggattgcttgagcctgggagacggaggttgcagtgagctgtgatctcaccactgcactccagcctgggcaacagagtgaggccctgtctcaaaataaataaatatataaataagataaatatataaataaaaataaaaataaacgggaaagaagagacaaatcttctgtgcaggagaatcccaaatgaattctgtagattctccaccctacaggagggcacacacaactccaggctgccttagtgaccttcttccaaagagtacagtacgggaagggggagcggggagaattaacttcacagtggagaaatctgacaaatacgacctccgccaagtgatcgaggtcacatcagctgtcatgaattatgttgatagtgggcatcctggatatgatgggatgaaatggcactttacctccacgacccttttcacaacagcccgtaatgccagtataaggaaaacatcagaccaggagtggtggctcacgcttgtaatccgagcactttgggaggccaaggtgggtggatcacaggtcaggagtttgagaccagcctggacaacatggtgaaatcctgtctctactaaaaatacacaaactagccaggcacggtggcgggtgcctgtaatcccagctacttgggaggctgaggcagaagaaccgcttgaacccgggaggcggaggttgcagtgagctgagatcgcgccactgcactccagccaggttgacagagtgagactccatctcaaaaaaaaaaaaaaaaaaagaaaagaaaagaaaaagagaaaagaaaaacatcagacagatcccaacagaagggcatcctacagtatacgtgaccactgctcctcaaacctgtcaagactatcagaaacaagagaaactgtcacagctacaaggagatgtgacaattaattgtgatttttttttttgagatgtggtctcgctttgtcacccaggctgcagtacagtggcacaatcacagctcactgcagcctcgaactctggggctcaagtgatcctcccatccatctcagcctcccaagtagctggggctatatgcgtgcaccaccacacccagctaatttttgtatttttttagagacggtatttcgccatgttgcccaggctggtctcgaactcctggattcaagcaatccacctaacttggcctcccaaagtgctgggattacaggcatgagccaccatgccttgccaaatgtgatgtattcttgatgggatcctggaagaggaaaaagatattaggtaaaaactaaggacatctgaataaccatggatttcagtaatgtatccacactgattcattaattgtaacaaatataccgtatgaatgcaagatgttcataatgaggccggggcggtggctcatgcctgtaattccagcactttgggaggctgaggcggaaggatctcttgagctcaggagttcgagaccagcctgggtaacacagtgagatccccatctctacaaaaaattttttgaaattagccaggtgtggtggtggcacatgcctgtagccccagctactcagaagactgagacaggaggattgcttgagccgggaggttgaggctgcagtaagccaggatcacgccactacactgcagtctgagcaacagagcgacaccctgtctcaatgataataataacaataataataataatggaaactcagtatgggttgtatatgggaaacttgctcagtttctctgaaaatctaaaattcttctgaaaatcaaagtctgcttaaaaattcacatggggtttgcattctcctccatgacaaggttttgcaggttatgattacagaggctggagagggtgcaggttatcccgcccctccctgtcccagggattcccttccccaggagctgtgtctcccctgtgagagagggtgagcttccatgaccccaagcctcttgccctctgactccggtattcttagaagctgggaccagcactgagcccaaattcccgaagcgctcaaatactggctttctgtccctatgtgacctggagcttgtagtttaacttctctctgcctcactgtttgacctataaagcagggcaatcaaggcatcccgggggtggctatgaagagtgaatgagatagcagacaacccagatgcctaccgacaggtgaagggaccaacacagtgcggtataggcgtataagggaatggagtatggacacagcctacaacacagacaaaccttgaagacattcctctaagggacataggccaggcatggtggctcacacctgtaatcctagcattctgggaggccgaggcgggcagatcacttgaggtcaggagttgagaccagcctggccaacatggcaaaatcccgcctctactaaaaatacaaacattagctgggtgtggtggtaggtacctgtaatcctggatactcgggagactgaggcaagagagttgctggaacccgggaggtggaggttgcagtgagccgagattgtgccactgcacttcagcctgggcgacagagcgagactctgtcgaaagaaagaaagggaggaaggaaggaagaaagaaagggaagggaagggaagggaggggaggggaggggaggggagggaagggagagagaaagaagaaagagaaagaaaggaagaaagaaaaagaaggaaagaaagaaagaaagaaagaaagaaagaaagaaagaaagaaagaaagaaagaaagaaagaaagaaaagagtgaacccaggaacgaaagatcacacacactgtatgactctatttacatgaaatgttcagagtaggcaaatccatagagacagaaagcacatttatggttgccaggagctgggaaagggcaggatggggaatgactgtttattggatgtggggctctattttggggtgatgagaatgttctggaattaaattcatggctgcataacactgtgaacatactaaatgcccctgaattgtacactttaaaatggttaaagtggcaagttttcactaagcagtaaattaaattctactacaattttaaaaagactaaaaaataatttaaaaaagattaaatgagataacgcaaaaaagcattatctcgaaaatacagctgatattagtataattcttactaagttttaagagtctaaggtgcaggattctaagtttaaagggataggctcttttggttttttggtttagttatttggtttttttttttaatccattatccccacccttgggaggcccccagcacccagtctgcactagaggatggggcccacctcccttttctctccaggcccagccactgaccaccagtaccctggccaggggcaccctcggtcattgccctccgtggcccaaggaagggaacagaaacaacagccaagaagacaatagccgccgggaagtcctcacatttctggagaaatagagcccattaatgaatgaagttcctccagcctgatcggaggacggggtgctggggaggcctgggctaaagggctcacctccagcccccaccctggcagggccgatggtacatgctcactcagtgagggggctccagaggtctgtgggtacgaacccaagggctggtgcccaggggcaatcagcttatgtctctgagccttgggaaacagtgagggtcagcccggctccccacgtgcttctgggcagctttggtattggagcaggtgcaaactcgggactagggcaggaccccctgagaggcgactgagcaaggccatcccgactcatgtttccttggccctgcccggggcacagcatcctgcccacatccctgcagccctggctccttcctaggggctctgaggaggcagcacttggccatctggtcacagttgctgcagggcagttcttggccccagctgtaggtaaagtactgtatgttgtaattttttgaaagataacacgttcacacaactcagaattgaaatgccacagacattccccctgctccgcccctttcccccggatacccagtttctcccggaggcagccaatgatctcagaggctgtatacccacccagagttattttatgcatatcaaggaaagtctacatagaggactgtttctggggtacccagatgcagcgtcaaatgccatggaatactacagtgaggacattatcctttcaagctttcaaatcagagcaagggaaaggtcgatgctagagtttctctagcacccatgaagccctctccctttttctactgagttttactttacaggcaacagcaggcttcaagcttggggtcattgtcgggcaacagtatctggcaagaattcaatgtctttttctcatagtcattgtattttggcctctttctatttatggcaactgagagagaaagcttattcctagatatatgtatttaagtaaaaaataaatgaattcatggaaacatattaagcaattatccagataacataagggatggcaaaaatggtgcagatggtggaggggagacaagtagaagttggggtgctcttgttgaatgtctggctctgaactctagaggaggccgcaggggctgggcaggaaggaggtgaatctctggggccaggaagaccctgctgcccggaagagcctcatgttccgtgggggctgggcrgacatacatatacgggctccaggctgaacggctcgggccacttacacaccactgcctgataaccatgctggctgccacagtcctgaccctggccctgctgggcaatgsccatgcctgctccaaaggcacmtcgcacgaggcaggcatcgtgtgccgcatcaccaagcctgccctcctggtgtgtaagtatcagtgcatctgtctgccctgccaggggtcttttcatggacacccactatrccaggagcctccctggcctgaagccagccctgaagcmggctgccacactagcccagagagaggagtgccctgggagggagatgggctgagyggagctgtcatcaccccctcctgacctcgccttcaaggtcaagttctttggtragaaggtcctagctgcattgcaaacagccaggtatagggatttgtgtttgtctgagacccagaatcactggggttcragttagggttcagatctgagccaggttagggggttgagtcagggggtaaagattaggaggttggtgtatatttggtgttgggggtcactctatggccaaagtcaggggttgccatgagctcaggtgacggaggctccatcactgactgttgtgtgactttggccagctcccctgccctctctgggcctcagtctcttgctcaatataataagggtatagggaggctaaatgatacaatttctaaaatagagtatcgccaagttcaaaagccagaattatagacccccaggactacagacagtgtcacagcatcgtctgggtgaggctagggttagtgtgcggctgggctcagggctgcccmatttgctaggatcgtggggttcccatgtgtcaggatccagaggctagggtatgatcaggatctctagctggggtcagggtcagagctctctgtgtcccctagaattgccatcaaccttaaacccagagggaggcccagtccaacccctcagctttaagacctgctgggagcctcatctcagagaggctgagtcatggccaaggccagttgggggtgggagcagggggcttggtgtgggcctgcagcccctcatccactgccctcccctctagtgaaccacgagactgccaaggtgatccagaccgccttccagcgagccagctacccagatatcacgggcgagaaggccatgatgctccttggccaagtcaagtatgggttgcacaagtgagtcgggcctcgggtgtgaccaggctgggggtagggaggcgggaggaacagcctggggcttgcccccagcccacagggaggaaaggcagcagctgggggactcaggtctctccccttgatttggaaccagagcctgacaccttccctacccccaccctccatcccctggtgccctggggggatttattggagtrtatcaacctctccaacagcccctctaagagtcaggcttcaaagggtcctttcccactgccctgggaagatggaggtcttatttcggggtgaatggggggtagggtagaaaaatctcaaacaaaataagtatttttttaaaaaatgtataaatgttgttttcttatagtacagacaggtcttgctatgttggccaggttggtcttgaactcttggcttakccagtcccccaccccaagcctaaaattagtatcttgactttatttgggatgatggtaacagtcaagggtcggttgtgggccaggtgcttttacaaacaatatcctcacctttatcatatatttttttctttcttgtttttcattttttgagacagagtctccctctgtcacttaggctggagtgcagtggcacaatctcagctcgttgcaacctccgtctctgggttcaaggaattttcgtgcctcagcctccagagtagctggaattacaggcacacgtcaccacatccgcgtaatttttgtatttttagtagagatggggtttcatcatgtgggccagactggtctccaactcctgacctcaagtgatccgcccacctcagtctcccgaagtgctggggttacaggcgtgagccaccacgcctggccctttatctatcttaatctttattttatttatttatttatttatttatttatttatttatttatttatttatttattgagatggagtctctcactgtcacccaggctggagtgcagtggcacgatctcagctcactgcaacctccacctcccgggttcaagacgttctcctgcctcagcctccctagtagctgggattacaggtgcccaccaccacgcccggctaatttttgtattcttagtagagacggggtttcaccatgttgacctggttggtcttaaactcctgacctcaagtgatccacccgcctcggcctcccaaagtcctgggattgcaggcgtgagccacagcgtccggcctatcttaatctttatcatatattttagcctcttctgtaaaagaggataatgccatcgcccggatgaccctgcttaacaaacacggaaacaggagccgatagaggtttagcagcctggcggagctcatgtgcaaactcagctcagtatcggaaactcagccaccttcatggcacctcaggctgccctggagcctgggtcccggtctgtgtgtcggtctgaggccccaagggtggggcagacattgttcagggaccttgtctttgtcttaaagccaatctcctcctcctccccggccctgctaaacacgctccccaggggtggtctctgctacccscgcacattgggccttgagtcttggtaaatgtttctgagccaccagggggcgccagcggtgctggatgccacttcgccttttgcaggaaaactcccgccgctagcgggtgctgtggggcgtcccaggtctcgcgcagccacgccctctgtgtgaccttgggcttcagtttaggcttctgtaaaagagaataatgggcaaggtccagtggctcatgcctgtgatcccagcactttgggaggccgaggtaggaggattacctcagccagggttcaagaccacctgtctctataaaaaatttaaaaattagctgggcatggtggtgcgtgcctgcagtcccagctactcaggaggccaggggaggtcaaggctgcggtgagctatgattgcatcactgcattccagcctgggtgacagagcaagactctgttgctaaaaaataaaagaggataatgctatcctagacctatgtgttgcaagaggtcagacatggcaaaagcgttgagaagttaaagaaatagtatccttaataaatcagcaataattcagtaagaccagactgccatagactagatgtcatagtcattaatatataactgttatcccaaacgtatatgagtggggtagaaataaaatatgattggccataactatgattggtcatgattaatgttagatgaagttggatcatgggtaagatgagaattcttcacactattctctctaaagcgaatggaataaaatagaacagaacagaccgggaaagccagatatatgtggattctccttgcctgggcacagtgtgtcatagtggcttataatatgggatttggagtgggatggacccaggatcaaattcccttctactgaggttttctgaagccacataagctgtctgagccatttctgtctcagttcagtgggtacagcaatagtgactacctcgtgggtagctgtgaggattaaaccaggaaatgtgtataaactctaagcacagtgcctgccacacagcatgtgtttggtacgtgatggccgcttctattgtgtcatattccatgtgctcaagccgggccctgggggagagttcagcaagggtagagggatatgagagtgaatgtggcccactggcctccctgcctgcagtctctcctctctgatccttgcttcctaagggtcttcactgagccccacctctgaccaagtccccggcggcacaggcagcacagatcctctgctgtacytacaccaagaccccagggccaacgcttctcccattgtgcagctccacctctgcccccggggcctagctgaggcctcctccaagctgagccacctactatcttccaaactcccaccctccatctggtgtcacctcctcccrgaagccctctgtatcagtttcctgttttctgccataaaaaaaatcactccaagtttagtggcttaacatgacacaagtttaccattttacagtttaaaaggctagaagtccaccatggccctccytgagctaagatcaagctgtcagcagaaccagattccttctgggggctataggggagaattaattccctcgytttctgcagcttctagaggcttcccccattccttggcttccctccatctacttttatttagggcgagggaagcttcctgctctgactttctcatttatggtattctcccctgctttccagcagctgtgattgtcccaartcctgtcctctggttctctaggccagaaaaactatgatctaccagagctcaagaacttgaaagggccttttcccactgtcccttctcacagtgagagccggagcccagcttcgtgctagaatctgtgaaaatggagaaatgcaccctgtgctgttctcttcctccacccggcatctcccctgcagcccggctgggtttttttgtttgtttgtttgtgggtttttttgtttttttgtttgtttttgagacagagttttgcacttgtcgcccaggctggagtgcaatggcacgatctcgactcactgcaacttctgcctcctgggttcaagcgattctcctgcctcaacctcccgagcagctggaaccacaagcatatgccaccactcccggctaatctttttttttttttttatgcatttttagtagagatggggtttcaccatgctggccaggctggtctcgaactcctgacctcagatgatccacctgcctcggccttccaaagtgctgggattataggcgtgagccacggcctgggcccagtctgactgttttcacttactctctaatgtctcaggtagtgtttattgtattctgtgcagaggtcaagaatttagtcatccaaggaggttagtgtattaggagcttacgcagctattaccagaagagactccactcaaaaatttggtacgtggctgggcgcagtggctcaaacctataatcccagcactttgggaggccgaggcgggcagatcacctgaggtcaggagttcaagaccagcctggccaacatggtgaaagcctatctctattaaaagtacaaaattagctgggcatgatggtgcatgcccataatctcagctacttgggaggccaaggcaggagaatcactgaacccaggaggtggagactgcagtgagctgagattgcccgctgcactccagcctgggcagcaagagcaaaattctgtcacacacacaaacaaacaaacaaacaaaaaaaacgggttgggcatggtggctcatgcctgtaaccccaacactttgggaggctgaggtgggggaatcacctgaggtcaggagttcaagaccagcctggcaacatggtgaaaccccctctctactaaaagtacaaaaattagctggatgtcgtggcgggagcctgtaatttcagctactagggaggctgaggcaggagaatcacttgaacccaggaggcagaggttgcagtgagccgagatcgtgccactgcactccagcctgagcaacagagccagactcagtctcaaaaaaaaaaaaaaaaacaatggtatgagctttaaatttctgtagaactgaaagaggattggagattgtagtagggtctaattctaaattagagcatttagaataatgtggagtctggtcaacatagtgagacccccccaatctgcacaaaaaagacaaaaattagccaggcagtgttggtgcatgcctgtggtcccagctattccagaggctgaggcaggaagatcgttggaattcgaggctgcagtgaactgtgattacacaactgcactctggcctgggcaacagagagccaccctatctcaaacaagaaagaacaaactaaaaaaaaaaaagaagaagaagaatttggagcaatctagttgtttcctataccagaagtctttgccaatctatttttttttaattttatttttaatttttgtgagtacatagtaggagtatatatttatggggtacatgagagtacatagtaggagtatatatttatggggtacatgagatgttttgatatagacctgcaacgttttgtcaatctattttttttttggcgacagtcttgctctgttgcccaggctggagtgtaatggcgcgatctcagctcactgcaacttccgcctcgtgggttcaggctattctcctgccttagcctccaaactagctgggactacagacgcccaccatcatgcccggttaatttttttgtatttttgtggagacgagatttcaccatgttggccaggctggtcatgaactcctgacctcaggtgatctgccctcctcggcctcccaaagtgctaggattacaggtgtgagccaccacgctggcccaccaacctatttttgatctaactttacctctggtggtgtattgatactcttccgaatcaattttcacccttcttcatataccatttacatttctaagaatttgtccatttcatttcatctagttaacctcatttgttgacatacaattgttcgtagtattctctcataattccttttatttctgtaagactggtaataatggccttgcttttatttctgtttttagtaatttgagtcttcttctttttttttttttttgccagtctagctaaaggtttgttgattttgttgatcttttggaaaaaccagctattgttttcaccgattgttgtttttgttctattatttcattcataggcactaagatcctgattacttccttccttctgctagctttgggcttagtttgcccttatttttcaagttccataaggtggaaagtttgattattgagttgagatctttctcttttttaaagataggcatttctagatataaatctccctgtgagcacggttccctccatcttcagcacaccagggttgactctctccgggcgttcttccctggtcacctctccccttcctctcctcttctgcctcctcttccacttttcggtaccctgtgattgtattgggaccacccagataacctaggatcatctccccacctaccccaaggtccttaacttaaccatactttcatatgggtaacacgagttgagtgtggtacccagggtttgacatgytgggtaacatatttgcaggttctgtggattaggaggacattttgggggccatgattctatcttccaccctcgcctagacaaaattggaggctcactccttgggctccctggatgacccccaacatccttcctcacttccattccttcccagcatccagatcagccacttgtccatcgccagcagccaggtggagctggtggaagccaagtccattgatgtctccattcagaacgtgtctgtggtcttcaaggggaccctgaagtatggctacaccactgcctggtggtaagcattcctgtcagctgatgccccatgccctggccctctctgggctggagggctgaatgagggtcctgggtccttggctctttccaggctgggtattgatcagtccattgacttcgagatcgactctgccattgacctccagatcaacacacagctgagtatgtgtcaagcgtcctctggggaagtgggagctggactccagggcttggcctcagcagagggggaggttgtgcaggcagagggttctggggccaccaaaggaggcccagcctgggaagtttgcagggktggggaccccagagctggccaagctcttgactggcctgggcagcatgtggataccatctgatagcggaggctgccctgaggtcatgtcgggtctccctgcagcctgtgactctggtagagtgyggaccgatgcccctgactgctacctgtctttccataagctgctcctgcatctccaaggggagcgagagtaagtacaccaccctgtggcccccattcctgctcgtgcccatcctgttagtgtgtccacggcyccytccaggctcaaccccacacagggcatgcttgtgggtggccaaacctgagggcagcaataccttcagtggggtcacttcctaccccctcccatcaatacaccctcaaaggctggaaacaacaataaccaacagctagtaactaacagctattaagaacttgctgtgtgcaaagcactattccaagcccttttcatgaattaattgattttgtccttaaaaccaaccctaggatatagattctgttatcatcccctttttacatatgggtaaactgagtcacagagaggttagaaaggaaaagctcatatctacggagtssatcctgcattccaagcaccacactaactcagagataaaactctagccaagctaagtaacttgctgaggacacacaactcgccactaagggatgggagtaggatttgaacccagmmttctctgaccccagaagctgagttcctagatactttactctcctgcttcccagggtggggctttttgtcttggccaacaccctctgtcaaggagctgtgggtaaccccattgcacagaggaagataacaaggtttggagagtccctagtcatgttaccaatgccaaacctggaaggcagaagggaactggtgggtggggtctggagaggagccctctattcaggccattttctgactctggagcagacggatacatgtatgaatttggactctagacacgttctcgtgtgtgtgacaggtgtgagcgtcacaggagctgggccctcccgaggrattctgggatggtgccacagttaattcttgggtctgaggctccgtgttctcagctgcaaaatgggagtgataattcttacttcctgagctacaagagtcagggccaacagagccatgaacggtgcctggtacacactaggcrctycatggatgcacaggactggtcaggggctcattgtggtgcttgctgccttcaggcctggrtggatcaagcagctgttcacaaatttcatctccttcaccctgaagctggtcctgaagkgacaggtgagtgaggctggctgactccctgtggtccagggccatgcccaggaggctggatccctttcctccctgcctttccctgagaaggtgccactcccaccttctccatgtggccagtcccctgtgccggtccccagcactgccaccaccacgcagctggaaggaggcactgcctctggcctcctttcctgcctggaaagcacctgctctgtctgccccagatctgcaaagagatcaacgtcatctctaacatcatggcygattttgtccagacaagggctggtgagtgygtttctgtctgcatgcctcagaagacagcagtgggagccagaaagccacctgctgcactatgtggccttgggactgtcactcttcctgtctaggtcccatgggctctatctggctctgacacttgatgattagttatgagcatactttggcaaatctctgcccctttgggctgcagcmtcacaagctgtgtggcgttgggcaagtctatagaactcaggacaaatgggtgattaagtccaagaggactycaagattctcctggaagtagattaggaaaaaagataattagattgctcacatggctgggcactcatccaygtactgtactctcctatgcagtacagagcagagctgggtttcagcccaagtcttggactctgctctgaaccaaccttctagaagggctctacctacccagacagacagacttgggaaaagagagaatgaaaaagtgccacacccctccccgcacacccaggtcccactttacagaggggaacactgaggctggagggttgggtagctgtgtggatgcaggggagcggtgactcagggcaattcccccatcctgaggccctgygttgatcttttcctcctgcagccagcatcctttcagatggagacattggggtggacatttccctgacaggtgatcccgtcatcacagcctcctacctggagtcccatcacaaggtaggagttgtgggagggtggggcagggcccagcttccccaggggagttggtccttttttgtgctctgacaaccccgtcccccagcttcaaccttatggcagccaagagtcctggggcgctcctcctcattcctgatgctcctccgcattcctgatgctgcgaggagggcaggccacagcgacgtgcccctgacccctctctgcaggcaccagggctgcccactacaaggatcccagcaaagcaccagctccttcctagagggcttattcggcttctgtcatcctctacagcagtggattgtggccccycccagggggtactgacaaaagctttggaccctctattacttaggatatagatttctgtaacaaagaaatccgaaataatagctgcttaaacacaataaacagttatttccctctgttgcgttctgagcatctgcagccccgcgggatcaggaggctgcagggtgtcaggcacgcaggccccttccacgtgttctcagccagccccaggcatgacctcatcccagggtcctggctgactggcctgaccaccacacccactctgctcacagcccgttggcctgaacctgatcgcaggaccccaccctagctgcaagggaaactgaggaatttatttcagctaaatattgagaccagctaaaagttaagtggtacagaatggagggagagattggagaagactttagggcggacccagccatctttgtaacagagcctctccctggaaaactggacagaaggatcatttcagaggttcatggccactcctgaagcctgttcacaacccatgggctggatgatctagwggggcgggggactgggcagcagcttgttttcctgattttggcctccaggagccgatggtcaatggactgccctctgcaggggcagggctggtggtcagctggggcggggtgggagctggaggtccgtggtcaccagctgccctgactaatgtcgttacttgaatataaccctgtgaaggcaggaaccacgtctgtctggttcacttcccacggtggttgagacatagtgggcactccggaagtatttgttgaatgagtgaaagccccgctgggggaaactgggtacagctctttcctcagtttccccatctgcactctgggctgaatgctggggctcctcccaatctccctgaagctggaccygagcccagtagggacacacagggtccagccagcgtcctggcttcctccagggtcayttcatctacaagaatgtctcagaggacctccccctccccaccttctcgcccacactgctgggggactcccgcatgctgtacttctggttctctgagygagtcttycactcgctggccaaggtagctttccaggatggccgcctcatgctcagcctgatgggagaygagttcaaggtgagtgggtggggctgggctgckagggratccagatggcatgtggtatgtgtgtgtgygcacacgcatggggaggagggaggaaactcggaaacttggtggtgggcaaaagaactaagctggagcaatagcagtgaagtccagactgggcacagtggctcacacctgtaatcccaatcctttgggargctgagatgtagcaggacgaaccgcagacaaaactcctcagrcactgagttaaagaaggaaagagtttattcagccgggagcatgggtaagactcctgtctcaagagcggagctctccgagtgmgcaattcctgtcccttttaagggctcacaactctaagggggtctgcatgagagggtcgtgatctattgagcaagtagcaggtacgtgactgggggctgcatgcaccggtaatcagaacgaaacagaacaggacagggatttttacaatgctctttcatgcaatgtctggaatctatagataacataactggttaggtcaggggtccatctttaactaccaggcttaggtcaggtaggcccaggcctggtttcgggtctggttccttggtttcgggtctggtctctaggcgttgggctacctgcctttagtttcrcttctctttctttttctgagtataaaacaatataaaacaatatgagagggtctgtctctcttctctcagagacaggagggtccctggaggccaggagttcaagaccagcctgggcaacatggggagacccctgtctctacaaaaataaaaataagtttaaaaatcagctgtgcacggcrgtgcatacctatagtcccaactactcaggtggctgaggagggaggatcacttgagcccargaggttgaggctgcagtgagctatgatggcaccactgcactccagtgtgggtgacagagtaggactccatctcaagaaaaaaatacagtccagcatttattggagtcaactatgtgttgccagatagatagatggatagatagacagagtgatcaatagatttaggtatagatataacttggcacgtagtaactgtgcattaaatataagttgatattagwcttacatttattgcagttatatttgctacactttgttttgttgcactcatcctgtgaaataagtactgttacctctgttttgcaaacaaaaaaaccacaaagctcagagaaggtaggtgacttactgaagatcacacagcctgtaagaggtggccccaaagcctgtactcttcacctatactgtactagaaatgcttaggtagtttccaggctgtgcttgtcattgaactcatgaggaaactgaggcccacagaggggaagagacttgtgcgaggtcacacagcatgtgtggggcacagtggggagcagaagccaggcctccagccgggacaggggttccctgttccacaccctgcccagagcatctcacatgttgtctgggaggttgggagttgcgtctgaggaggggtccagtccttgaaactgcccttggtccctgcgaagttttcttctgaggagtggactttactccacccaccctccaacttcctcatttcttttcaggcagtgctggagacctggggcttcaacaccaaccaggaaatcttcyaagaggtaactgccccctgcccctgtgtggggtttatctcacgtaccccaatcctgctctggcttcaagagcccccacacagccaataacaccaccaatggcaacaattataacagcgaacacagctcctactcggktgttcggcatggagtgaagcacttagtgtgtgtgacttccttcagtgctcacaccgaccctatgagtggggcggtcaaactgtccccattttacacacagggaaacttagtgaatggcaaggctgggtttgagcccagctctattgcccccaaagataaggctccattccctgctccattwcccaggcatagrgacttgtagggggctggaaccccaggatcaactctgggctcagagggccccagcaataagtgactgttgattactcctgatcccaaagctgacttcaggcaagctccttggaggtcgcagccccttcttgctatgcccagtggcaatgatgttcataatcccactcctcagtgcagggttccactaagaacccatgatctcctacctcaaatggacctcatgctttctgagtaagcctccctcagctttctggtcacctcactcccccacccactgcaatgacttcttcaggccttccctgccatcctcaaatctccagctgccccctcctgtctaccttccacttccctctccacacacaacctgcttaccagagagcwgagcagagccaccaacagaacttcccccccacgtcgctgctcccagtcgcaacccactcacccacacctgcgccttcctgcggccgttctcctgttctaacagaggacrgtccctcttcccttctgaactcaggccgtccagccttccccggctctgtgatgyctctctccytgcacatacacaactcacaatattgggcaggcccctgaccggcycttctcccttagccccttgtctgagtcctgttcctttgatgtcctatttctagtctttccatttctctctgtctctacctcctccccaggctaccattatctctagtggggacccatctgtagctcccggtgggtctccctgtgtcctgataccctccaataatctgttccccacagcagccagaacaatcttttcaagaaataaaactggtcattcacctgcctgcttaaagccggtgtaggatacaggctaaacgctctcccatggcctccagggccctgcattttctcatcctgtctacttcttcatctagttgtttcccacccagcgtaattgtaactgtttagttgaaagttgacgaggtcttttgtcagctctagaaatttcttttcttttctttcttttttttttttttaagacagagtcttgctctgtggcccaggctggagtgcagtagcacaatctcaactcactgcaacctccaccttccgggttcaagcaattctcctgcctcagtgctgaaattacaggtgtgagccacagcacccagcccatcagctctggaaatttcttcatcactctctcttccatgattgccccatccctattttctccatgcctacctcctggaatttccatgagacacacgttgggccatctcattccattttccgtgtctcttagttgctctgtcgtgttttccatctcttttatctctatcctaaattctggatagtttcttcaagtatctttttagttcattaattctttttacagctgtgtcttatttgtttacttacccactgagattttcattttattttatttaattaattaatttrtttatttttgagacagagtctcgctcttgttccccaggctggagtgcagtggcgcaatctcagctcactgcaacctacgcctcctgtgttcaagcaattctcgtgcctcagcctcccgaktggctggggttacaggggtgcaccactgtgcccagctcattttttkgtatttttagtagagacggggtttcaccatgttggccaggctggtcttgacctcctgacctcaaatgatcctcctgcctcagcctcccaaagtgccgggattacaggtgtgagctcccgcaccccgccggccctttctttcttttgagctgagctatgtatttaatgaaaccttttcttgtgtatccagcrgttcagtggtttcttggggcatgtgatctccttgagcccagtcccacaggctgtaatcgaaggtcctcaggccacactccccagccccgctggctgcctgcgcattccttatcttggccatgttccttccacagggctcttgtccacactgtcccctctgccagaatggtttgccctcccccatgccatctgctcctcctcctgccacctcagggaaggcctctcccacctccctgactaggtcaggtcccctcgtgccacagcctrgtgtgtctctcctttaaatactcctcagctgcagttttacgttctgttctgggatgccctggaaaatgctgggctcctgcagatatggcccgcagctcctgcgctctctgctctatccccacccctagcccagctgctacagcagcttccctcggagggttaccatgcagtaggtcctgttctaagctctttccacagattatctcattccatcctcaggacaaccctatgaggtaggatctatgattatccccattttacagatgaggaaagtgaggcccagaaggctaagtgaaggcatcctcagcacatcctgagagaggagttcagggtaggaatagcttcactagcacacagatgagaaactgaggcccagagaggacaagagtcctaatttgcacagcctggggcctgggcactaccccgagctacttccttttccccagccctggggcccggagccagctttgtccttcccatctcygagggcatggactgctgctgccctgatgggcccctgtcctggccatgggacccctgtcttccacaggttgtcggcrgcttccccagccaggcccaagtcaccgtccactgcctcaagatgcccaagatctcctgccaaaacaagggagtcgtggtcaattcttcagtgatggtgaaattcctctttccacgcccagaccagcaacattctgtagcttacacatttgaagaggtgaggcgggtgcagggagaggtggtggtgggggaacctgactcacatatgggccgcagagggcaggggcctgggggtctctgaagcctccagatccttctcaccacctctgctggcactggttgtctcttgcacatggctccttacaatcaaaatcacatcatgcaagtaacgagggggtacacacgtggtttccacagcttaggtaatattttctctcttttcttatttttattttttttagagacagggtctcactctgtcatccaggctggagtgcagcctcacactcatagctcactgcagcctcgaatcctgggctcgagtgatcctcccacctcagccctcctgagtagctgggaccacagacaaacaccaccacacctggctaatttwaaaaaaaaaatttccttagaggcggggtcttgttatgttgtccaggctgttctcaaactcctggcctcaagcaattctcctgccttggcctcctaagttgctggggttataggcatgagccaccatgccaagcatrtgttctttcattcttatttttatttattatttatttatttacttatttatttttttgacacagagtctcactgtgttgcccaggctggagtgcggtggcacaatctcggctcactacaacctctgcctcccaggttccagcgattctcatgcctcagcctcccaggtagctgggattacaggcatgcrctaccacgcctgactaattttttgtatttttagtagagacagggtttcgctatgtgggcccagctggtctgagactcctggtttcaagtgatctgcccgcctcagcctcccaaagtgctgggattacaggcatgagccaccacgcccagccaatattctcctccttaagctgagcagtggacaatggtgtttattacccgagtccacaaccctttattcattagggccacaagggtttccaaattcagaacttctgtgaatttgtaaaagtagtatagtgtatagacactggatatattgcagaacaccccaatagggtgtggggtggcaccccacaatcaattctcctcaaatgcctcaattggcatttctcctcatatgaagcaagataaataccatacatagcttcctagacaatggccaggttttgccaacaaaacttaagaaaaaacttgtagttttcagatcctgtttgattttataattacaaataaggaattaagaatcagtattatctttaatgctccttagaatatcttcaatttttttttttttgagacagagtctcactctgtcacccaggctggagtgcagtggtgcaatctcggctcactgcaacctccaccttcctggttcaagcgattcgcgtgcctcagcctccccagtagctagctggcactacaggcgcgtgccaccacgcccagctaatttttagtagaggcggggtttcaccaggttggccaggccagtttcaaagtcctgacctccagtgatccacctgcctcagcctccaaaagtgctgggattacaggcatgagccactgtgctcggccaatatttcttaatacattaagaactaaagacaagagcgatacaatcacattgtggaaaatatagaaaaatagaaagaagaaaaccactgtcaccataacccccttctccaggggccttcgatgtggtgactgggtgcatttccttctggtgctttgttatttttaaataaattttttatcttggagtaactttatatttgaataaaagttgcaaaatacagagtgttcccatatatcccccacccacttcccgctttgtccacatcttacataaccatgctacagtgtcatagcggagagattaacattggtgcatgactgttaaccaaactctaaactttatttgaatctccccagtttttccactgatgataccctttttcttttccaagatctgatccaggatagcacattgtatttagccgttcttttttgttgttgtttgtttgtttgtttgtctgtttgtttctgcccaggctggagtgcagcggtgatcctcccacctcagcttctcgactagagatgtgcactaccacgtatttttttgtagagacagggttttgccacattgcccaagctggtctcaaatccctgggctcaggtgatcctcccaccttggcctcccaaagtgttgggattataggcatgagccactgtgcccagtttatttagccttttaaatatctctttaatttttgtattactttccttttcatttttctgttttattccttttggctttctcatgtggatgtagacatattattttatttacttatttttttgttgttaagaatctgaaacattgagcatttgttaaaaaaaagaattattcggccgggcacggtggctcacgcctgtaatcccagcactttgagaggctgaggtgggcggatcacatggtcaggagttcaagaccagcctggccaatatgatgaaaccccatctctactaaaaatacaaaaattagccggacatggtggcacatgcctgtagtcctagctacttgggaggctgaggtaggacaatcgcttgaacctgggacgtggaggttgcagtgagctgagatcgtgccactgccctccagcctgggcaacagagtgagactgtctcaaaaacaaaaaaagaaaagaaaagaaaaagaaagtgacttctcrggtcctaaccccaaagccacaggtgctggggaactttcctcggttttcagaagagcagtagctaagcctggttcccgtgtcatccttgcctctccagtccctcagtggaaagaatcaggggccctgagctaggagggttgctctctgcttcgggaagagccctggctcacagcaaatttggtttctctccccaggatatcgtgactaccgtccagscctcctattctaagaaaaagctcttcttaagcctcttggatttccagtatgtgctgcagagaagagagggggcggtcaactccgcaaacctctccctggccccttggagtcaggcacagggcggggtgttggtggggaaatgtggcccctttcttctggggcatatgggctgactgcagggagataagaccctgcctagatagaatcttcgtggggaagaaggggctccaggaagaatggagggagggcctggcaggaggagagcgctgcccragcraaggcctggccgccagaatagcaaatctcaagggaatagcaaatctcaagagagtgccccaaagggsctgagctatgagacaraagcactggctgctattcttagagtttctttcccaggggatgttacaggagggggcccaatggagggtcaaattatcatcgyttttttatttcaggattacaccaaagactgtttccaacttgactgaggtaggtagtcttggatagactgggggaaataagtcctgtgggacctcctgccttaaagaaagcaggcggagggccctaaaggaaatcaggcaaccagaccaaaagaatgtggaccaggtggtccatgctgtgtctcttgtgacccttcttctccctgccatgtcttttgggagagcccttgtgttgcaaaaatgagagtgtggtggtatggattggggtttaggcagaacagtactggccaagcagcgcctccctggacctcaattttccctctgtggaatgggctagcaatcctgggcctccccagggcgaaggaaagaccactcaggaagggcaccgtctggggcaggaaaacggagtgggttggatgtatttttttcacggatgggcatgaggatgaatgcttgtccaggccgtgcagcatctgccttgtgggtcacttctgtgctccagggaggactcaccatgggcatttgattggcagagcagctccgagtccrtccagagcttcctgcagtcaatgatcaccgctgtrggcatccctgaggtcatgtctcgtaagtgtgggctggaggggaaactgggtgccgaggctgacagagcttcccatttcaccttgtgggcccttcccaggcagagcttcaggtgcccctcttcccagtcattgatacttagcggtcctggccccctttcctctccctgctggtggtattgcacgccaatgactcggccagatgcccagacccctgttcttggtttacctgcagaatattatctttgccaccccgcgggatggctcaacccactttcaggatgcaggtctcctaatagcaacctgwtatagcagaaagasccctgggctgggagtctgagacctagttctagcccagccmtgaacctcagtttccctttctgtgaaacaagaaygttgaacttgatgattcccaattttccttttgaccttgaaatggtagaatatttatccctttgaggtgactcggatggtagactctcagacaccatagcacacgtgtgctgggggtattttggaccagrctctgctgagagctttctgctcccttccccacagagtatgttgagctgactgtgctttccttttgaacatctgcttgtccacatggcttaggtaggagaggaagggcgtggaaactggaatgatcctagtggggtgtcttggcatctcttggcctcattttccccatctgaaccatgaagctaaaactaggggatgtggattaaatggttcctacaactacttgcaaggagaccactctgtgtggttgcaaagaacactttgagaagctgtgtgggaaagtttccttcctagcagggtagaytcagctaactgcaggtcatgtggccattgtggatgggttgggagctcaagtttggggcagaagggaattttttttggcagcagagtggcaagccctgccgccaggcaaactctgctcttcctcatcctcagaagcacttgctcactctgctaaatcaaagtgaaacgcatgtttacagaatattggtccaaaagggtctcagcatctcccactacycagggtggcagagcctcgggccggccttgctccccaagaagggctgactggggctctgtcccctgccccagggctcgaggtagtgtttacagccctcatgaacagcaaaggcrtgagcctcttcgrcatcatcaaccctgagattatcactcragatgtgagtacaaagcccccctcaccagcccctgttcctggggagagaggcccagacaggattcctggggtgactgggggctgttggggagacagacagaggggcctctaccagcttggctccctcctggtggcctgggagtcagcccagctcrcccctctctcctactgcccctcccttcagggcttcctgctgctgcagatggactttggcttccctgagcacctgctgrtggatttcctccagagcttgagctagaagtctccaaggaggtcgggatggggcttgtagcagaaggcaagcaccaggctcacagctggaaccctggtgtctcctccagcrtggtggaagttgggttaggagtacggagatggagattggctcccaactcctccctatcctaaaggcccactggcattaaagtgctgtatccaagagctggggagtccttcttctgtggctggcgggtagagggrgggggaagggattgtctcaccagtgccgtccacctcttttcagcccttccaaggcagctgcccccaaaccctccaagcttcatgatgactggaggaagaaatccaaacttctctccttgggactcacgatcctccctgatcaggtccctggataccttccaaatttatcccctttaacccagcactctccttgtctgaccagcttcctgcaggagctgtcacacactctctgtcccttggggttccagtgctggacagaaagtgagggaggaccagggcttcagatcctgaggatggtgggaggggaaggggccctcagaggtctggtttctggtagaaatggaggaagacagagcctttaaaaaggcaaacgactttattccagaagataaactgctcacgagcctgagcttatttccagctcacctttttttttttttttttttttgagacggagtctctctgtgacccaggctggcatgcagtggcacaatcccagctcactgcaacctccacttcccaggttcaagcaattctcctgcctcagcctctcaagtatttaggattacaggcacccgccaccacacctagctagtttttgtatttttagtagagacggggtttcaccatgttggccaggctggtctcgaactcctgacctgcagtgatccacctgcctcaaccccccaaagtgctcatgttaaatatggtgaaccccaagtttttcttcaaagaatcagtatgtctgtatgttcagctctcttattctttgattctccattttaaagtttaacttcctggttctcttcgcccccttgcttctaatttcagtaaacaaccttttccatcagttttattcagtagttcacacctgttcccctggtcacttgctccatcctgactcatcccagtcacctgctttgacctgagtcacccctggtcacctgctctgatgtaagtcacctttagttacccgttcctaactgtccttcctgccaaactactcacctcgccactctggctcatacctctgctctctttaaaatagccaatcggaattagcttagaccgtgcggtccaaccttagccaacaggggaacaacatagcagcagggattacctgggtcaggaataagaaccccttcccctcccttgttcaactgtgctctcaccattgttccatctatgaggagcaccctttctacagaaactaaaaattgcttgctgagaaaattaaatttatgtttgagtgctatttctttgcagcagtggagaacaagcattcctaacactgggattgcaggcataagccaccgtgcccagcttccagctcaccttcttatgctcaaattgtgtcttctccttcccaccctcaagctacaatacaaaaagtttcttccaaccctctcagtcttggaaggtagcaggctctattttctctgggtgtgtaaagaaaatgcctctcccacattagccaattgagacgggaggaagcgcagcaagatgctggctagtgcaaggtccctggggtagaaagaatcatgatggattcaagaacagtcaagagggctggtgtggccctgaaagcaaagaactaggggcgagagatgaggcccaaccagcaggcagggtcacataacaaaggtgataaaagggcttggcctttatttcagcagccaggagagacagccaggaggctggggctgtggggagctcagaagtaagatgccccttcaagtctgggaatatgtgaggggagggcaccatcttctgagccaggtttcttcccagcccttccctgcccttccaagtgctttctgaggcctgtttctcttcctcccctggggcctaatgcaagtgtctgactcactaagcaggagcatcatgggcgggatgggcggctcttaaagggccctggcagaaggagtcagtgtgatctcgccagtccctgagtccaacgtgggaattctgggtcttgggatattggcctttgaggtggtgacaccagttaggagccacatcccacccaagaatgtccccttgaagaggctgggaaggcccaaggcccccaccttgatgctacaatgacagaatcaggataacttggcagccctaaggcagctcttccttgaatggaaacttttatctgcatgaggggcagacagagaagtcacttggagtcttaacccttgtagaccccagcctgactgggactccagaaggtcccagggctctgctccagaaagaagggtaggggcatgcccccagcttccttcagtgaccttggagaggtctccccagggctgagctgggaggcacttccatgtcactgtctcatccaaggagtgcgattagcaggagatatggagtccagagggtgagaggcttaccaaaatgggactgacctccgagcccctctcccaaattccagcccctccatccaagcctagaagctctgacctagtcctattgaagtcctcctggcctgggtgtgtgttggggggaatcctggctccaacccagttaggatcatttccataaagaaggccacacctgctgcttcctctggggaaaaacaagtgctccccaaggccagcaccaggcagaagcacatcctgccacctgggctgctgaccttgggcaggatggggcccgggtgtttggcaaataggaagggtagagggaaggcctggctttcagacctgggtctaatcccagctccccccaaccccagttactaattctgccatcctggggcccctctgtgcctccatttcctcttctattcaatgggatgataatactttccatgtaggattctggcaagggctgggttagcccagaggaggagcccatggtggccaagagcaggggctgcagagctggcctgcctgggtccacccttctgctcctctgcttctgtgtgatcttggccaaattatttagcctctctgtgcctcccttttctcatctgtaaaaagaaagataacagttgccatgaagagtaaaggagaggccgggcatggtggctcagacctgtaattccagcactttgggaggctgaggcaggggtatctcaggagttcaagaccagcctggccaacatggtgaccccccccatctctactaaaaatacaaaaaaattagctgaatatggtggtgtacacctgtagtcccagctactctggaggctgtggcaggagaactgcttgaacctgggaagtggaggttgcagtgagctgatattgtgccactgcactgcagcctgggcgacagagtgagactgtcttaaaaacaaacaaacaaaaagattaaaggagagagcggctgcattttgggaggccaaggcgggctgattgcctgagctcaggagttggagaccagcctgggcaacatggtgaaacccggtctctactaaaatatgtttttaaaaaaaattagctgggcatgcacctgtagtcccagctactcgggaggctgaggcaggagaattgcttgaaccggagaggtggaggttgcagtgagctgagatcatgccaatgcactccagcgtgggtgacagagcaagactccatctcaaaaaaaaggagagagcacagtgtctggtatatcctaagtgctccacgagtgccagacattggttatacttcatggaggtgaggtacacagaggtgtctaggtcatgcggactcactccatcctccagttaaccatgactccctccccacccacctcctgagttctctctgctgtcaaactttcctctcatatctccagtttcccacccaaaagtccaaacactcaagattccttctcatctccaacccataaaatctgatcggcttctccacactcaagtgtaaatgactgatggccatttgattgacactggaggggctggcacatttttagcacatttttagccaaaggtatgatgtgctgatagcggactctcaggccacaagccagtctgaggacagggaaagtttgaggaggtcactcttccagaaccctttggtgataacctttctggcaggcctggtacccccagagtgaaaagggctccagggtcaagacccagctctgcccctcattgctgtgtgaccttcagcaactcacttgatttatctggacctcagcttcttcatctgtctaatgggataataatctttgtcctgccctcctcacagggctgttcagaattaaatgcatctgaaaatgatctgcatttgtgtcttggactgtggttatttgttcaagtgtctgtctaccctgcctgcacagggagcgggtcagggtcttccctgggacttcatgcacaggtctttcctgggacttcatgtaggaccagccatcccgtcagtgctcagtgaacatgagctgcttccctgtgggatgtctgggaggtgagtggaaggccttcctagcaggcacatactggaacataatcaatccctcccatgcatacagctcacacccacattcttatccattcccaccatgcccctcagtggcctggggagactaggaataccccacttgacagataaggaagctgaggccaggggaggtcaaggcatttgtctgaggttgcacaaccaggagtggtgaagctgggagtcacacacaaggaatcactgcaaagtctgtgtccttcccactctgagtaggacttgaaccagggatgtccgatgctgatgcttgtgtcctgaccactaccttgcagcgtcctcacccacacccaccccaggcctgggaggcaggggagcaccagcggtctgggagtgaaagttgcttccctgtgggatgtctgggaggtgggtagaaggccttcctagcaggcacagctgcccaccggatgagtatgtccagggggagaggagccccctgtcccaggatgtgggcaaaaacctggagaagctgaagctggactttgaggatggcccctgaccccatcctgggacagccacctccccttccttctgccccctccagtccctcctctccttccctgctctccctcctacctctttccatctccccctttctgcctgtgattcctcctgtgactggggcaagatccttcacctctgtcctccctgagcctcagtggctcacctggaacatagggtgatgcctgcagaagtattttagggttactttatgagataaattggtagactgtttttcccgggtcagccagccaggggttcggtgaataggagcgaacgctgctgccattcccttctcccctagttcatcctggaggctctccgctctccccctggttctaagtcccctcctcctgcaccgtatcccccctcccatccaacccagtccccactgaggcactgagacagggtcttggcccagggtccccacccacctgagctccgcatgtgagccgaccttcacccgcctgcctcagtttcccgtccacgaaaggggtgagcgcccccacgtctcctgggactgtccttgggtccgatgcggggctgtggggaggtgccagggtgtgggcgcagcagggagcgggtgtgttaggcccccgcccatcccgcgcccgagccccatctggctcgggctggcacctcgaatccacgtgatttctcggcagcagccgccagttccatgcactggcggagcagctctaggcggcggcttctactttcagtttcgtgcagagcgcggaggagccgcgagcgctgagggtgagtgccgggagctctgagggtgagtgccgggcgtgccgcggggctgcgggacccgggctggggcgagcggaagggagaggatcggggttcgaattctgcacggagaggggtggaggggatgtcagaggccctggagcgggaggtgcgggtggccgggtggctggccgatggatagctgggtaagcggacagggcgccagtggcccggcagcgcgcacagcatgcgccccggcagtttggaggaagag

SEQ ID NO: 5671 - DNA, 41396 bp, Homo sapiens
  misc_feature (1)...(41396): n = A,T,C or G, or insertion/deletion polymorphism (see Tables 1-2)
ccagccgtaagctggcgcttcagccctcatggactctctacaccctaaggaacgagccctgagatctgggttttgatcctggccccatcactttatctctgtgtgcctctttattgtgtcagtcagctactggtttgcttgcaggtctgtgggatggaggtgggatgggaggagtgaagcagccaggctatttctctcctctctgctttctggcttcacctgcagttggttgtcttccttccttccccacttccataatcccatctcctaccagtagtccacactatttagttcctgccaaatggctctggaggcttcttggtctttgatgctacatcaccctgccatctttccaggcctagagatggtagctgcttcccgctctgctgttttctgagctgcctcccattgtcttctcagctcctccatcacccatgtaccagttagttctctgtgttaaacttcttctgtttgaaagacttagagtgtttcttgtttcccagctggatcacgaaagacaaatcttaccaataaatggctactataatgcccagccatccccaggaggataaagggagactccaggggtgagaaatccacaggttcaccgcgggcagggcattgtctttactcctgtccttttgtgtttttcaccagagcctcctgagactgatttccactgggcaacaccagacccagaccgagcaccccaggacgcctagaaggtgtgtgagggtgggactcttctcccaggccttcttccgaaggagctgctgagagagccttctttccacaggcccattaggcatccagaaagggggctgatggaaatggattcttcttcttcttcttcttcttttttttttttttttgagacagagtctcagtctgtcgcccaggctggagtgcaatggtgcaatctcagctcactgcaacctccgcctcccaggttcaagtgattttcctggcctcagcctcccaagttgagtagctgggactacaggcatgcgccaacaggcccggctaatttttgtatttttagtagagatggtgttttgccatgttggccacaggctggttttgaattcctggtctcaagtcatttcgcccaccttagcctcccaaagtactgggattacaggcacgagccactgtacccggccaggaatggattcttctaaatactttttctttctctcttcttctccactctgctcttagctgactagtgctcttggaaatggtctggcaaacacccagaagtgcataacagatgagggttgtccttttccagagtatttgcattttcagtggtgacaatgccttaacccagtcttttcaacgggggtgactttgccccccagaagtcatttggcaatatttggagatgttttggtcacaatgactcaggaggtgctactagcatctaatagatggaagccagggatgctgctgaacatcctgcacaggattgtagataggacagaatcatcctgtcccaccacaaagaatgatacagccgaaaatgtcaatagtgccaaggttgataaaccctgtcttcaatcaaagtgataaacttctagtagtgaacttctttttttgtttttttttttgttttttttttttttgagacagagtcttgctttgtctcccaggctggagtgcagtggcacgatcttggctcactccaagctccacctccccggttttatgccattctcctgcctcagcctcccgagtagctgggactacaggcgtgcaccacttatgcccagctaattttttttgtaattttagtagagacggggtttcaccatgttagccaggatggcctcgatcccctgacctcatgatccacccgcctcggcctcccaaagtgctgggattacaggcgtgagccaccatgcccggccaacttctagtagtgaacttctaagtaaactgccaggggactagatgaagagtggcatttttctggtccatcattttaaatgaaagagaaatctgtaccacataagggcagctgaaaggactgttgtcttccacagtgggcagcccccagtgtgaagtggctaattagctccaagtagtaagaataaagagttgcatttaactaagtaactgattcttatcctggaaaggatagaagtgaacagggaaaagtgaagaaaatttagataaattaatagaccacaaataaatgggttgtcagaggaagttaggatgtttgaagttttgcagatgctttttcgtagcatatcccgctctgtcaaagataaactaggaaagacgccagttctgctgtcttctgcagactgggtcagcaaacagtgaccgctagacactgaggtcaccaagatgaatacgcctggtctctgtccttgtgttgcgggaagtcagggaccccaaacggatgtatacgtacaaacacacatacatcaggataatagtaaataataataataaataatagtaaacagtggtaagtgcagagataggctctccctaggagggtggagtgattacttccgtcatctcctgtccgcggagaacaagaggcaggaagaccctttgcactcataaccctcatcccatggcagcccctctggtttcacttctctccctgcagccgtgcatattttatggccacaccacagggttagaggatagctggtgttgggaggggaaggcagccctgggttggcgggaagggctggggctctgggggagtctgggggtagtcctgggaaggcagggggtccttccaagacagagtctacaaagctcttgacttcttatagaacaaaactgtacttctctcaaagtcagagaaggagaactgggcttggaaaggagtggcctggttttcagtctgaccccacccctaactcctgggtgactgtggccaagtcactttgcttctgtgggcctcagtcccctcatgcatgaagcagggggctagatgcaaggtcagctggaaaaagtctttgtgcccatctgggttgccttacccaccccttcttgccctttcattttctcaggtaagatcaccggggcccatagaggtcaagtgcctttctcaaagtcacatagtttaaaagcaaaaataggggctgagtatggtggctcacacttgtaatcccagcactttgggaggctgaggcaggaggactgcttgagcctaggagttggaggctgcagtgagccatgatcatgctgctgtactccagcctagaggatagtgcatgatcctgtctctaagataaataagaaaataaaagcaaaaatggaagttgtagaaacatacctatagcatggtctctgtcataaaaaaagaactatatattttgttttttaaaaatacatgtaagtttataaaggcacacaaaaagatatagacagatatacaaattatggtggctcccctttggggagggaaaggaaggggactaagggaagctctatatacttctgtattgctgaaaaattgtactgtgacaaaaacatatttgtgtattatttgtacactttaaaagatcatctttaaaatggacttctgaccaaagtccaggtctcagatttctattttcctcacaacaccaagcctgttctagcccgctccaggtctagaatgctgcagcactaggctcgcattgccactcccatacccggcaggacgtggcagggtcaccaccctttggctcagcccagaccaggcattgcaattcttctcacagagcccttgatatgaaaactatttgccatgctgccttaagctagtggttggatttcaggcatgagctggcaaatagaaaaggcagggaggtgcttttcagaacctttgagatcaaacagccagggtgctgagcaccttattgcagggaggaccatgcccaatgtaaggacctggctcaagggagactggagtttctaggggtctctgggatatgtggggcagtggggacagtgcagagaccttttcacagagccaaggagataacccagcacccagagagcagacgaatccacgggctctgtgtgggagtgagggaggccttcccggctttcacatccaggtgcacctgagccccgatcccccatgagtctgtctcaggaagtaaatggcaaaagcgctaagtagatagccccagaggaggaggagaattctgaattctgtttatagctctgctcctattttgttttctaacctcagaaaactgatttatccttgggaagggtcagtttcttcattaggacaatgaagaaaaatccagctgtcccttccaaggggaggtatcatgagcagtatcaaggtaagcaagggaacctggtttggaatcctggttgacaccggctttcactttaagaagtcgcaagagactgccgcaagagaggaagccacagaccaggttggaccctgagcctggagtactgccttttctcttctttgcctgctaaactccttgcttgtcaagattcagcagagatgacaccttctctgggaaggcttcctgagtctcctgcagtgagcccctaggctcccctagcccttggctcttatgtcttatctctgagaaatctgagatctgcacttttgttagaagtccgttttaaagacaatcttttaaagtgtacaaatagaaaccttatcttattgtattgcaggcctatctcctcccccggtgtgtatcaatgctcaggctgggcctttgtctgctggcttgtggagggaggcaggacaagccagtgaccacattcctgcactctgggctgcctcctgtggggcccgtgaggaagcggcagccttccctgccgcgtgcagggcctgggttgtgtgggtggctctcccgagtctcctccagccctttttgggtctgattctctgaccctcctctctctccttgctcaccacttggcactccactccttatccttttgctgcattaagtttggaaagagattttggagaaaatatagcccatcaacgaatttctcctcctcccagggcctgtctaggcgtgtgccatgcccaccctcttcctttccagcgctggccacatcctccctgcaccttcagtgcctgctttccctgcctcttcctgggctccgggtctgtgtccasagtgtcctgcgtggccctcgcgctgcctctggtygcccacattcctgcaactctgtgaccacagcaggggcgattacacattcctggcctggcagccaacagtgtaaaaaagaacagaatgtcctagggccccgcctagcccccagcttcacctgggcccctcccgggtctggacaaggttggagggggtggcgaggaatcagcaggaaagaggagggaccaggaggaggcagacgcatcccacctgagtgcgctgctcccacttagtgagcggggaggagacctgcagagacctcttctctcttctctgcagggcctgagggtgaggctgacctgtgggtgcccttggagggctgcccacttgctgagcctctagctcctggaagcacacttgggactccccccttgctctccttcctggagacagactccctttggtgctggctccttctatttgcccccaccactgccccccacctgcctctactcactcagtgcccctcctccatccctatctctctgtccttcgctgtccctctctattgtctccctctttctgccctcctgtcctcccggttccccacccaggccctctcagcctggctggccccttctccttgtgttgccctcctagctgtgggctcaggatccttctacttgttcagatctttgcccctcacctgccatcctgtcccccagcctccttgcctgtctgcgtctaaagcccctgcccagagtccgccttctcaggtccagtactcccagttcacctgccctcgggagccctccttccttcggaaaactcccggctctgactcctcctcagcccctcccccygccctgctcacctttaattgagatgctaatgagattcctgtcgcttccatccctggccggccrgcgggcgggctccccagccaggccgctgcacctgtcaggtgasggggaggagaggtttggctgccagattcaactggaaaggaaccagtcycagtccagccgcaacctgggagtgggaagctggaggcagcccagacctcctggagccctgcagtcctggggcagagacagaatcaggacacagctcgaggtcagggccagaggctggagctgagggcctagagtgagagggggcaaggcaagrkgggragaggaagagaggcaggattagagagaggaggcaggccagaaagaggagagcaggagagacccaaagagaaacagaaggcagatagagagggagtgagaggcaggagctgagacacagatcctggaggaagaagaccaaaggaagggggcagagacagaaagggaggtgctaggacaaaactcgaaaggtggccctatcagggaagcagaggagaggccgttctagggaagcccagctccggcacttttggccccaactcccgcaggtctgctggctccaggaaaggtggaggagggagggaggagtgggagaatgtgggcgcagggtgggacatgggcatggccaggggcagcctcactcgggttccaggggtgatgggagagggcactcagggcccagagctcagccttgaccctgacccttgctctccccaatccactccggggctcatgaaggggaacaagctggaggagcaggacccyagacctctgcagcccataccaggtctcatggaggggaacaagctggaggagcaggactctagccctccacagtccactccagggctcatgaaggggaacaagcgtgaggagcaggggctgggccccgaacctgcggcgccccagcagcccacggcggaggaggaggccctgatcgagttccaccgctcctacygagagctcttcgagttcttctgcaacaacaccaccatccacggcgccatccgcctggtgtgctcccagcacaaccgcatgaagacggccttctgggcagtgctgtggctctgcacctttggcatgatgtactggcaattcggcctgcttttcggagagtacttcagctaccccgtcagcctcaacatcaacctcaactcggacaagctcgtcttccccgcagtgaccatctgcaccctcaatccctacaggtcggttagtccctctgccccttccctggtgcctgcgcctggaagggtggtccagggtgctgaggtgctcrctgggcaggcagagcctcagacctgagggtgggaactgacacccctgtcccaggtagagctcactgctggcaaaatgaggagcctccagcttactggactggcgtccctgcccagtggagccatcctagcaccccaggctcacccagagtgtggttgttggagcagcattgccctcccctgccctctcttctccttccctcccattcccttctccctcctgcaagtgggagggagtgcttgcaaaagggcaggggtgtgctcagctgcatcccttttctggagcaagatgccagcaaagtataagacctcgtccacctcagcaggagagtctgatggaggggtgaggctaggtgaggggaggcgagaccgtgcaggtgctgtggaggtggtgctgtcagtctttgtttagaaggggaatttattatggagaaagcaaagagggggatcgtggaggttagggctgcaagtgagcccaaaggctgggggcaggggccttacagaacaaggagaatgggtcaggctagagagcagctccttgtgaagctcttcccccaaaagacccaggctaaaatgctgcactgttgacctgcccaggtgcctgacctttacgtgcttgggtgtgtcctgaacttttgggtttcatcggtgctctttgccaatgttgggtctggaaacyggagcaggtggtaagcgtggagaagagaggagggcagggctgagtgcttttgtataccttttatttgtattcactcagccatgccacaccttgggaacacctgcttcaagccagacacagggctaggcacctggcaaaatggattcatgaataattcataagccctttattgaaggccaggtagtttgctgtgttgtggagacagataaaataagatagcagagacaggcatataagccagtaactgtggcacactgggataagtatgataaaaatggtgagttagtgtaccttcaaggagtgcaaaatctttatgggtgtgggtgtgagtgtgtgtgtgcacatattggtatgtgtgcgattttggatgctggggattggtcatgctgtgggtggaggccccttcgtatattccatcatgtccaaaggtgcgttacggactaagaaagggtgggacgtcctgtcctggagagagagagaaaaaaaaaagccaggtcatttcgttgattaacgtctgtataatgtcccaggtagggaccatttccttaggaagctgccgtgtgcacagacgctgcgaaggtgtcttgggtatctcatttcattctcacatcttacaagcccggtgctattgttatccctattttacacttgaggaaactaaggcaaagagaggcaagtcacaacatcacagagagagtgactgagctgtgactcatcctgtttacgcctaatcccaaaactctgcctctttttaatacccaagatgtggggctttgagtgaatgaaacttccagtcagatgtggcttccgcctcatttcagagctctcttgggtccttcctcttagcctcatttttctccccctgctgcctgcagacatcttcacccctttaggccttggtggaggggagggacccagcaggaaggggaaggacagcaggcggggcagtgggcactcaataaatatttgtggttgaaaatatgtcagtgagagatggaaagggagggcaggggtgaatcgggtgaggcctgcacagttcttaggttctgctggatgcggggccctagacagtccaggaaaaagccggggaaaggaagccataagccctgcctctggggcctgcaggctgggaggcagccatctgcccagaaagaatccctccttcttgaagggctgctgtgggagtcgggagggagagaacacctaggagaggagaggagtcggggaagggctccccagcacagcgggaggagatgcaacacccaccaagcactacacacttgaccttgtagtcacattatgtgctacaccctaaagctgggtgctttatagacactctctcatttaatactgacaagtccagggaggtgggcagtattattcccatttttttagatgaggaaattaaggcttggcaagaggaaataatttgagcaagggaacatacattatttatttattaaattaaaaaataaccgctgggcatggtgcctcacgcctgtaatcccagcactttgggaggccaaggcaggcattgagggatctgggatggagctcaaacaaggttgtttaaaagagcccctcacttgaggccaggagttcgagaccagcctggccatcatggtgaaacccccgtctctactaaaaatacaaaaatcagccaggtgtggtggcgcacgcctgtagtcccagctacttgggaggctgaggcaggagaatcacctcaggaggccgaggctgcagtgagccgagatcacgccactgcattccagcctgagccacagagtgagacacagtctcaaaggaaaaaaaaacartaataatgtttgtatatatttatgggccagactttttacaaatgaatctaaatcaaatgattctgctttaaattatttaattctcacaacacaccttggaagtaggtctcatgatgactcttattttatggatgaggaaactgagtcccagagagttaagtaactgcctcaacttcagacagacaacaagtggtgaaactgggactcaaaaatcatcccccgccccccgccccacccccacccccaccgtccaccctcacccccaccccccgcccccccgccacgctccaatggaaagccagggcatctcaggttagcagctgagtcacaaacctagtgtgtttgatttcaaagctcttttacccattacactttaagtagggatcaggcaaagacctcccagggtcgggggcagctggtgggagcccagcgggcagagcagcagtcattggaggacaatttgtcaggcgtgcaggagggagggatccagggccactcctactcaggagagtggcagggaggtaaacaggttaatgagccccwgtgagtgaatcaccgggagcgcagtgaatgactcctaccgaggagatcggttgatgagctagaggaacyggagtgaggcagagctgcccagggctgcctacctgctgagggtcgccaccagcagagggagaggaggaaagtggacatgcaggactctgtgctgctttctaacttcaaggaaaggggacaaagcactgaagacctttcagactaagcaaggaagtgctgagtccgaagggaagggttggccactgcagcccctttctctctggtcaacaaagggcttcttcactgaaaggagagggccagtcatacctacagtcatggaaaacagagcccacagacatatttttcatccagtcccaggaacggtttaggctggacccaagaacttggggttcttgaacaatgaaggaggtcatggtagcttctttcctggaaatggcacagcaggaggccaggagtgggtgaagcaaggggcagtttcccagagagagctcctgtggggaggatgggaaagccctgagctagggaggccgtccctgcctgtggtccccagacgtggcgggcagaccctgcattccctgggcagtctggacaccaggctgtgctcagyagggctggcaggaaaaaaagcctggactgttgagagttgacatccctctaaccctgccatggtggttggatccttctcatcccaggtgggatggggcctaggcggctcccacggctgttaggatgagcatgggctcttctgtgagaggaggccaccggggtaagagggagggaagaggaggagagagcagagtgtcagcctccaagtctcccagggtccttgcaccctgctgctccgtcctggacacggaagaggggctagaggggagagggccagctgcagggaaaggagattttgctgcctgatcccagatgcttcagagctgggaggcagacacagtggaaaaagcaggggccgtggagtgaacaggcctgggttcacatcttggctccagtccttcctggctgagtgaccctggggaatttgcctagttgataggcctcagtttcctcaactgtaaaatggggataataatgcctgcccgatggaattgtgtaagggttgactcaccctccaatgtagggctgcctgccagagcagatgggagtgagggcagtgagcatgacctgaggaggaggtcaaggccagaagggctggactgtctggaagaacccactgtgggcattctttatcccttccctccagccgctggtctcctcaaaacaagatcggatgtcttcaatgtgctttctgtttagtggtcaattctcttagctctaggtgtcaactcaaaggctctgcctcctgctataggaatttctagtatcacggggtcatggagggagagattttttttttttttttttttttgagacagagtcttgcactgttgcccaggctggagtgcagtggtgggatcttggctcactgcaagctccgcctcccgggttcatgccattctcctgcctcagcctccagagtagctgggactacaggcgcccaccaccatgcccggctaatttatcatacttttttagtagagacggggtttcgccgtgttagccaggatggtctcaatctcctgacctcgtgatccaccatcctcggcctcccaaagtgctgggattataggcgtgagccaccgcgcccggccattccgtcttatcttatgccaaaaaagaggagcagtagaccttttgggagagtgaaggtggggccctatggaacccagcctcctctggaggccttgtcacaggtttgtgtgtgtgggatcaagggctgggagcccaggctgtgctcagtgggggggctcatcagtgaggccaggcaggagggaggcgcgtagggtggcaggagggaggtgcgtagggtggcaggagggaggtgagtagggtggcaggagggaggcgtgtagggtggcagcatggaggaggaagccgggcacagagatggcatgggggctccccaggggagaggagtgtggccagagaagtgacaaccagattgaagttggtgatgagagagagggaggggcaggaggcagaagggacttgagccagcctggggaaggagtggaaagggaggcccagccaggatgtggtggaaataactccaggcaagtgggggatctggattcttcctgtgtgaccttgagaaaggcaaattcgctttcctgggctcctggctcctctgtgtcttcctgatagtcgatggtctcttcactttgtgtcactgagtattttctcacttaaccccccaagagcttcatgcggtaggcagatctagtgttatgcccattttacagataaggaactcagactgagagtcagaaaggctgggtcacttaccccgagttacacagacagaaagtgtgtggctggaacaccaggccctacatctcagagaggttctggcttgggtgctctttctggggcaccatgtggccctcctaaaatagccagaggtagcagggacggaccagagggcagtgtggtggttggagtgctgtctgacccatttgctagctgtgccaactggaataagtcatcatgcctcaggtttttcacctggaaaagggaatgacaattgtgttagctaacagtggctaacggtatactgtgttacactgaagattaaatcatgttaaataagttttagcctaaagttgcctctttacatttttaaagtttgtcctaaaggtttcttcatgcatagtgaactgccacctaactagatatgtaaacacactataacctacctttatagcaatcacagagttttggccaatgaaaggcagcccacttgtcaaaccttgtccaaataaggcaaacgccggsggtgtaaccaatccgggtgtttctgtaccttacttccgttttctgtrggtcactttccttttcctgtccacgaatattatcgaatcatgcagcagcccccagagtcactstgaatctattctggttgggggcrgggggcactcgattcgaggttcattgtttgctcagtgaaactcaagttaaatttaatttgtttaaagtttttcttttaacaattaaataatgtacattctaataccacagtgcctggctcataataagtgctcrataaacgctagctatgcttgccattcttttaattataaataacgagcaagtctcttagaatgccaaacacaccttcaaccagagctacattttctcctgtgagaagttcaggggctgccagagctgatgcctaaggcccagccagctagacttttctggtagagatggaaatagagctgaatggaagaggaagtgaagatctggactagacggtggttaatgtagctgcacgttaggaccacgtgggggctctttcaaacaaccttgttctggctccagcccagacccattaaatctgaatctggcaagtaagaccctgcactggtatttttttctttaagtgaggcataattgatgtacaataaaatgaacaaatcttgagtgcccactcaggtttgacagtcgagatgttgaacactcccattacccggtgccccctttccatcaattcctcttcctctcccactgtcattttctgaatgctatctctatcaactggttttgtctgttcatagaattcgtataaatgggatcatacagtatgtattttcttgtatgtgtgtctgacttattttgcttaatgtttctggaattcttccctgtgttttttgcacgtatcagttcctttttattgctgagtggttttgatgagcctattctrgttgaggggctgcctgatttgagcatcgttctttgctcaagtcaactctgttaaatttaattttgcctaacgttcttcttttaacaattaaataatgcacattctaataccatagttcctggctcatagtaagtgctcaataaatgctagctatgattgccattcttttttatttttttaagacagggtcttgctctgttgcccaggctggagtgtagtcacacgatcacggctcactgtagcctcaaactcccaggatcaggcaattcttctgcctcagtcttctgagtagctgggactacaggtgtgcaccaccacatctggctaattkttgtattttttgtagatacaaggtttcgtcgtgttgcccaggctggtctcaaacttctgagctcaagtgatccacccacttggccttccaaaattctggaattacaggtgtgagccaccatgccccgcrgattaccattcttttaattagcagtaatgagcaagttttytagaatgccaaacacacaccttcaacacacctttgagttgcttcaggctttttggctattataaataaaatggctatgaacattcatgtacaaatctttttcttttttttttttttgagatggagtttcgctctggttgcccaggctggagtgcaatggcgagatcttggctccctgcaacctccgcctcccgggttcaagcgattctcctgcctcagcctcccgagtagctgggattacaggcatgtgccaccacgcccggctaattttgcatttttagtagagacagggtttctccatgttggtcagtctggtctcgaactcttgacctcaggtgatccacccaccttgccctcccaaagtgccgggattacaggtgtgagccactgcacccagcctcatgtacaaatctttatgttctaatgtgtttcgggtgcggcctaaacaccgtaaattaaacacagctcactgtaaatccctacattccttcttaatatgttcatcaattgatggacatttgggttatttctactttttggctattagaaataatactggtatgaacatttgtgcacatttgtgtgtgtatgttgtgggggcatatgctttcatttctcttaggagtggaatggatgggttatatggtaactctatatctaactttttgaggaacttccagattgttttccaaaatgatcgtatcattttatattctcactagctgtgtacagggtcagaatcttttaaaaatgtaggtctgttcggctgggcgtggtggctcacgactgtaatcccaacacattgggaggccgagacgggcggatcacgaagtcaggagatcgagaccatcctggctaacatggtgaaaccccgtctctactaaaaatacaaaaaattagccgggcgtggtggcacgcacctgtagtcccagctactagggaggctgaggcaggagaatggcgtgaacccggaggcggagcttgtgagccgagatcacggcmctgcactccagcctgggcaattgagactccgtctcaaaaaaaaaaatgtaggtctgttcataaagtgcctactacatacggttgttctagggattatttgttagatatttttcttacaagagaattttgcctaccccaaggtcaggaagatatcttccatcttctagagtgtttatggttctgaatttcatgtttacgttatgatccatcttgaattaatttttgcctgtatagcataaggtagagattgagggtcattttttttccaatacagtattcagttgttctagcagaacctgctaacaaattttattttctacactgaattgaattggtgttttggccaaaaatcagttgaccatctatgcatgagtttatttctggactctattctattccattgatctattgtctctccttaccaagaaccgcattgttttgattactgtggctttatagtaaatactaaagtcaggaggaatacattttccaacttggctcttcttttctaaaattttctagctattctagattgtttgcatttccagataartcttagaagcagtatgtcaatttctttaaaaatacctgctggggccgggtgcagtgagtggctcacgcctgcaatcccagcactttaggaggctgaggctggtgattgcttgggctcaggagttggagtccagcctgggcaacgtggtgaaaccccctctctacaaaaaatataaaaattagcttggtgtggtggcacacttttggtcccagctactagggaggctgaggcgggaggattgcttgagcccaggaggaggctgcagtgagcggcgattgtgtcactgcaccccagcttgggtgacagagcaagatcctgtccaaaaaaaaaaaaaaagctggaattttgatagggattgtgttgaatccatatatatatatatctccacttattctgatctttgatttatttcagcagggatttcaatatatttttcagtcttgcacatcttttgttacatttatttctatgtatttgatgttgtttatgttatttaatattgctgttgtatttctggttttccaattttctgttgccagcatgtagaaatgcaattaatttctttttgagacggaaatgcaattaatttttttttttttttgagacggagtctcgctctgtctcccaggctggagtgtagtggcgcgatctcggctcactgcaagctcygtctcccgggttcacaccattctcctgcctcagcctcccgagtagctgggactacaggcgcccgccaccaagcccggctaattttttgtattttttttttttagtaaagacggggtttcaccgtgttagccagggtggtctcgataccctgaccccgtgatctgcccacctcggcctcccaaaatgctgggattacaggcgtgagccaccacacccggcctaaatgcaattaattttttttgtgtatttgttgtgtaccctgcaaccttgttcagtttgttagttctatatttgttttgttttggtagatkacatccctcaggccctgctactctggactttcatgatggagatggtaataggaattgtattaagaaggaatgtagggatttacagtgagctgtgtttaatttacggtgtttaggccgcacccgaaacacattagaacagtctttggaggagggaggcggggtgggtggggcatcctgtatttttagagttggagattctaaaagttcagttgtgaactcttgatttcggtgccaagcggcactcaagccgaaaggccaccgacactcgcctgcggggatcagggcgggatgacctgggtaccgcggtcacgccaaggccgaggccctcacccttcccctctttgggaaagggcagacaagttccgggttcccttctaggtccgggcgagggggagagcgccccacagacgacaggcgcctcctgcctctctccttcaataaacagtccacagtgtcccggctgggctcgccgtggcctccgccttcccggcggacacacctgtttacccttcaccgccggacggccaggaggcgccacgacgaccccagccccgcccaggcttctccgggatggaccggcctcccggggcacagatgaggaccctgaccccggaggggccagacactcgctccagggcccctggcctgaccctcttcccctcgccccttcaggtacccggaaattaaagaggagctggaggagctggaccgcatcacagagcagacgctctttgacctgtacaaatacagctccttcaccactctcgtggccggctcccgcagccgtcgcgacctgcgggggactctgccgcaccccttgcagcgcctgagggtcccgcccccgcctcacggggcccgtcgagcccgtagcgtggcctccagcttgcgggacaacaacccccaggtggactggaaggactggaagatcggcttccagctggtgaggcccgcagcgccgaggggcccgccccgcccctcgccggcccctggccccgcccacccatgggctccgctcctttcctgacccgcccgcgcagcccagtgacaccacgcggggcctcgtgggctcgcgggcaaaaaaaaaagtaaataaatacaaataataactagataattaaaataacacctcttggtgcccaagcttttggggcctcctccctggggtcctatgtagaagcatttcaggggtaggaagtcaaatttattatggaaaatgaacttttattattattattattattattgttttactgtttctggtccttgattcaggaaggaaaatgcaactttctgaattccagtgcccactagtgggactcagttaggaccctccagcgtgatggagaactgggctaacagcccaagatagagaataaggagacagtaaaaaaaggaaacttagctgggggcggtggctcatgcctgtaatcccagcactttgggaggctgaggcgggtggatcacctgaggtcagcagttcgagaccagcctggccaacatggtaaaaccccatctctactaaaaatacaaaaattagccgggcttggtggcactcacctgtaatcccagctactcgggaagctgagccagaagaatcgcttgaacccgggaggcagaggttgcggtgagccgagattgaaccactgcattccagcctgggcgacagagcaagactccatctcaaaaaacaaacaaaaaaaaggaaacttaattttttttttttttttttgagacggagttttgctcttgttgcccaggctggagtgcannnnnnnnnnnnnnnnnnnnaggaagtcaaatttattatggaaaatgaacttttattattattattattattattgttttactgtttctggtccttgattcaggaaggaaaatgcaactttctgaattccagtgcccactagtgggactcagttaggaccctccagcgtgatggagaactgggctaacagcccaagatagagaataaggagacagtaaaaaaaggaaacttagctgggggcggtggctcatgcctgtaatcccagcactttgggaggcykaggcgggtggatcacctgaggtcagcagttckagaccagcctggtcaacatagtgaaaccccatctctacaaaaaaaaaatacaaaaattagcccatgtggtggcacaagcctgtagttccagctacttaggaggctgagatgggagaattgcttgaactcgggagatggagactgctgtgagccttgatcacaccactgtactccagcctgagtgacagagtgagctcgtctgccaaaaaaaaagaaagaaaggagcaagggaaaatgagggaggagccaaggaaaggagacagggaagttcccattagtaagagtgggctggggactggagtcctagtcccagctcttgctgggacaaatctcttgatccctcagtcttcccatcagtgaaatgggagggaaagtcttgctccttccaccctaggcaggggaggtataaatgaaccaaaaccgtgtgtgtgcagctactggtctcctttcctggcctgcaactcccttaatcccatgctcccctggtccatgctcctagggacttctgcttctcttccacttctgtctttccccactcctggcttccgactcctgtccgtcagtcctcagaaccccagatcactcattctttgcccttggccctgccaaggggcttatccccggctgcgtgtcccctctgactctagtctctgtgtccagtgcaaccagaacaaatcggactgcttctaccagacatactcatcaggggtggatgcggtgagggagtggtaccgcttccactacatcaacatcctgtcgaggctgccagagactctgccatccctggaggaggacacgctgggcaacttcatcttcgcctgccgcttcaaccaggtctcctgcaaccaggcgtgagtcagtcctgcctggctccttgctctccgcggggtccgcttccctgggtcagcctcacgccctgcatgggcagggcccaggaaatgcttgttgactaaaaaaatgccagtgccagcaggccagggggaagcactggctttgkgcccacaccctgccccagagagcgccctacgaactcctgctgctccctgcactgctggatctgagggaagtggcctcacaggatgccttgggaagactggggctttgagaaaccaaaggctggaagcatggatcttggtcttttttgtttttcttttttttgagatggagttttgctcttgttgctcaggctggagtgcaatggcgcgatctyggctgtctgcaaccttcacctcctggggtcaagcaattctcctgcctcagcctcctgagtagctgggattacagtcatgcgccaccacgcctggctaatttttttatttttagtagagacgttggtcaacgtccatgttggtcaggctggtctccaactcctgacctcaggtgatctgcctgccttggcctcccaaagtgctgggattacaggcgtgagccaccatgcctggccagggtcttggtctttctaaggcccctttctccctagcatcaaagctcaaaagggcctaggagatcatctgtctcatactctgttccctgagctgaggctggcagtagtagtgaggtggagtggcatgggttgagggactaaacctaagttcccactctagctctgtcacttcctggccaggtgactctggatgtatcacatcatccttcagagcctatttcttagattgtaaaatggaagtaaaacaaaaaatgagattcattcagtgttcgttcaacaaatagttttgactatctgggctatgtgccagtcactgttctaggcatttggactacatcaaaggaaaaactatataatccatgctcctttggcacttttactcaagtgacgaagatgatgacgataacactcatctcaagagctgtaccaagtgtgtgagatacaaacgtgagggcactttatagaccacagtaaatgatgggtttcattactcttgtactcaaacaggtgaagtgacttgcccttgggaatgggccggccctggctaaggattcttcccaccccactacccctcgggtattcattctgtgaggacccctgttataatgtccttgcaagcagctcatagcagctgcaggttctctgagggctgggagaggctgaggcgaggggggggtccccttctgtaacctctggccccctcctcccctgccttctcctcctgctcgtttattttccggagccatctccctgcctctgcctggctccactctacagggggcattccctcccctgttgctgaagaatggccacagggcaaggtgtcacttcttacccttcacacacactctgcccagtacacgattttgttctgtttttagtctttgcatttgtttgaggacagaaactaccagctgggaagtaagatggtagcaacacctaagcctgagtcmgcccacacctgtcaccaagttcctctaactgtcacctggacacctgtgctttccctatgccctcacccgatgcctccctttgctctgtgtgcctgcctccccatcaacagaaagtccatggacacctgtgctttccctatgccctcacccgatgccctccctttgctctgtgtgcctgcctccccctcaacagaaagtccatggttcatctttatcttggcacttaggcgcttaggtcagctcagagcctcattkctcgcctgggttgttatacccaccactccaccctactgcgttcttttgcctccaaatcctcccttccttctgcaactacaggaacctttgtacttcaaccttacttcacgtcaccacatgtaactattccagttagtcctgtgtgttagtccattttgtgttgctataaaggaatatctcaccgggcacggtggctcatgcctgtaatcccagcactttgggagaccgagatgggcggatcacctgaggtcaggagttagagatcagcctggccaacatggcgaaaccccatctctactggaaatataaaaattagccgggtgtggtggcacacatctgtggccccagctactcaggaggctgaggcaggaggattgcttgaacccaagaggtggaggttgcagtgagccgagatcgcaccactgcactccagcctgggcgacagagcaagactccatctgaaaaaaaaaaaaaaaaaaaaaaaaggaatatctgagtctgggtaatttataaaggaaagaggtttaattggctcagggttctgcagattgtacaagcatggcaccagcatctgctcagcttctggggaggcctcaggaaacttttactcatggtagaaggggaggagagggggcaagagagagagagaccaggcacttttaaacaaccagctatcgggtgaactaattaatagtgtgaggattcactcattactgtgaggagggcaccaagccattcaagagggacccacccctgtgacccaaacacctcccagctaggatcacctccaacatgggggatcacatttcaacatgagacttggaggggacaaacatccaaactgtatcctcctgtttaaaatcgttcagtgtctctcacggcctccagcatcaagttggtactccttagcatggctttctcacccctttcctccccgataactacacccttttcccccaccctataatctttttttaataacacttttattgagatataatttacaaaccataaatgtattcttttaatatgtataatttagtgatttttaatatatttggagttgtgtaaccattaccactacctgtttttagaatattttccttaccccaaaaagaaaccctgtacccattagcagttcttccccattttctcccctcctccaagccctgagagccactcttctgctttctgtctctatggattgcctgtggtggacatttcacataagtggaatcatacaatatgtggtcttttgtgagtggcctctttcatttagcataacgttttcaaagcttatccatgttgtagcatggatcagaacttcatttttatggctgaatactatgatattgtgtagatacaccaccttttttttttttttttttttgagacaggttctcactctgttacccaggctggagtacagtggcacaatcagacctcactgtagctttgatttcctgggctgaaacgatcctcctgattcagcctcccaagtagctgggactacaggctcatgccaccatgcccagctaattttttttaattttagtagagactaggtctcactatggtgcccaggctgatctcgaactcctgagctcaagccatcctcctgcctcggcctcccaaagtgctgggattataggtgtaagccaccacgcccggcccacatttttgcttatccattctcagttgatggacatttggattgtttctactttttggctgttatgattaatgctgctatgaacattcctgtacatgtttttgtggatcctgtacatggatctatgtttttatttctcttgggtgtttacctatgagtggaactgctgggtcatgtggtaactctatatttaacattttgaggagctaccagacttttccaaatggtcacaccatttaacattcccaacagcaatgtatgaaggttctaaattctctacctcctcctcatgctgttgtctgtctttttgactttagccatcttaatgaatccctgtaatcgtactagtgagctaatacagctcttactaaggctagacaccattctaagcataatttcatgctcaacacccctgtgaggttgatatttttattatccccattttacagctgaggaaactgaggtacagagagattaagtaagtaacttgtttggtcccacatctaatacttgttagagccccaggattcaaatacaaggaatttaattctggagtctgtgctctttttttttcttttggagacggagtttcactcttactggccaggctggagtgcaatgkcgcaatctcagctcatgacaacctccacctcccaggttcaagtgattctcctgcctcagcttcctgagtagctgggattacaggcatgtgccgccgtgcccggctaattttgtatttttagtagagatggggtttcaccatgttggccaggctggtctcaaactcctgacctcaggtgaccccacccgcctcggcctcccaaagtgctgggattacaggcgtcagccactgcgcctggctgagtctgtgctcttaaccatcacattatactgattctcataggccactatagtaatgtgcttagtgtgtatctctatgtgtttttgcaaaatctgtatttaatttatataaatggtattgtgttatagatctcatttcacctcttactatttttttttttgagacagagtctcgctgtagtgtgcagtggtgcaatctcagctcactgcaacctcccaagttcaagcgattcttctgcctcagcctcccgactagctgagataataggtgcccaccaccacgcctggcgaatttttgtatttttggtagagacggggtttcaccatgttggccaggctggtctcaaacttctgacttcaactgatccacctgtctcagcctcccaaagtgttgggattacaggcgtgagccactgtgccccaccacttttttttttcgaagctctatgttttaaaacccatccgtgtttctccaccgctgatggaacttgtgcctgctttccatgggggcagcacccaccattatacttgtcccctctctgtgtgcgaagggctcaccagccttcaggactggccacctctgtagcctctccttcagtccttccctgcatctagcctgggctctagaagtgctgacttcccagtacatcctagaatgtgcaccagtatgtcacgcctctgtgcctttgttcttcaaggccagtggaatatcccggatcacctagttccaatctcctcattttacagaatcatcctacattttacagaggaggagaataagcttagaaacaatgacctgctygagaccgtacaaccagaaccccaccstttatctctggccagcctcttctccctcttctctttagtcctcctctgctgctcactggccgaagtcccctttccgtctttgccyggctccygtcgctagctccaagatggcagggtagcagaacacagatcctctctgtgccgtgtggcacatgtgctgtgctacaacccacacagcctccctgttctggaacctgtgatttgctgtgaaattgcagtcctactgcagctgtgttgcctctgtgattgctttctctctgtccccacacctgtcacagatgagttttggacctaccattctgagacatactgatgcaagaggctcccaggaaacacttggtactgatcttcctcccctcagctccgtgctcaccactggtcacactttctcctttaaccctgctcccctcctccccttcattcattcattcattcattcattcattcattcctcactcaacaactatttattaatcatctcctctatctsctagatgacaggatctatgcaactaacccagagatgacacagagatgaatgagatgtggctcctgtcatcaaggagctcatgattcaatggggaactaacacttagatgcatgggcagttagggacatgcaagaatctttgtaatgcaacaagagagaagttacaaggcagcacggaagtcaatgccggtgaacccagatggcctggtgagaggagcctggactagaaggtagatgtgtgaccttgggccagctgtttgagctctctgagccttagcttcctcctctgtgatatgaggatgagactctcacaggctgttggttggagtgactgagggagtgtgagtaaagctctcagcattgtgccagcacatagtaggtgatcaggaaacaaatggctctgaaaggcacaagtcctgtaggagtttaagagagtggacatttctctctgcctcatctccctattccctgcaccacctacactttcctctctgaccctactctctctttcctgataaggaattactctcacttccaccacccgatgtatggaaactgctatactttcaatgacaagaacaactccaacctctggatgtcttccatgcctggaatcaacaayggtgagaagctccctgcttgctccatggcgccctctgcttcagccactcacctgtacttaccttgagctcacctcctagagctgctgggaggggtcctgcctgctgtctctccccaataggtgccacatagtccgttccaggcatgagaggaatcccgtcccaggtcttcctcctgcctccagattccagctcaggggttgccaggtccctttgcgggtcttcctgaacttgcttctcttgcagctttagagactgggcaaggaagggagagtggatttccatctcctaactcttttctaggattcccgcctctgccaactctgctctctctgcacccctaggtctgtccctgatgctgcgcrcagagcagaatgacttcattcccctgctgtccacagtgactggggcccgggtaatggtgcacgggcaggatgaacctgcctttatggatgatggtggctttaacttgcggcctggcgtggagacctccatcagcatgaggaaggcaaggatgctgactgggaggcctggaaggagcgcctcagattgcagaggggcagcggggaggcatgggaggctggagagggagagcatgtggggtgggccttgagcatgtggaggtcttcaggagcaggaatgaggggcagaggggctggcactgggaagtaaagccctgcagggtggaccctgggggacaagtgctgagaaggcattcaaggcatgcttagggtttctggggatgctctgggcctagtggccttgaaatgagcagtgggtgggcatgggggtggctggaagcatgtattgagagggcgaggccagtaggaggggctggcaggtgtgagatacaacctggaactgagggaaggcagagaacccagaggcacttgctctgtcctctgatctcttggtgtatgtgggttcataggaaaccctggacagacttgggggcgattatggcgactgcaccaagaatggcagtgatgttcctgttgagaacctttacccttcaaagtacacacagcaggtgaggcccaacctgattccgtggcagccactcccagccactgccctggctggycctgcaaagctggaggggttgtgtatgtgagagagagagagggaaactggggggtggtggaaagaggatggaggctctgtgcagagaactgctgagttcaggcctgaaccccctctcctctccaccctcctcccttccaggtgtgtattcactcctgcttccaggagagcatgatcaaggagtgtggctgtgcctacatcttctatccgcggccccagaacgtggagtactgtgactacagaaagcacagttcctggggtgagactccagggagcccccaccctgccccactgaccccagtactcactgaggcactttttcctctcagtcccctgtttgtggggatgacttctggctcccacctgctgggatgaatccttccttgctcttgtttttcagcctttagtctctgcctctgtcagtttccctctccctcagtctctctctctttttttctatttttttgaaatggagtctcgctctgtcacccaggctggagagcagtggcgcgatctcggctcactgcaagctccacctcccgggttcccaccattctcctgcctcagcctcctgaatagctgggactacaggcacccgccaccacgcccagctaattttttggtatttttagtagagacggggtttcaccctgttagccaggatggtctcaatctcctgacctcatgatccacccgcctcggcctccctctctcttctatctctgttcctccctctcagtgttgcagtctctctgttttggcctttgtgtgtttgtcaaggaattgtcccatttaaaaacaacctgcaggccgggcgcggtggctcacgcctgtaatcccagcactttgggaggccacggcgggcggatcacgaggtcaggagatggagaccatcctggctaacacggtgaaaccccgtctctactaaaaatacaaaaaattagccgggcgaggtggcgggcgcctgtagtcccagctacgtgggaggctgaggcaggagaatggtgtggacccgggaggcggagcctgcagtgagctgagatcacgccattgcactccagcctgggtgacagcgagactcggtctcaaaaaaaaataaataaataaaataaataaataaaaataaaaataaaaacaacctgcagcagaaggaaggaagagcacgtgagaaaacctccagcggttcctcaatggctcctaaggtttcagtgcatgctctgcccacagcttccctgctcagtgcccagggcgcttagctgggcaggctctggaggggctgggtggggtacacaacacttccctggggagcaggaagaaaatattagaagatacatgggtctgtctcattccttcacattttccatcttatgtgctttagaatggacatactgtatccattcaatagtagaggtatataatttataaatcaaatacatgtattggacctgtttaagattttttttttaactgaacaagggcacaatcagtaaagtttggagcaccttggaatctcctccttatcctggtataggactagacaaatctctttccttttgactacagttgagttgtttggcagggaagtcgtgtgccaggaagctgagagagaaagaaaatcacaaaaagaaaatatgtaagctgcaagggtttgcattcctggagttcatgctcttccctggcacagctggcctgttccccctgcagttcctcctcccagggctctcccctgggcccagctgtcccacagggtgggcggagggccatcacgggaggggacatggtagtgggcactggagacacagaggccctcaaaggcagcggattgtctcaccccagagttcagcgtccatccctaccttgttcctgtctgtggtgacttttccacttctgtccttccctgggctggctccgcagttctcttctgcctggactttccagtcgtggcctcctggttcctgtctctctgaccttagaggattgtagcacatcagaactgggggaaacccaaaggccatctggcctcatctcctgtctcagatgagcaaattaaggtccagggggaggatgtgacacgtcccagggtatacagaactgggatggaggagatgccacctgtgatttctccctcccctcaaataattatttctactttgtgggtttgcacatctgtgagtgaaaaataacaatattgattgctgagaagttgtgaggatgagagaggaagtaaggctaaaagcacagtctgttgcatttcctagggcttacttccccggagaagagggccagctgcttccccttcttcctaaagatctccagccctggtagggatttgggtcagaaatgaagaaggacttcagactgaggaactaaaagtagcaataatgacaaaataaccttacttagaatttgggaaataggggaggaggtgaatctacagttccattattattattattattttggtaatagctttattgagataatttatatcccatacatttcactcatttaaagcatacagcttcattttagtcaaattttagttttaattttacgttttaagtatagtcccagagttgtgcaatcatcatataatcagttttggaatatttttagtgttcccaaaagaaaccctgtactcactcaagccaggcacagtggttcatgcctgtaatcgcagcactttgagaggccaaggtgggcagatcacttgagcccaggatttcgacaccagcctgggcaacgtggcgaaaccctgtctttacaaaaattagctgggcatggtggtgcacacctgcagacccagccacttgggaggctgagctgggagaatcacctgagcccaggaggtcaaggctgcagtgagccatgatcaggccactgcactccagcctgggcaatggagtgagaccctgtctcagataaataaataaataaaccttgtactcattagcaagtcccaagcttccctcccctcctccaccactgccagcccttgggcaaccacgattctttctttctctctctatggatttgcctattctgaatctttttttttttttttcttctggagacagaatctccctctgtcgcccagactggagtgcagtggcgcgatcttggctcactgctacctctgcctctcaggttcaagcaattctcctgtctcagcttcccgagtacctgggactacatacaggcgcatgctgccaagcccagctaatttttgtattttttagtagagatggggtttcaccatattggtcaggctggtctcaaactcctgacctcaggtgatccgcccacctcagcccccaagtgctgggattacaggcatgagccactgcgcccggctattctgaatctttcatatagatggaatcttagagtgtgtgaccctcgtgtctgccttatttcacttagcataatattttcaaggttcatccgtatggtagcaatagcagtgcctcattcctttatatggctgaataacaacactcccttgtatggatagaccacactttgtttacccatttatcagttagtggacatttgtgttgttgccactttttggttattgtgaataatgctgctgtgagcatttgtgtacaagtttttgtgtggacgcatgttttccattttcttgggtatatacctaggaatggaattgctaggtcatatggtaatctatgtttaaccttttttgaggagctgccaggctgttttccgaagtgacatcaccattgtacatccctagcagcagtataagaggttttcagtttctccacatcctgccagttcttgttattgtctttttaaatttttatttatttatttatttatttatttattatttattttgagaagactctcactctgttgcccaggctggagtgcagtggcacgatcttggcaaactacaacctccacctcctaggttcaagcaattatcctgcctcagcctcccaagtagctgggattacaggtgtgcaccaccacacccgactaatttttgtattttcagtagagactggatttcaccatgttggccaggctggtctcgaattcctgacctcaggtaatccacctgcctcagcctcccaaagtgttggtattacaggcgtgagccaccgcacccagcctattgtctttttttaaataacacacatcttaatgggtgtgaagtggtatcttattgtggcttaattcccttattcttatacaattattgttcccatttttcttttctttttttttttttttgagacggagtctcgctcagtcgcccaggctagagtgtgcaatggcgcgatctcggctcactgcaagctccgcctcccgggttcacgccattctcctgcctcagcctcccgagtagctgggactacaggcgcccgccaccacgcccggctaattttttgtatttttagtagagacggggtttcaccgtgttagccaggatggtctcgatctcttgacctcgtgatccacccgcctcggcctcccaaagtgctgggattacaggcgtgagccaccacgcccggcctgttcccatttttctttatggcgtttatgtttttgtccatagcatatatttccttacactggtgtatcctgttttgtttttcgcctgacttagcttattttctttctttattaatttattttttaggccaggtgcggtcgctcacacctgtaatcccagcactttgggaggccgaggcgggcagatcacgaggtcaggagatcgagaccatcttggctaacacagagaaaccccatctctactaaaaatacgaaaaattagccgggcgtggtggcgggcgcctgtagtcccagctactccggaggctgatgcaggagaatggtatgaacccgggaggcggagcttgcagtgagccaagattgcgccactgcactctagcgtgggcaacagagcgaaactccgtctaaaaaaaaaattaatttattaaaaatttttttttttagagacaaggtctcactctgttgccagagttggagtacaaaggcacactcatagctcacttgcaaccttgaactcctggcctcaaacgaccctcccacctcggcctcccaaagtgctgagccactgtccctggcttagcttaatttcttaaacgcttcttggtactgccactcataaggcatcattataatgctaaataatgctcttgtaaagtgggtacccagggatcttgggagacctcttgggtgtggggtagagaaagctgaggtgccctaggagaacaggcatctctctgtacccacagggtactgctactataagctccaggttgacttctcctcagaccacctgggctgtttcaccaagtgccggaagccatgcaggttagtgtccccttccccgggtacaggttgggtagaatacaggttaccgagccaagcatttgggagagctctgccccaacactgagcacctttctccatccccagcgtgaccagctaccagctctctgctggttactcacgatggccctckgtgacatcccaggtagagtgtggggaagggatgggtgggggatgtgtgtgcccatgtaatgctgtggscttctctgggtattatgtgtatgagtgtgtttgacacaaccctatccctgtaagcctgaagcatatgggagtgaccttgatgacacccccattctttcctaggaatgggtcttccagatgctatcgcgacagaacaattacaccgtcaacaacaagaggtcagtcctgccctggtcccagccacaagaarggaatctttgggagggaaaatagacctaagaagagggatcgatatggttgattagaggaaggtccaggaaattcatcctctaccatttcttcccaccctctgccccacacctaagaaatggagtggccaaagtcaacatcttcttcaaggagctgaactacaaaaccaattctgagtctccctctgtcacggtaggtcgtgcctggatggagcctgtgatgctctgggggtcttacttagcagggcggctgtcggggaaaaccaaaaggttgtctctgtgggccagaaggctctgagtctcaaaggcaggggaccaaagaagagggtcaagggagaggttgggagggttggaagaaggagctcggccggggcataaggtctctgggggtggtgggagggacaggcatgctagatgctggggtgaaggcgcttgacccatgcccccatttcagctgcccctaactgtgggccagttatcagttttctctgggtgacactggccaggagcagagacaaagagcccagggggctgctgagaggctgagaggactcgggggtcttcagggatgaagggagacagcttggtgaggagggaagggggctcctctgccagagtccatccagaaccctctgtcccatcgtcaatgtacctctcctctcacagatggtcaccctcctgtccaacctgggcagccagtggagcctgtggttcggctcctyggtgttgtctgtggtggagatggctgagctcgtctttgacctgctggtcatcatgttcctcatgctgctccgaaggttccgaagccgatactggtctccaggccgagggggcaggggtgctcaggaggtagcctccaccctggcatcctcccctccttcccacttctkcccccaccccatgtctctgtccttgtcccagccaggccctgctccctctccagccttgacagcccctccccctgcctatgccaccctgggcccccgcccatctccagggggctctgcaggggccagttcctccrcctgtcctctgggggggccctgagagggaaggagaggtttctcacaccaaggcagatgctcctctggtgggagggtgctggccctggcaagattgaaggatgtgcagggcttcctctcagagccgcccaaactgccgttgatgtgtggaggggaagcaagatgggtaagggctcaggaagttgctccaagaacagtagctgatgaagctgcccagaagtgccttggctccagccctgtaccccttggtactgcctctgaacactctggtttccccacccaactgcggctaagtctctttttcccttggatcagccaagcgaaacttggagctttgacaaggaactttcctaagaaaccgctgataaccaggacaaaacacaaccaagggtacacgcaggcatgcacgggtttcctgcccagcgacggcttaagccagcccccgactggcctggccacactgctctccagtagcacagatgtctgctcctcctcttgaacttgggtgggaaaccccacccaaaagccccctttgttacttaggcaattccccttccctgactcccgagggctagggctagagcagacccgggtaagtaaaggcagacccagggctcctctagcctcatacccgtgccctcacagagccatgccccggcacctctgccctgtgtctttcatacctctacatgtctgcttgagatatttcctcagcctgaaagtttccccaaccatctgccagagaactcctatgcatcccttagaaccctgctcagacaccattacttttgtgaacgcttctgccacatcttgtcttccccaaaattgatcactccgccttctcctgggctcccgtagcacactataacatctgctggagtgttgctgttgcaccatactttcttgtacatttgtgtctcccttcccaactagactgtaagtgccttgcggtcagggactgaatcttgcccgtttatgtatgctccatgtctagcccatcatcctgcttggagcaagtaggcaggagctcaataaatgtttgttgcatgaaggaatgtctggagagctggatggggcatcatgaagagggtagggggtggatacaagtcatcacccaagcttctgggaggtcctggggctgggagagggtacagactcccatgccccttggctgcaccatggaagtgaccattcttcacggggtcttaagagggacaaacgttctggtgaattcctccatgggtgttgctgagcgtctgctatgtgcccatggccatgttagggtggaagggggaagacatgatgccaccccttcaggggacctacctcacagtgtttggggagacttgccctctccactgtctgaacctccttttccttctctgctttagtcaccatcatcactaacctccccatcccccactccacttgctgagtcccacttaccacctggcggcaatgaaccctcatctgcctgcctcccatcagctgtctggtggtggtggaggatgatgaggctcaggccagtttctcctggaaatgcaaagccttatatggtcttattggtacatgattgcagagaggggcacagggaatcctcccagctttagtaaaggagagactgaggtccagggaggggctgaaggatgtgcgagtggaactccagctctccgatccttgtttctcccccactccagcataagacctggaatccagaagtgaccctttctcaccatctttggggattctgtccctgccaccttagtcttattcatcttaattgcagtctccctgttctgaggagccaaaggaggaagagactttcggggaaagaggagaaggagctggtgacaggggtaggaaggtagacagggtcatgacctgaaacggtgtgacgactgctgacttccctttcctggacttgagctgatgaaggggaaatggtgttgcagtctcctctgtcagagccctcaggtgcagacggcacttgtctgccccctcagcctcagccttggcccacctggtccccagtgccctctcctctggctggggcaggaggacctgccggacatagccagatgtattacggatgactgcagtcagctcccccaggctcctgcttctcttgcctcctgcttttttccccagagctgtctccttatctccattcacttgtctatgggttactcctggaccctggggttaggagttggaatcaggctgttagcgataaaagggttcaagttgactcattttccttatcaggcttagtagttgaagtgacttgctgagcttcataattcttagagaacctgccatgaacccagctccctttctatgactcaccctgccaccctgtgacacatagagtctgaatggcaggtctggggctagaacccacgtcatctggacttggagtccagtgaccctttgggttaagcatgtgtgtgtgtgtgtgtgtgccatgatgcgggaggaaggtccctgctctctgtagctgttttcttcatcctttgctctacaagccctaacagccgattctgtcatccctagtctgcccctctcctgtttctccatctcctctgaccatgatttttttctgtccctggagggatgatggtctcattctcacctcctccacgaaacgtgttagcttttcatattcctagatccactcacttctcatcatctttttttttaaacaaaattttattgaaaaatgtaatatgacgtgtcaaagttgtaaagttattgagtaaataagcatgtatcctaaatattgaaaaatattctccttttgtaccaggctatgtgtcacggctttggcgctttgcacagactattagaaataccttataacattaaaaataggacattgaggccgggcgtggtggctcatgcctgtaatcccagcactttgggaggccagggtgggtggatcacctgaagtcaggagtttgagaccagcctggctaacacggtgaaaccccgtctctactaaatacaaaaaattagccgggcatgatggcacatgcctataatcctagctactcgggaggctgaggcaggagaattgcttgaatccgggagtcagaggttgcagtgagccgagattgtgccactgcacttcagcctgggcaacaagagtgaaactctatcaaaaaaaaaaataggacattgaagttggtttctttttttgatacagagtctcgctctgtcacccaggctggagtgcactggcaggatctcggctcactgcaacctctgcctcctgggttcaagcaattctcctgcctcagcctcctgagtagctgggattacaggcacgcgccaccacgcctggctaattttgtatatttagtagagacagggtttcaccatgttggtcaggttggtctcgaactcctgaccttgtgatccgcccacctcagcctcccaaagtgctgggattgcaggcgtgagccaccgcactctgctttttttttttttttttgccgccctctcacataccatactcccctgtatcacttatccttctgaagttgttattaaatcattaatacaactagctgggcatagtggtgtgcgatggtagtcttagccactcggaaggctgatgtgggaggctagcttgaggccagtagttctaggttaggtgagctatgattgcaccattgcactttagcctgggtgagagcaagctcctgtttcaaaaaaaaaattaattgctaccacttactaaatgcttaatatatggcaaacacttgccaaacactttatatgcttgatttaagcatcaagctagctctgtgaagggtaccagcaggtttcccattttttagatgagcagaccgaggttcttctcgctgcttcatactggaaacttgcacttgattctgaggctcctgcttcttcaagaacactgctttgggttcgcttctcctgtccctggggtctccctttgtgatggtggtgagctgcttcctttctgaatccagcttcaaccctacagttctccagaagctggacgatggggtggagtaaagtcagctccccccgcagtgagggacactgaagctccattctcatctgcggatcacagaggggaagccaggaagagccaggggacggtggacttggggctgggaggtcatctcagagggataaggggtgaggagctctggtttcaagttccaaagccctaggacctccctcttctctgtctgcctgcatttctagcagcctcagcagctagcaggtctagctgcctgcatttctagcagcccagcgcccttgggcggggctggatgtagggaaggtcattgtaccaagaagatagttgggtaaatgtggtacctttgttgtaggattctcttgggagatgtctgcatcaatgaggatggcataaagtaaccagagtcaggatgtggggtctgactcagtgacagaaaaagtggcagtgtgtctctcatagccaaaggggcccttggaccggcagtcgggagtctggggttctctgttggctctgcctcctggcacattgggtttctggacctcagttttctcctctataaaaccgggcagttgggtgggcacggtggctcacacctgtaatcctagcactttaggaggctgaggtgggcagatcatttgggcccaggagttcaagacctgcctgtgtaacatggtgagaccctgtctctacaaaaaatacaaaaattacccaggcgtggtggtatgcacctatagtcccagctgcttgggaggctgaggtgggaggattacttgaacctgggaggtcgaggctgcagtgagctgcgatggtaccactgcactccagcctgggaaacggagcggaccctcaaaacaaaaacaaaaatgaaaaacaagcaaacgaagaaataaaaaaacctagggggttgtagtcgatgatctgtaaggtgagttataattgatgtattggaatatttaggaaaagggcactgggaatatgctaggaacacctgatggaggtatctttatttccacggcagcttcgtggatacgtctcattgattctcatggcatcactttccccatgtaggtgggcagacattgttacccctgtttaataaacaaggaaccaacagaggcttaggagaggagttgcctgatgtcgcatgattggtggcagagccaggatcaacagtggggcagggtggggggacctggccaggcagagactggatgagacctggggtgaggaatggcaggcacccagtcagggcagaaaacgagggttgggacttactttgagttttggattggatcagtaaattcccaagaaagagggagactaggaggctagtgaagaactctggagtaaaggggaggattactaagggacatggagtacctatcatgtgtcggacgcttatctatatctctcccatctgaacaaatccttacaggaaccccaggagacaggttatctccactctgcaaattggaaaacagatccagacagtttcagttatgtgtctgagaagttcatttatgtgtccaagacacattcttagctaaaaagctaagcattctgaattggaacccagagaatttgactcccagactctggatcttttcactgctgtgatccatctgggaaaggctagtgatgtgggcaaggggcttattgccccttggtgtttggttgggagtggtcggattggtgggttgggggcacaaggcagccagatctgggactcctgtgcttgtgactggactacaaagagttaaagaacgttgggcctcctcctcccgcctcctgtggcctcctcctccagctcttcctgtcccgctgttgcaacactgcctcactcttcccctcccaccttctctcccctcctctctgctttaattttctcagaattctctggactgaggctccagttctggcctttggggttcaagatcactgggaccaggccgtgatctctatgcccgagtctcaaccctcaactgtcaccccaaggcacttgggacgtcctggacagaccgagtcccgggaagccccagcactgccgctgccacactgccctgagcccaaatgggggagtgagaggccatagctgtctggcatgggcctctccaccgtgcctgacctgctgctgccrctggtgagaccagggacaaagggaagagtgggctggtgggcgaggcaccttccggctggcgtgggccctctccgggagggggccgagcctctcctgcccgggcctggtcctggcgccagcctcaggcctgcaggtcctaacctcagccactgccagtgtggggttccccattcatccgccttttggagtaggggctgcgctgaggcaggggaatgggagaagtttgaaagggagagagtaaaaggaagccctggcccctgacagcggtggaagtttgtgggcggccaagggaatgtgggcaggagataggcccagggtggggcagatttggcggggaaaagaagggagtgggagtaggaagattagtgctcggggagtccagacggttctgaattctgtccctccggtcagctggctggcctggagggtgttgggccgtggggaggcgaggctgcctgtggaacttggtggagcacaccctgtagggcaggattttggcggctggtgaagtgggggagtgagttgaggagtggggatgggctggtgtggtgggtttgggatgctcatggtgggaggtatttgagaatgggctgggacactggatggggcagggcaacccagtggacagtgtccccagtgccctggccaagccccggcctctcacctggggacattctttacccttttgcctgctgctaggcaggtagccgctgtgggactgagccttcccagggagctagtcctacccccacctggtcagtgtccctgggcctgtcctccagcttcccctccccgctgcttctcacagacctaaacaacaatcccttggtttcttattctacagttcagtttggggaagttggtagaaagttgttttcgtcactggaaaatgtccctttctctggcctcagccttgtttcaatgtatccttgatcgtcctccacgtcttggtccgggaatcatcctgttcagatgtcctgggcccatctagtcaggcagat

SEQ ID NO: 5672 - DNA, 31364 bp, Homo sapiens
cacatatcggtgttagcagtgttccgcgagtggtgcctgagagcagaggagaaacaatacccttgccttcatccaaaatatgtatggaaattactggtcaagtacttcattgatggttccatctaataatgatatggttccgtaaacatttagaaggtttttagatatctagaataggcaaatagacagaaaggagatcactggttgcctggagtcaggggcaaggagaacaggcagtggctgctaatgagtgcagggtttcctctcaggtgatgaaaatattctaaaattgactgtaggaattagctgggcgcagtggctcacgtctgtaatctcagcactttgggaggccaaggcgggcggatcacccgaggccaggagttcaagaccagcctgaccaacatggagaagcctcgtctctactaaaaatacaaaattagccgggtgtggtggcagacgcctgtaatcccagctacttgggaggctgaggcaggagaatcacttgaacccgggaggcagaggttgcagtgagctgagatcacaacattgcactcttgcctgggcaacaagagcgaaactccgtctcaaaaaaaaaaaaaaattgactgtaggaatggttgtacaactctgtgaatatactaatttttaaaaccccattgaattgtacactctacatgggtgaactgaatagtatgccaattatagtgcaataaaactgctaagaagggcatttagaaacaaccgcaacgctagaacaccagaatcccttttttttttgtcagggtctcgctctgtcacccaggctggagtgcagtggcgtgatcacagctctctgcaacctccgtctcctgggctcaagcaattcacctgcttcgatctcctgagtaggggggaccacaggttagccaccacacctcgttaattttttcgtatttgttgttgagatggagtctcgccatgttgcccaggctggtatgaagtcctgggctcaagtgatccacctgcctcagcctcctaaagtgtgggggtaacaggtgtgggccactgcacccggccccctgctaattttgaacaaatttttttgtaggaacaaagtctcactttattgcccaggatggtcttgaactcctggctttaagcgatcctcctgccttggcctcccaaagtgctgagcatataggcgtgagccactgtgccacgcttcttttttttttaaataaattagttgagtttggccctttgtaaatatgtaccaatggaatatatgagctattattaaaaccagatactgttacttctcctttgctatgactaactttttatttctgcagtatatgttgctctttggtttaggggactaacaactttttaaaaaaataaaatgttatctgtgtcttgcagggctgttacagggggttacgagcaaaatggcacctggccgggagggaggtgggggctgaaccagccccaattcaaccaggaaggggcatcttagtgttcacaccaaaaccaccttcaactggttgtgagctaggggtgctgctatggccagtgggggaggcctttaattctaagtcttacgttctgagtgtgcctctttctaattcaaaggtacaatataaatagactgtgtgacctgcatgaaaacattcctgtttgcaatggcacatctcacagaaagttaccatttttcaaaccacctataatgagaatggatgtcaaaatgggattctaacattttgtaagaccctaaatttatcaaataaagagtcaaatatgtgcaatgaactcttcctgagacaggaagaaggggcactttttagaaagatattcaacagaagggttttctagttgactgactatcaaggtagagaaaaccctataactccattcattaaaatatgactattaataccttactaaatatccttctacatccttacccacgtttttatacacatgcttttaacacgtgttttaaataacaaaaatgagattccactaaatcaactattttaacctgtcccactcactcccctctttattatactttttgtgtcaagttgatttatttattgaataaataaaatccagacttttctgtttaagtgcctgaatttgttcttacacaaagcaagtgctctcaagaagctcattcttgaagatggttgagaaatatcaatgaccaatatcaaaagaacattaacccatgaaatgtacatgaatatggccacgcgtggtggctcacgcttgtaatcccagtactttgggaggctgaggtgggtggatcacctgaggtcaggagttcaagaccagcctgaccaacatggtgaaaccccatctctactaaaaatacaaaacttagccaggcatggtggtgtatgcatgtagtcccagctacttgggaggctgaggtaggagaacagcttgaactcagaggcgggggtggaggtcgcagtgatccaagaccgtaccactgcattccagcctgggcgacagagtgagactctgtctcaaacaatgacaagaacaacaaaaatttacatgaatatgcatatcagctgaaggcaagcacattacaaatgtaagtacaatttagtagaaggggtgagggagcctgggtgtcaatggggaagccttggtgagctcctagaagtaggatgaaggctgtgagacagtctcagtcctggtgatacagtcaggatgatgtaacagggttcagtgagggagtgcaaggtgacagaacaatatggagtatcttatactaattcctgcaaacttctcaactatgtacaagaaaacaaatacttacgaaacagaagaaaatggccaggtatagtggctcatacctgtaatcccagcactctgggagaccgaagcagtatcacctgaggtcaggagttcgagaccagcctggccaacatggtgaaaccctatctctactaaaaatacaaaaattagccgggcatggtggtgggcgcctgtaatcccatctactcgggaggctggggcagaagaaccgcttgaacctagggtggggtggaggttgcagtgagctgagatcgagccattgcactccaacctgggcactaagagtgagactccatctcaaatttaaaaaaaagaaaaaaaaagaaatagaacaaaacacagcagtggatacagtgctttttggttcattcaaagcagtcccatcagagtagcatattaaactatacaaacggctccaaatggcaaaatctagacagtagaaaatcccaggtcctaattatgttgtcaaataacttacaaaaaaaaaaaaaagatgaaggaagaagctacagattaaaagagatttaacagatttatcaaacaaataaaaaaggacttttggaacctaattcaaataaagttaaaatacatatgacatttacaagaaaactggaaaatctggacagtagatatttgatatcaagaaattcctaattttttagatgtggtaatagtattgggttatgctttttaaaagtccttatccattagagatgcatatagaattatgggtgaaataatatgatgtacagaatttctttcaaaataacatgggaagggcggccaggtatggtagatcatgactgtaatcccagaactttgggaggctgacatgggaggatcgctggtgtcaaggagttcgagaacagcctgggcaacatagggagactgtctttactttaaaacacacacacacacacacacacacacacacacacacacacacaaacacacacacacatacaataaaaaataataatatgagaaaggagaagtggataacgaaagcacagacaaaagaagactgggcttgagctaaatcactgtggaagctgtgtgatgaggacaaggggtttcaacagattattctgtttttgcatatagttgaaatccttcataataaaagttaaacaaaaaagtgctacaaatcctaacgctgacactaaattctacagcatgaagaatttatggaagagtgagactctgtcaaaaaaaagaaaaggttgtggaaaattacctaatgatacaaaaagtataataaagggggtgagtgggacaggttaaaatagatgatttagtggaatctcatttttgttacttaaaaaaagcatgtatcatgtatataaaagcatgggtaaggatgtagaaagatacttagtaaggtgttaacagtcatcttttaatgaatggagttataggcttttctctaccttctttattacgtttaagaatttaatgataaaaagtcacgcatgttgtttcaccccagcagtgttggctttactaaaaacacatactctaagaatcccatacatgaaaggtggaacttaatcaagaacatgtcagagagaagctgcttgagcaagaaaatatctgaaaagcaagctctcctagaagagaagcaaggcctccttaacagtttataagcacacacctgttaggggcacatactgcctgccagtgcctttcactctaagtctctctgtaagctgtaaaagcaaacagtttaatggcaaatacatactctatccaggttaaggtgccacagatttataaacgtgtaaaaacaccagaccttgttttggggttaaggtgagaaaagggcttgctaaacagtctctttcctagaaggaagttctcttacccactcactccctgggacagaaggtcaaagagcatctctggttggaatcataatgcttcggcctgaagtgaccaggccactcactactttagttgcccaagcagtatcaaaggagctcacctcatagtctttccttggaagaatctcatcctcctcctcctgtgtttctccaaggatggtctagaaaaacagatccgcagagggagccttttttagtggttaggagtggaaggaggcagaagtatttactgaaatcagtggctagcttctaaatcatctggagccattatcaaataggaaccagccctcaaaaaaaacctttcaggggtgagggaccatgtgggtgaggatctacagccatcagctgagctcttcatttccactgatagtctccaaataaccaccctcctcttcaggacacctcaaagatgtccaacgccagctgaaaaggggggtaaaaatgcaggttccatttgacagtgtgacgtatctgaaatcagaaaggacttgtcaactctgggaacacaactcaagttttcccaggatgctttgcagggggaagctggactgtcagtgacccagaaagggtgagggatagagtgagaaaggactggagaagctaaaacagcagcatgataagcacaaagtcctgtgaggaagctcattctgaaaacgcttgtttcattccaaactcttttcagatggaaataaaaggaaacatgggtgggatttactggagctggcctggattctccctcagattccaggaggggttatgagaaaagaccccagacttaggcacgtgaagcagggtagacgcttcgagagccctggctgcggtccccaggccccacccgctgccacctgcgggcccagattggcccggccccacccccggcaacgcctctctcagtcccttagcaaccgccccctccccaggccgactccgccggcttcttaccagctcctcgggggtgcgggtctcacgctcaccgcagcagcagcaccacctgcagcagcagcacagagaccccctgcaccccgccatcttcctcctttactgccactctggacccctctaccaaccccctcccagccaggatctgcgcctcacgtgactggccccgggacggtcacgtggccctctcgagctctgggactgagaccaggagtggctgcagacgggtggggcgaggactcgcgtcacatgacgataaaggcacggcctccaacgagacctgtgggcacggccatgttgggggcggggcttccggtcacccgcgccggtggtttccgccctgtaggcccgcctctccagcaacctgacacctgcgccgcgccccttcactgcgttccccgcccctgcagcggccacagtggtgcggccggcggccgagcgttctgagtcacccgggactggagggtgagtgacggcgaggccggggtcgccgggagggagatcctggagccggcaaacaacctcccgggggcaaggacgtgcttgtgggcggggagcgctggaggccggcctgcctctcttcttggggggggctgccgcctcccttgcgcacccttcgcgggattagtgtaactcccaatggctaccacttccagcgaccgccaaccctcaagcgaagactgactttggctccctgcctggacggaggggcccctgagccaggggtgacgatcccgcccctctgaccggcccaggcccgtgtcctcgcccccatcggtgactcagtgacctggtgactggattctcggccacctgggcgccgagacggcttccggctcctgccttttaaacctgcctccccggcgakcacctggagaagagcgctgggcccggggcactgcggtccctggcgcccactgcgtcccgctgcgcacgggggtccgccgggacctttctgggagtcgtaggcttagtatcccagtgcttggcgcagactagttgttcagtaagtggcagaggcttattttgagagagtggcagcacctggccctttggcgctcagtgaatgttggctatcaccgtgtgccaaactctggggataccccaggcaggacaccggtcctgtctcagggaactggggaaagagaaaggagacaggycttttcacccacagttacaacccagggtgctatgggagtccagctgataacggataaatcgtgggagttggcttacaaatatggcacatgcgtggcatatactaggaatgcaataagtctttgaaaatcagagggtttacaggtggttcagcttcctcctactctaggttctgttccagcaagcaattaacgaggtgcgcccttaaacgctggaggaaagccaactggctgctcttgctgttactcctcccccccgcccccgttcctcactccccacagccatccccactgagaatctggagtttgaggtcagaatgaaagagagcagccctagagggagaaagctttggcccagggttcttagtctggaatcaactccttgtctttggatgtatccccgtgtagtctgtgcacctgtgtgtgtatttcaggggaagggagcagtgcatttaatcagattgtcaaaagagtctaagaccccaaatggttaggtacacagggttagtggtggacagtctgaaagaaatgaacctcacctgggctttcctctgttgtgccatgtcaccacacacccattcactactgtgtgtttgcccattgctgtgcaagtgttttgtttgtttttaagtgtttgtcttattttcttaaccagactgccagatgrccctatgccctctgttggcctgtctgtgccctggtggctctgattacttgtttctgttttttgtttttgttttttttttttgagatggagttttgcttttgtcgcccaggctggagtgctatggcacaatcttggttcactgcaacctctgccttccgggttcaagcgattctcctgcctcagcctccagagtagctgggattacaggygcccgccaccaaacctggctaatttttatatttttagtagagtcgggatttcaccatgttggccaggctggtctcaaactcctggcctcaggtgatccacccacctcggcctcccaaagtgctgggattacaggtgtgttttttgtttttttaagagatggagtctcgctatgttgcccaggctggccttgaactcctgggctcaggcawtccttctgcctcagccttcccagtagctgggtcactgtgatgatttgaattgaattctgtgatgtgtaagaagagcagcctgcaaggcaagcacagatggggcagcttttgttctgagaaattcgtgcccttactgaacttgggtctggctatttttggaacatggccagcatcaagttctaacccacaacackgtctttttggagtagcatgaattcaggagaaatctggctgcatagtcaagccctcaccccttccatcctrtgcacgaactgtttcaagtaacagatgttccaggcagagccagccagagtgagctgttccttctctggagggtgatctggtatccctgaacgcctgttggcctcatctccaccaacccctgcagtctctgcccctgagtccccctccttccatccgcctccccttactagagcctcagccctccctcctcgcctggaagccttgcccccgcccccttgtgctggctggagctcaagcctcttcctttgtcgcagctccgcccagttgaacacacccgctggggaaggtgcctctgttccctccccacgcactctgggcctgagctgacagagatggaccatcgaaaagccagggtcctcccagctgggcactactgcccctcgctaggaatatgggcctcgcaggtcggcagcgtgaggtcctctgtgccaccttccatcaggtagctgtcaccgaggagcatgttgcagtgccgggtgggggctgccttgcatgcaaggagcctggcagcagcggagggcaaggctttgagtgaggcggcccggacagccatagctgaggagcatggagccactgggagggggcagtgtcaccttttttggccttcttcctgtgtggaaatacagygcctccggcttgaacctgccactcaggtgtcttgatgtgtcgggggtgtggctgcctgccccctgatgctccctgccccaccctgtgcagtaggaacccagccatggtgaacgaagccwgaggaaacagcagcctcaacccctgcttggagggcagtgccagcagtggcagtgagagctccaaagatagttcgagatgttccaccccgggcctggacccygagcggcatgagagactccgggagaagatgaggcsgcrattggaatctggtgacaagtggttctccctggaattcttccctcctcraactgctgagggagctgtcaatctcatctcaaggtraactcatgcaaggttaaggtgggaggcgggagtggtggtgcctggggagcaaactgtcagccctgaggctgggctgccctttaacccggcagaaaaaagcagccggagggggcaggaaggagaaggcagagtgggtcatctgatctgcaacttctctgttgcctgtaaaagtccctccacagtgtcaaggtattttagacacactcttcaatgggttaaaaatgttgattctcacactgtattctttgagggaacttgggggctggatcacgagtgcagtttaggaagtcacaaagcagtgagattgttttcagcaagttagaaatttggattatgcttcttgaactctagaaatgccaactgaattacattagcacttcatgaattgcagttttttttttaagtttatgccttttactgtatgcacgtctcacgtgtcactcccaagtttttgaagtttaaatgcacaaggatgtttaaatacaccgttgatagcttgtaacacaagtactcgtgcacatccaggcttttttttgagtctcgtttcggaacttggccttggtctgcataactgtaagctgctgcacagggcttggggggtggcatgaaagaaagtgagtctgctgaccctctttctaactgttcctacagcgaggctgtgcttgccacagttaggattcccctaactctcaatcatgatgtcttaactcacctgagatartaaacaggcaagcgctgtgaaaagtctgaagtgctgctctcacacaaaatgatagcgctgttgttgtgtcttacctctgtaatagtgattataacggcacctcacatatactgagtattcggtttgtacaccaggcactgttctaagttctgtggaaccagctgccgtcatattctcctagtgttatggttttttgttgttgttgttgctttttttttttgagacagagtctcattctgtggcccaggctggagtgcagtggtgtgatcttggctcattgcaacctctgcctcctggctcaagcaattctcctgcctcagcctctcaagtagctgggattacaggtgcccaccaccacacccagctaatttttgtatttttagtagagatgaggtttcactatgttggccaggcggtctggaactcctgacctcaagtgatccactcacttcagcctcctgaagtgctgggattacaggcgtgagccaccacgcccagcatcctagtgttattatgaagtgggtactactatctgccgtgtcttataaataaggaaacagaactcacagagattaagtaatgtacccaagatcacacagctataagtagcaaagccaggatatgaacgctgattggtctgtctccaaccttcattgatgcttctctaactcccgggccccatgggaaggcagtgacggatggtatttctcctggaacctctcttcagaaacaaaccccctacaggtttgaccggatggcagcaggtggccccctctacatagacgtgacctggcacccagcaggtgaccctggctcagacaaggagacctcctccatgatgatcgccagcacmrccgtgaactactgtggcctggagaccatcctgcacatgacctgctgccgtcagcgcctggaggagatcacrggccatctgcacaaagctaagcagctgggcctgaagaacatcatggcgctgcrgggaggtgtggagccagcactcccctacactctgggttctggctttcccggaggccacttggtagcctgaacttggttcctgaaatggtcctttacttcytcctgggccccacgctgaggatccgcaggatcccatccccgccagtagtgtcagtaggcattgtgggtagtgagtcatcctgggcaccacacacaggcagccacctcttccacctcttgacctcgacataggagttccgtcaggaatgcagtcgcggcctgataaccctctgccttgcctacaccactgcatcgattgctggctgcacccagcacttggcccaatcacagagtaacagagtatccaggagtgagaatagccggtcaggcctctggtgcccgctgttgtcaggccacctaagagtgggaagagggagcctgatgggtgggatcctatggcctcgtgctccctaccacaagaccccttcacttgagatgagtagaaaattctcccaggaggcaggagccccaaggccgtgggatgggagagggtggcaggcgtgcccaggtagaagtagggaagggctctccaatcctccaggcacggtgagaagcagcggtggtctcctattctccaccgccagcacagggtcagcatgcagtgaatattgaactggtgggctgcttttttccctcctgctgtcttaccaagtgctagaaagagacgaaccaaacctaaataatatgaagtttctgccttccagggactcgcrgtcctsggtgtcrggrctaggtagagggaacagaaagggtctctggaggttgggtgagacccagtgactatgacctccaccaaccctgcagacccaataggtgaccagtgggaagaggaggagggaggcttcaactacgcagtggacctggtgaagcacatcygaagtgagtttggtgactactttgacatctgtgtggcaggtgagtggctggatcatcctggtggcggggatggagctagggaggctgagatgcccagagagcctgtcggtgttcggttcaggacacagtgatcaggggcactcatgggtccatgctggatgaaggacatgcagaggtgaactgcaccgtgtccttgctccttttgtatcacccactcccctcctgggcctgccaccatcgacccctagctttttgttcctctgcctggctgtgcccttagcctgcttggccttattcttttctttaaaacgaaagaggggtctgggcgcggtggctcacacctgtaaccccaacactttgggaggccgaggcaggcagatcacctgaggtcaggagttcgagacctgcctggccaacatagcgaaaccccgtctctactaaaaatacaaaaattagccaggtgtggtggtgcacggctgtagtcccagctactcaggaggctgagccaggagaatctcttggacccaagaggcggaggttgcagtgagccgagatggtgccgctgcagtccagcctcagtggcagagcaagactccatctcaaaaaaaaaaaaaaaacaacaccccacaaaagagggatatttactaacaggattccagagggcagggaacccaagatcaggagatggcctcagacctcacaaggcactggaagaggtcaaaaagcaaggccctccctcattccctctggggccacagggtcccccatctccgcttcccactgcacatctgtgcttcatctgggagacctgatacccatgcttttccacacacctggcctgctcctgagtgtgcagagtgtcagttccagccagttccccaggctaatggacaggcctccgttccaaattcccaggaaagagaatcaccattggccacagccacaagaccaggttcccccaacagaaatgggtgggttggacttctctcccacccttgaagctgaaggctggcattgagccctcagcgtctcagacagcgctcaggtatggcaagacagtgtgcaccagggacaggaagtcccgggattggcacattttctgggatgacagtttttttgccaatattctgggagaaatcctaccatttttatattaaacatggctatgttatggagtagcatctaaagtgatatgaactaaaaaaaaaaggccaggtgcggtggctgaagcctataatcccagcactttgggaggccaaggcgggtggatcatgagatcaggagtttgagaccatcctgtccaacatagtgaaaccccgtctctactaaaaatacaaaaattagccgggcatggtggcgcgtgcctgtagtcccagctacttggtaggctgaggcaggagaatcgcttgaacccaggaggcggagcttgcagtgagccgagatcgcaccaatgcactgtagcctgggcaacagagccagactccgtctcaaaaaaaacaaaacaaaaaacccaaaaaacaaaccacgtggcttcaagaaaattacatgttgtgagtaactttggccttgtccctaacccccgatggacatgtccattctgtcaacaggggtgtttaggtgctaagtctgggaagcgctgattaggagtcagagaacagacatttccaactgttaaattgtcatcgcttgtatcagccattatatagtcagttactgggggaatatgcacccgtgatgggcgttaggtgataatgattggaaactagtgaagctgtgagctcacagttgctgaatggtttcttactttgcttatcaagtgggtaatgaagatgagtggattagaaaacaccaacctgttgggcatggtagctcatgcctgtaatcccagagctttgggagactgaggcaggagatcaagaccagcctgggcaacacagtgagaccgtgtctctacaaaaaataaaaacattttaaaaaagaaagccctcagctgttcatgatagaaaaatagagtaaatagcaaaatctatacgtaatcaaatgctagatttgttcggtgatatttaggtattgtagctatacttttcagctattaaaaagccttgttgtttctgaaattcctactgggaaaatagctttgttattgcaagtgtgaagccccattgctttatcccccactcccttaccccttgaaacaatagtttttatattcattttttgatgactctgggtttcttaagaacggaactgccttatcagagcaaagcagcttggccttccgcctggctcagagtcctgccctgggcttgggctgatgaaaccagcactccatgtagtttcatgaaggcctatggtcrtcctgcttgcctgaccgagcaaggcggctagtaagtttagtcattgaggaaaggggtcagagagttcacagagccagtaaggagcctatgggacatctgatcccacctcctaagcaattctggaatcttgtcttcagcatccactgcccctgtgttttcagactccaggagctcattgttttgtgagtggcttatagtactctagccagctctctgaaccggatgctggttctgccattrgaaacaacacagaatatgactaataaagaacttcactagggggctgggtacagtggctcatgcctgtaatctcagcactttgggaggccaaggtgggaggattgcttgagcccagaagttccagacaaacctggacaagatagcaagaccccatctctaaaaaataaataattaattaaaaaaaawttttttaattagccagatgtggtggcttgcatctgtagtccaagctactcaggagactgaagtgggagatcacttgtgcccgggagttcaaggctacagtgagccatgattgtaccactgcactctagcctgggtgacagagcgagaccctgtctctgaaacaaaacaaaacaaactcacctatggtggatcctttttccccaggacagacctttggacatttgaaaggagtttctgtattcttttcattcttttttttttttttttttgagacggagtttcactctcgttgcccaggctagagtgcaatggtacgatctcggctcactgcaacctctgtctcgtgggttcaagcaattttcctgactcagcctcctgagtagctattacaggcatacaccaccacacctggctaatttttgtatttttggtagagacggggttttaccatgttggccaggctggtctcgaactcctgacctcaggtcatcctcctgccttggcctcccaaagtgctgggattacagacatgagccaccgcaccctgccatccattattttctttgaagaaaacatcactttcttcagttcttccttgtgtaacttggtttttagcttttcactatcttggacccctgagtaatttcagtgttacattaaaaacaatgtttaatccggtgcctagagaaaagtcaagcttagtaccccagatgctgcccagccagtgctaactgtagcattttctcttttctatggccaccaagtgcaggcctgatttgcttggctgctcaaggcaggacagtgtgggagtttggagcaatccacccccactcttggaactgggctctgagccacctcccctgagagtcatctctggggtcagaagcatatcagtcatgagcccagccactcactgttttagttcaggctgtgctgtgctgttggaaggtgcaagatcagagcccccaaagcagaggactctctctgcccagtccctgtggtctcttcatccctcgccttgaacaggtggaggccagcctctcctgactgtcatccctattggcaggttaccccaaaggccaccccgaagcagggagctttgaggctgacctgaagcacttgaaggagaaggtgtctgcgggagycgatttcatcaycaygcagcttttctttgaggctgacacattyttccgctttgtgaaggcatgcaccgacatgggcatcacttgccccatcgtccccgggatctttcccatccaggtgaggggcccaggagagcccataagctccctccaccccactctcaccgcaccgtcctcgcacaggctgggggctctgggtggagtgctgagttcgctgagttcttcccagatctcctctcaggtccagaacttgcacagcgttgcttggccaccccattttggttacctctaattttccccccaaaacccagcaacagtgtctgttgaggggtttgttgtactttggccaacaagcatcaccaaaagggattctaattctcattacaaatcctgcttaaatcagtgtttcccaaaggtggctgtcatcagaaccacttgataagctttttcaaaaagtggatctccaggtcccacccctggaggttctcactcagtaaatctgagggaggtccttggaatgtgtgttttacttcttgagcttggcaggtgattcggatgatcagtgcagcatgggaacagctgggttagatgacaccatgttaccaacagacacatctagggctaaaaggctggctcaacccaaggctggaatgcttagggcagctgctctactctgtaaaaagtgggaaagctgggcatagtggcacgtgcctgtagtcccggctacttgagaagctgaggcaggaggatggcttgagccctggcgtttgagagcagtgagactcagtctctaaaaacagaaaaaagaggagaaaacggcaggccaagcccaggtgtgctcctagaatatgatcggactttcgtgggtccctctgcctgacactgtggttggcatggatgatggaagggggagaagtatttagggtgggagacrggctggccagcagccgccacagcccctcatgtcttggacagggctaccactcccttcggcagcttgtgaagctgtccaagctggaggtgccacaggagatcaaggacgtgattgagccaatcaaagacaacgatgctgccatccgcaactatggcatcgagctggccgtgagcctgtgccaggagcttctggccagtggcttggtgccaggcctccacttctacacccycarcygcgagatggctaccacagaggtgctgaagcgcctggggatgtggactgaggaccccaggtgagggcagtggcccagagatccccagaggagggtccaagagcagccccggctgcagtgctggctccccacggtggtacagrtggatgtctgtgccatggctagctgggcacatcraaggctccagtctcagagggcatcagatggaagaactcagcctcaggggtgctcccctgcttccggctccctctagccaatcccttgtctcaattctctgtccccatcctcrcccaggcgtcccctaccctgggctctcagygcccaccccaagygcygagaggaagatgtacgtcccatcttctgggcctccagaccaaagagttasatctaccgtacccaggagtgggacgagttccctaacgrccgctggtgagggcctgcagaccttccttgcaaatayatctttgttcttgggagcgggagggcagaagaagtttgcatgcttgtggttgacctgggaggagtcaggggcagaatttacaggaatggcctcctgggcatgtggtggcactgccctctgtcaggagtgtgccctgacctctgggcacccctctgccaggggcaattcctcttcccctgcctttggggagctgaaggactactacctcttctacctgaagagcaagtcccccaaggaggagctgctgaagatgtggggggakgagctgaccagtgaagmaagtgtctttgaagtcttygttctttacctctcgggagaaccaaaccggaatggtcacaaagtgagtgatgctggagtggrgaccctggttcatcccctgcccctggcctgaccccagctgcaggccaggctgcggggctgtgacttccccatcctgtgccctcccctccatgctgtggacatggcaaagggagaagggtaagttgggagacctccacctggaagggcttagggaggcaaagacaggctgggtctttgttgggggccgtgagagggactcagggtgccaaacctgatggtcgccccagccagctcaccgtctctcccaggtgacttgcctgccctggaacgatgagcccctggcggctgagaccagcctgctgaaggaggagctgctgcgggtgaaccgccagggcatcctcaccatcaactcacagcccaacatcaacgggaagccrtcctccgaccccatcgtgggctggggccccagcgggggctatgtcttccagaaggtgtggtagggaggcacggggtgcccccctctcttgaccggcacccgtkggttccccagagcttagggcagagcagcctgcctctcctgggctcttaaattttgaatgagcatggattggagcggatgggagctcatgctttaagtcagatagacctggctgggcacggaacccggccagcactttgggaggccaaggcgggtggatcacttgagcccaggagttcgagaccagcctgggcaacatggtgaaacccattctctacaaaaaatacaaaaatgaccgaggcatggtggtgtacacctgtagtcccaggtacttagggggctggggtgagaggatcgcttgagtccgagaggttgaggctccagtaagccatatttgtgcctctgcactccagcctggcccacaaagtgagaccctgtctcaaaaaaaaaaaaaaaagattggctgggcttggtggctcatgcctgtaatcccagcactttaggaggccaaggtgggcagatcacaaggtcaggagttcgagaccagcctgacaaacatgatgaaaccccatctctactaaaaatacaacaattagccgggtgtggtggcgggcacctgtagttgcagctacttgggaggctgaggcaggagaatcgcttgaacccgggagacggaggttgcagtgagctgagatcatgccactgcactccagcctgggcaacagagcaagactccatctcaaaaaaaaaaaaaaaaaagatagaaatcagacctatggaggcaggtcactcgacctctctgagcctggttttctcgtctgtaaaatgggatgtagcttgtgttctgggcatgaaacctaacaaagcatgtaacgtgcttggcacatggtaagagcaggaagcactccctgaaaggcagctgctgttactatcctgagttgacacctttctcccagggctgctggagttaacattatgttctgatctaaggcccacrggccctggagcagaaagacctgagtttaaggaccagctctactgtttactgtcagagtagccaacgtgctcaacttccctgaacccactttcctcacgtggggctcactgtgcccagcctcccgtattatcagcattctagcaaatgagtttgagtaaacccagcttaatccctgataggcactggttctagaggagatgtcaatgtcattgtcagcttgcactggggaggatggaatgtgtggggcctctctcccatgactcggcctgtcaaaccagttgctgctgttcagaaatggcttcttcgtggagtcttccctgactgattgggagaggggtggctgatagccctcagacctgtccagactgagaaactcacgtccccactcccctcaccctttgcttatggacgtgccaacgccacagttcattattccgcccacatkgctgccartagtcctgataccttaggtgtctgcgaaagggcgtctggcagggctggggttggtgacaggcacctgtctctcccacaggcctacttagagtttttcacttcccgcgagacagcggaagcacttctgcaagtgctgaagaagtacgagctccgggttaattaccaccttgtcaatgtgaaggtaggccaggccccagggttcccacagagtaycargcccttcgttgagcaaacacccagcacctagcctgggctaggcattgtgcaagacagasagatacaggcagaactggggccctgctcttaaggagctcccagcctagagtgagggaggcagatcaatgtgtgaccaccagccagtgtaagtgggaaaatcaagttcaggagaggatgctgtcrggtccaraggagggatatctcacctgggaggccagggaaggcttctcagagggtcatctgtgggaatcactgaggasaaagaggagttggccaacaggagagaagggtattcctgggacagggcagaggacaggcagaggcagtgagctgcaccatctggggaaacsgggaacatgagcaggaggaggcgggagtgttaagcaggggccaggcccgcagagatcatggttgtcctgctggaatttgagttttccctcaatgcaagggaagcctttctccagcagtggggtggcttggttcctgctttattttaggcaaatcacagtggatagtcatacggatgagagagattggggacggctagagccggggaggccagtgaagagacccctggagtgacccaagccaaacacactcctggaggtgggctagacaagagggaatggatcagagagtgagcagggggtgctcaaggaggagaggggaagtggccaggacgcctctaggttcaggcttgtgtggggagagatatcattcacagatgcaggcagaggaggccaggagcggaggcacagggagaggggagtggaggcgcagggagagtggaggccgggagtggaggcgcaggcagagggtattgagcccagacagcctcattgagtcaaggctgtccaggcagtgggactccagttrttcttggcccaggtcttacccccaccccacatcccctcagggtgaaaacatcaccaatgcccctgaactgcagccgaatgctgtcacttggggcatcttccctgrgygagagatcatccagcccaccgtagtggatcccgtcagcttcatgttctggwaggtaaaggagccgggggcaagcttgccccgcccacctggaaaaccgtsgggagggattgggaccaagtcccaagcgtgtrctgaaggccacactggacccagccttcagggcacacccagctctgactcacccatgtcactgctgaygcagggtgtttatttctgggcaggggtgggaagtgatactggcagtgggccttgttctattccgggaaatgtcctgttgagcagagcccttggagagccctgttaatcttgcctstgtgtgtgtgtgcatgtgtgcgtgtgtgcgggggtatgtgtgtgtaggacraggcctttgccctgtggattgagcrgtggggaaagctgtatgaggaggagtccccgtcccgcaccatcatccagtacatccacgacaactacttcctggtcaacctggtggacaatgacttcccactggacaactgcctctggcaggtggtggaagacacattggagcttctcaacaggcccacccagaatgcgagagaaayggaggctccatgaccctgcgtcctgacgccctgcgttggagccactcctgtcccgccttcctcctccacagtgctgcttctcttgggaactccactctccttcgtgtctctcccaccccggcctccactcccccacctgacaatggcagctagactggagtgaggcttccaggctcttcctggacctgagtcggccccacatgggaacctagtactctctgctctagccaggagtctgtgctcttttggtggggagcacttgcgtcctgcagaggaccacagtgggtggcacctcctgagaaggcgaggagagtggttgttgccaactaagccctcgaaccaaggcagcctccagagccagcctgggactcccagtgaacttacmcttggagcccgtgcagtacaggcaaaacacgcaagggcatcaggcactggtggcatcgtagaagagatgtggcaaagtgctgtacccttccacctcctagaggtgggcagctgggccccacctacttgtgactgaaggggcacaccactgccctgcctgcccacttagccgtccatggcaccagccccctggatgggcattgggctgacacctaccatgctgctttttggcacagttgtctattctgagccttgagagaaaaagtgccccttaagggttgaaggcagtctgaacccttgtgcttggtggggctcgtggccttccccttttgcctggctgtggaggcctgatgctgccccgttccctgtcagaggctaagatgagatttgccagcacaggggccccagatctgcctgggcctgtgcagcagcccagcttcctggtgtatttttcaggtaggcccttgtcctgccagctgccttcctcatcccctcgtcctgtcccagaggttatctgcctggcctggctccccacgagtcacctgcaagccccagggcctgggggcagtgactggcaggtgcagatgggctgtttcgtgtagtggaagagcagcctgatggccaagggggtggacgcaattgtgggatgtcctctttactcccttcctggcctcactggctggggcagaggggcagccgctaggagagactgaaagcagcagctaggactgaggagtgggttttattgtccttcagagctcttcaagctgtcccctctgtcatcactccctggatgtgtggggcatggttccttccctgggaaggctaagttcagttctgttttttattctatgagaacaagtcacagctgcagctgggccccatgctctgccccargcccccaaccccgcggtgctcyggcggcttcctgtccactctcggggcccttggggcctggcttgctccagggtcttgggctactggcagctcctctccttgggctcctggctgccaggcgttggtgccacttcttaaaggcctggaaccagggaggagaggaaatgctattgttgtgggctttctccggggtctgtgctgtgcctgctagagcaacccctgtacccagctccttttgtccccagggcccctccctctgccccaagcagccagccagtcttgcctaggccaaatgcacaagctcagaatagatctgatggtgagctgggaagctgtactcagagcagagcaaatgagggagggggcgctcaggacccaggccctccatgggctagtgtgagtggcagccatgcctcatgccacaccttcttcgcaaactgatggaccgggtgggcctggcctgagctggggccacaaatcaaagcaagggctccagcatccagcctgtgtgttctgtaatggaactgaccccctcccctgaaaacgaaggggccccggggctggcaagcagggaaagctccacggtgcgyggctgtggcacagacttctggaaggctggctgagtggaatgcagggaagagggcagtacctgggaaaggacccacccatcttcctgctgctgtaactgctgagccactcgcagtcgcaggatccgctgccaccacgtctgccaggcccatctcaggtgccactccctgagctttggggacagttggcagagaaggcctcttgtgctcacgctcccccgcagtccccagcccttctgcctttctcccccgacactgctgcaccagagtgaaagggctatggcaagggggtgtcatctgaggagtattaagaatgcagattcctgggcctgtcccccaaggttttggagtcagtaggtccaagggccatacttttgagaggggtttgggttaagtatgaggtgaaatgggagatggtcagtgtggagaggggtgcacccactcaccagggtccgcaccagctgctctgccccttgggcatccacccagtgctgccatgccactgccaggcacctggcctgctgggaaccccgcagcccgtgaagcagtgcctcgaggcaccggcgctgcaggtacttcctcctgatggccaagagcatcgtgacccttcagggccagaaggagggcagagccatgggcctgggcctgcttttccaggatcctgcaggaacgagcactggccagagagggcccagctgtagccatggctcaggcaagcccctcagcccttgcccccatccctcggacccaccaaactgcacacacagctcctcttaccgtagcctccgtttatgggccttgctttgggctttgsaggctctgggctcagggctggagtgcgctcttggtccctggtccctcgtccacaggggcaggcctgggacccagctactctgtccaggccactgtggccagagctggaaggcagggcagagggaatgttccctgcaccctggaaaggggagttgagtcacaagagkttaaggtgggtccaggaaggcagctgctcttagtgcccgcytaggagttgagtacagtgaggagggtggaggaaggtgctgagcttagccttgtgccctgcccccatctccccaggcctccagcctctcmcggctgcctgccrcccaaagagaaatcacaggggcggggcaggaatgcaaagtgttttctcagaacagctgaaacattccgaagagggaatggatggggagaatggtcaatacacataagaccgtgtcccaaggagctgatttccaggcccctgaggactggagaccgcttcacccctgcacttcagacaccgtttgtcccccggggcaaggtctccttactctgagcccaggccgttccccttggcttcctccgtccacccaggctgcactgcagtgatggcgcgggaggcaccagctctgtggcctgtgtccagcagctgygggtctgaaggartagccagagaggagcacctgaaccccatgggcttggacttcctggggccccgctgggatttcttcgctgctctagctggcaggacacatcccggcctcttcttccacccattcccccatgtggctgaagacattccaacaatggggtgggcccataatagttagccctcagtcagttcccggagcacagccctgggagggggctatttctctccccactgaaaacatttcaaagctgagttacttgtctgaggcctcatccctcggaagccgtctgactccagagtctgagcccccggctagtaccctatagagagggggctctccaaaggggctgctggggcatgtgtgcctgtggcagaaaagaggagaccctggaattcagcaccctgggtgccattcccagcgtttagtttctagaggcctcagtttctccatcagcttatgggatccttgtctttactgacaagaatggaatagaaatgtaaaagtactctgaaaagcaattgccctgtaacttatctagaaagaaaagaccctgagactccagaatctgctgttgccatagccccatatgtgtgaattctgcaactagccaaggctagttcctttcaattccatttaaaaaacaaaaaccagcaggtgtggtggctcatggcgtaatgggcctgcccaatgctttgggaggccaaggcagrtagatcgcttgagcccaggagtttgagacaagccctggcaacatagtgagatcccatttctacaaaaaaaaaaaaaaaattagccgggtgtggtggcacacgcctgtagtctcagctactcaggtggctgaggtgggaggatcgtttgagccctggaggttgaggctgcagtgagctgtgatcgcaccactgcactctggcctgggcgacagagtgagacactgtctgagaacaaaaaacgactgaaaaaaaaaatcaccttagctttttctcttagaatcttctctaaaatgtattctttgtggcattctgaaataggattcatgatgatgcctgttgatcttagggacactacctcacctgccagtatctttggggctgtgtccttcaaggacatgtccccagactgctgtgcagtgtcattttttgtgtttggtttggtggtggcttcttcccccttgctaggctatcaacctcttatcaccacttgttggtgtcagaactaactgcttctggtctggagagggactgaccgatgcctttgggtagagagaattatgaaagaaattttggtatttttctactttatattttctgaggtttctgtaataagcatatttcacttttccaataagaaaaaaaaaaaacttggcctggcgcggtggctcacacctgtaatcccagcactttgggaagtcgaggtgggaggatcacttgagttcaggagttcgagaccagcttgggcaatatggtgaaaccccgtctctactaaaaatacaaaaattagccaggcgtggtggcgtgcacttgtagtcccagctactcaggaagctgaggcgggagaatcacttgaacccgggaggcagaggttgcagtgagctgagatcactcctctgcttcagcctgggcaattgagccagactctgtctcaaaaataaacaaaaaaacttgacaaaaaaatgctactgtcctcgtgtacctattctgatcctcaactgcaccgtgagaaagcatgcatttcaatgtctccctaacaggctgtgacccaacatgctggtctttgcggccggacctgcagtggcctggcactcgagaggtgccaggttcatctttgctgatggattcagagttgcttgtcagaggctgactgagaactggggagaggtggtgcatacgaggttgctgggcccctggggaggcatccagccatgctgccaccacgggctgaatcaagctgattctaaggccggtggtccgagggtcatttttggacctcccgccctgcctaggctcccttcacctgtttccaaggggctggggcgtccagcagcaggctccccctgctggccatccggggccagagcgtgaggtcagtctggggcttggggcgtaccttgccggcccctggcagtcccagccgcaccctgagctgcactgtccgcaggaagcgcctgagctcagccggccggagctgggtgaggatggctcgctggacaccgccgcgcaccgccgactgcaccgaggcctctaggaccctgcgggagaggaaggagtctgcagccagggccatcaaggccaggactctctgcagggagcccccccagtgccctgcgggagggggccttctgggcccagccccaggctggggcccacccacctcccacactcccttttctggagggagaatctgggtaaacaggatggagagcgacctggaaggagaaaatcacagacggggacaagcatcctgtttaggggcagagaggggacagtcctgccagtgccactttgcctccccttccctggcaagagcgcgtttatggcgcttgctgagtggctggctgtgctggtgactgcaaggcatgaccattagagacttccccaaggaggggacacacagcaagaggcggtgccaggatgtggcccaggactagatggccagggcggcctctccctgtcacccccaaccaccctcttgagcctttgccctgccacccagccatgaattacgctctacccctgccaaaaacaggcttgaggcctgagctggaagcacagagtggggctgcacttagaccacagcactcaccaggctcgcggcttccaggaagcatgggctcggctgacctggccccgacaggactcatgcacccacagagcccagcaccaagtccagcactgggctgcctgggccccagcgctctctcctgcctgctgctgggcctcatggtgcatgcccggggccactggccatgctgggaaggcctgtggggcccgggccttcttctgctgcccatcttcctggccttgctgcccgcagcttctccagcgggcaagggaggcctgggccacacgctgctcctgtgccccggctgccacttcctgggcttcccgccatgtggcaaacacagcccccagtgctcttctcctcaggccatcctgaaaggcttgatgctgggcccggagcacccccgtgtctcttacaacctcacaccaggcctggaagtagctgcaaaacagacacattgggccaggtgtggtggctcatgcttgtaatcccagcactttgggaagccaaggtgagtggatcacctgaagtcagtttgagaccagcctgaccaacgtggtgaaaccccgtctctattaaaaatacaaaaattagccaggcctggtagtgggcacctgtaatcccagctacttgggagtctgaggcagaagaattgcctgaacccaggaggcagaggttgcagtaagccgagatcgcgcaagtgcactccagcctgggtgacaagagtgaaactccatctcaaaaaaacaaaacaaaaacagatgcatgggagggcttgtctcgttctcagagtcaaaagtcacatttattcaaagttacacttgcaaatctcccacaaaacagtaaacgaccagtaacaggtgaaagcactggctttccatcttgcaacctcagcctcagagggcaggggctgccctgcgagggggatgggaaccagcagtatgggttcaagtcccacatcagccatgccctgcctcccatcacatgcccaggtggttggtgagggagaggaacaccatctctcactcagtgagaagccaagaaaaaaaaccatctacggccaggcacagtggctcacacctgtaatcccagcattttgggaggcagaggcgggcggatcacctgaggtcgggagttcgagaccagcctgaccaacatggagaaaccccgtctctactaaaaatacaaaattagccaggtgtggtgccacatgcctgtaatcccagctactcgggaggctgaggcaggagaatcacttgaacccgggaggcggaggttgtggtaagccgagatcgcgccattgcactccaacctgggcaacaagagcgaaactctgtctcaaaaaacaaacaaacaaacaaaataaccatctacaccctcagatgcaaaagcacagacgtcagccattctgtagccaacagttcactgccccacggggacactgaacattcgcaaatttgtactgaactgtgggaggagccattctgtgtcctccgcttggttttacaatatgcattcatgaactgtatacatgttccaccagaacatctttacttaaatgaagatttcactctcttctcttagcgacagtgtacagcagaattctccttgctgtaactcctcacaatgggcgttatggtagatttccgaggagtggatttctcctcctttttttttttttttttgagatggagtctcgcactgtcgcccaggctggagtgcagtggtgcaatctcggctcactgcaacctccgcctcccggattcaagtgattctcctgcctgagcccaagtagctgggactacaggcacctgccaccatgcccgtctaatttttcatatttttagtagagatggggtttcaccatgttggccaggctggtctcgaactcctgatctcaagtgatccaccttcctcggcctcccaaagtgctgggattataggtatgatccactgttcccagctgatttctcccatcttaatcatatcctctaaaaccaaagaactgacctggccaggagctggactcccggggcttgttggggccacaggttaggggtggggtttgccaccactcccaaaataggtaataaggtgtcagtggtcatggccctgtgtttccaggctaggatctcccttcatgccccttttttcccaggccacaggcctcctatctgggccaccgtctgagcttcccaccccctgggtgctctccttgctattccttgcgtggggaggaccaacaccctcccacccccaggcccacccacctctgcagtagcagctgctctggccgggtcactgtgcatctctgatgagctgctgcctgctgccagctccggaacaccaccttctgcaggccctggaggtggacctgcacccatgtctggcacttttcatgcaggaactgctgccctggggccagagagatgctgaagagccactgggtgctcaccccagcctctccccatgggcctctacgcagccagcccttcgccccctaccaggtgggaacacaggaggccaccctgactgtctgggttaaaaagcctctattatgggtgtcctgctggtgaccaggccagcccagctcatagagttgttgggtttgtttttgtttgttaattttgccacagtattttcaaatctggagaattcaggtaaaaatctaattttctatttttttttttttttgagacggagtcttactccgtcgcccaggctggagtgcagtggcccgatctcagctcactgcaacctctgcctcctggattcatgccattctcctgcctcagcctcccgagtagctgggactacaggcgcacactaccacgcctggctaattttgtgtatttttagtagagacggggtttcaccatgttagccaagatggtctcgatctcctgacctcgtgatccgccagtccgggcctcccaaattgctgggattacaggcgtgagccactgcgcccggcccaaaaatctaattttcaatttttctgtaaaaactagaagttctggaaacactggctcagtgttcctgccggggaatgattgggctgcataagcagctgtctccagcggacaggacatgactttctagaaccaccacagccctgcctgccagctcattaatgcgatatgtcggtgtagtgggcagcctccaagacagcatcctgtgttcgtgtcctgggcaatgccccgccttgaatacaggctgggtttactaatttgcttttaacagacagaatttggcagaagcaatgggatgtcacttctgatatcaggttataaaaagactggttggggctgggtgcggtggctcacgcttgtaatcccagcactttggaaggccgaggcgggttgatcacttgaggtcaggagttcgagaccagcctggccaacatggtgaaaccccatctccactaaaaatacaaaaattagccaggtgtggtggcaggcgcctgtaatcccagctacgaggggagctgaggcaggagaattgcttgaacccagggggtggaggttgcagtgagctaagatcgcaccactgcatgcctgggcaacacagcgagatcgtctcaaaaaaaaaaaaaaaaaaaaaaaaagactggttgggccatgcaacagctctttttgcccagaggccaagacccagagagcaagcctgccttgggaccatccctcctcccttcactggccacattcctcagggcttctagcacactgcaccctcagccagcctctgcaaatccagtccttcccactgccctattttgctgaccccttcccacgcctcaacttctctcgccactgctctgcccgctgagccctcctcacctcctcctgggaccctccctgactaactctgctggcccctaagggcaccatgactctgcccacttctctcccaactcagggctccgaccagtgactcctagaggccaggtgaggataaggatgaagataaaggtgatgacatagggactacattatccccattttacagatgtgtaag

SEQ ID NO: 5673 - DNA, 45038 bp, Homo sapiens
gaaagtatgtcataatcctattttaaagacttcacatgatctctatcacctactctgcccttaggtcattgatgacctgctatatttattttcttctattgcataacaaaatacaagaaatttattgacataaaacattagccttttattatctcacagttacaaggagtcaggaatccaggcatagtgtggctggggtctctgctcagagtcttacagactgaaatccgggtgtttgctgggctgaattccttctggagcttggggttgtgggcagaaaccagttccttgtagctgtagaaatgacatcctattttgtctttgctggttggtgagagtcactcttagcctttgaagggggccatgcggctaggacctgaggtaagtagttcataacaaggccatttgcttctttggggccagctgtgaattactagacagtctgctcagatggagtctcatataacagcacctaatcaagggagcagtgatcccattatagtcacagatcccacccacaaaaatggagaggggtgccaaagatgggaatctcgagggccatctcagaatcaggtctgcaaacctgcaacttgtcgcatccagtcgggaaacttcacttcttttggtatttgactctagaacagttggcaccattgrccactcccaccttgaaattcattcaatgactcctatttatttattatttttattttttatttttggctctcactatgttgcccaggatggagtgaagtggctatttctaggtgtgatcattgcacactacaatcttgagctcctgggctcaagcatgggacactgagcccagcccagcttatccattctacttttgatgaccatttgagggatctctagtttggtgatttgtattagttatcttgctgtgtgacaaatcatgccaaaacacagtggattaaaacaccatgtattacgtgacagtttctgtagattgagactccaggcatggactcttggctaggtcctctggctctggtctctcacaagactgtaatcaaggtgttagctggggctatggtctcatcttaaggcttgagctggggatgattcgatgctgaattcgcttaagtggttgttggcaagaaccattttatcacaggctgttagactgatggcttcagttcctcaccagctgttggcaagaggcttcccttgagtccttgccatatgggtccttccatagggcagctgacaatatgacagccagcttcatgagagcaagcacgcaagagggccagagagagagtgtgagcaaggcagaagtcacatccttttgtaatctaatctcagaagtgatatcccatcaattttgtcatgctctatttgttagaagaagttgctgggtccagttcacacttaaggagagaagattacagaaaggcatgaatatcaggaggcagaaatcttagggagccatcatagaagctgtctagtacaaaggatataacaaacaatgctgccttacagattttcgtatatatattgtggcatatgagcatatcaggttatgcacctaggcatggagttcctaggtcttagggcatgtgaatcttcaagtttccatgacagtgccaaacttctaccaagtggttataccaattcacatttccactagcaacaagtgagaattctgtttgctccatatcatcgccaacactttttattatcagacattttatttttggccaatatgatttatataatatgtgatgtattatagctttaatttgcatttctaagatttctaatgaggtttggtactttttcatttatttattggtcatcttatatttcctcttttatgaagtatctgcctgtatcttttgtccatttttctactgacttttcttactgatttgtatgagttctgaagataatctggatgcttgggctgtggcagttatatgtgttgcaagcatctctctggttttgtttcctatctttttattcttttaaatatgtcttttgatgaacacaaggtcttcattttaaggcagttgaatttatcaatcttttcctttatgaactcttggactaagcctgtcttctagctattgttttccgcctatgtctccaactgtccccccatctttgatccccccattgtctccatataaacatcttttctatgctctggacacatgacttcaactgctcactcgatggctccacctccatatcccacagtcagtccaacaccagtttatcccaaaatgaactcatccctccaagttcaccttccgccaccctaccacccctagcttgtatttcctaactccatgactgacacaactatccaccaatcacaaagccagtgtcttgtgaatttgccctgactgctctttctcttataaggatccagtttttctgattctacaatctaaaccttgccccactctgtcttctcctctacatctccagtgccagaatgtaagttccatgagaccagggaccttgtccagcttgttcattaccacaatatcagtaagggatggtgcttaacagcatgaattttgcagcccaattacctgattcaaatcctgactccatcaattattaggtatctaagtaagtggaagttatatgacctcttctcccgcagtttccccattggtaaaatgggggatgataatagtactgattcatagggttgtggtgagggttgaatcagttaatgcatgtatagtatttagaaaagaacaggacacatggtaagcactcaataaatattgactattaatattataccctaccacctagcatgggatggggtataatattatgcatcaaaatatattttaagcatcaacaaatatttatcatcaaaaaactaaccatcaaataatatatatcaacagagatgaatgaatgccactgctttaatttagactcttattatcgttgcttagacaattgctgtagcctcctaactgggcttactttctgctaaccatcccatcccccattccattcattttacacactgccattagggttataacttcttgtctataaatatgaaggtgtggtgccactccattgcttaacaccatccagtggatccccaagccctacagggaggcagagcatagcccagactcctcagcagaacacatgtgcatgaacgtgggatctggtgattgcctacctacctcttcaaccgcctccatccttcacacaacctgcgctccatttaccaaaccactggcagttccccaaatgagccacattccttcattcgtctcctgcccagaatgccctccctctgtcccgtccaggtgacaaagtcatctttttctttttcaccaagtcccagatataggcactcccaggcagagttagatacctatattattgcagcatttatcaaattacactataaccatttatttacatgtccaaccctactcccccaggctgcaagctcctgagagccagatcgtatttagatttgtatttctggcaagaagcacaagggctacggaagcttaatacacatttgttgaatggatggttagttttaagaagtacctaataaaccttggtatttgtatttccttgaatcttgttttggttgctaccttttttaatggaaatagtcactactgcttatgtttacaagtttattgagttctaattttatcttttaagataaagattgctgatatcattcattcactcattcattcatcaataaatatttatagggagacacttgtcagatactggatttgaagtgaacaaatcagacatggcccctaccctcgtgaggcttacagtctattaaatctattaagtatgaaggacaggctgaccttgaaccaataaacatgtccatgtaaaatcataaattgaaatgagagttgtgaaggaaaagaataggttataaagaggaagaataatgggagggacctaatttaattagaagagttagggaagttctctttgaagaagttacattacagggaacactaaaatgtgggtaggagtgagctacgcaaagtcatggagaaagagtattccaggtagaagaaatagcatgcgtgaagaccttaagcaagtggaaggcagctgctgaggctggggactgggaggttggggctggaagcagacaagcctagagaagttgtcaggggctagacgatggggttttgacctagaatataaactttgtttgtagttcatagggaagacattgaaggtttaatatatgggaatgacgggaacctctggcagggctctgcctgtgagcatcacatagcaccccgaggatgtgtttgctactctaggtttcagtggagaaaaaagcaagtgacaacccttctgttcctgctcagcaaaagctttgatcaccagcccccttcccctgaatatactggagaaaaataacagaagtgcatttcaaggtccacatgtgagaagaccctaagctgtcctggctgttcaggtagaagttgtcatcttcctcaatgatctcggctgttggaagacatggccaggcagacagaatctaaaagttcttccaggtgtgacatgagtccctggagctcagtgacagaaaccagtgtccaaaaccagatgccaccctggggagggggctttgggagttcctgggaggccataacaccgtctggaaggctcctctctcccacatattcacaaagttgcatgataagccaggcccctgctggtcttgcagcatccacctatgatgcagagtaaacagtgccacacgtcaagctgtccccaaccttgccctcggttccactaccaaaagagggaacactgggcttgccccagcaaggtgttatttatgtcaggctagggccactgtggctcccagctcttactgctttctaggtgcccttacagacttccccactgccccctgcatatgccagagtgtgaacatcccctccctctccacagcccccacagtggggttcgggtgggcagggaggtggtttcatccctctacatacagcccttggagacctacctaggcaatttgtcactcaggcttcaagctgccagccgaggaggggagctgagaagactctataatgagatctttgcactgtwattaagtgccaggctttgttttacacctatctttcccgccttgcccgatcccaccgccaagctcctccaggcagtgagtggggagtgtcagctgctctgtgattacaccccaagtggcaggtggcagggagctcctccgcctgcagtctgcgccccacccccaggcttcccccaccaccagtcttaactcaagacagtgctatttctgtccttgaactgggtttcaccccagaaagccactccaccgctttctcataaggctacctccttttaaccctgtggttgcacggcctctggggtgtccatttctttcttttgacacgtcccttttcctgaaagtttcagcaaaccccataggcagagggagttagaaaaaggaaaagagaagttagggcaggaggagcactgttcttataggacaggaagggtctgtcttctctcttgggtcctccacacaaaatcggagcttccaaacaccccagctcccaaacatatgcagcagattctgctgacaggaatgtgtcactgtgatcttcacattttagcctgaagtttagcctacctgaagaagcaccggagtgggagtgggagaacatgggatggtgcttctctttggcctggctgtgcttttggacacttcaggtcttcggcctgggtttcctcctccgtacgatgaggagaggatgggagggggcaatgctggcatgtgtgatctcgatagacactgtggaagtctgcagagaccggagcataacctctgcctcctctccccgggcctagcctctcacagccctcagagaaaaccctgagctgcggcgtggccgagacgggggcgtggcctggcaggtgggcgggcccttccgtgggcggggccgcgaggttttcaggakcccgagcgagggcgccgcttttgcgtccgggaggagccaaccgtggcgcaggcggcgcggggaggcgtcccagaggtgagcgccctgcagcggcaggggatgggccgggggccctaagtcgtaggcagcgcggggcggggacgcggctgcctgcggaggtcggactcctctccgccctcctcccgggctgtccgggtctattttccagtctatgtccaactcgcgccgcctcactaggcggcgctctctgccccgcggcacccgcgagacgtggggtccctcggcccagggacggggtgagcgtgtcatgtgggtgccctgtgcccggcaggttggagacgaagagacctcggcacagacgaagtcactcacatcctcgctttgaaacagagcgggtccttcttgtgctgtctcgctgtcactctcgcccccaccctgtggaagaggcaggtggcttgtccccagtcactttcttccttggaaaagggagacagagggccatctccagcagggccatggaaatcccagaaagtcactgagctgctcaacaaaaggccctaaacaccccaccccacagcaccaggcagtgcacactggccaagactccgtggtaaatattgctggcctttatgttgagagggggaaaaaaaagcctgcctgtgaagatcatygcccagtggccatgctcctgtgaaaacacaattggaaagccatttcctaaggggcgagggtgggtctgggaccatgctgtggcttgggtgattggtggttgcaggagtgagggtgctgccctgggaaggcgctgaggccctgttgggtgggaatcgayggctgcggctttctcccggaggagggagagcggtgttgttacctagtgttgggaacacatccgtccagcaccgtgaactgcaaacaagcagagtaaccctagtgtccttcagatactgttgctgagcagtcacctagtcaatgagatgatctgtttggacggcaagtgcatctgtaatgccgccctcttgctcagtgcctggaagaggcattggtgactccccgctaatgctaggggtagctaccgtgcaggagcagtcaggctcttgcagggccwatgtggtttcatcaattttctcctgcatttacccagcccctccgaattctgagaagtgcgtccaagatctcttggactccttgactcagttcacccttgttcttgtgggcagaaaacaattcccagtgtgccatgcacagccagtcagaagggaagccctggagcagggccctgggagaagttctgtggggctggatgctaattattcagttactggattgtggggaaattccaggggaggtcccagaggagagaccgtgctaaagctaattactaagcagtacaaaaataatctctctctctctctttctctctctctctctctctctctctctctmtmtatatatatatatatatatatatatgtaattttttttttgagacagtctcactctgccgcccaggctggactgcagtgacacaatctcggctgactgcaaccactgcctccagggttcaagcgattctcttgcctcagcctcccaagtagctgggattacaggtacccaccactacgcctgtctaatttttgtatttttagtagaaatggggtttcaccatgttggtcgggctgatctcaaactcctgacctcaggtgatccgcctgtcttggcctcccacagtgctggcattacaggtgtgagccactgtgctgggccaaaaataatctaaatttcaacaatcagcatgaccatgcctgtgcgtatgaccctaattatcagtctgactgattcttccttccaaaatgatggcagaggatcacctctttggatatttacagctctgagcaaagcaaaaagcatgtaggtgccattgtctgaatgcaaaaccagccatgccaggttttcggtgttgtttctgaggagggagcgcctctctggaggacggtgtttccagaacagtgcctccgttgttcattcccgtgcatcaggaagtttggctctgctgagtgttgaaagcaaaactctcctgtttatttgtctstgtatactracagacttaaacagcagacagcactggaatgtccagttactgcatccagatgtgtttgtttcactcttaacattgtggaaaagaatgcagaaggcagatccaaagcttcaatcagatttctgaagcttaagtgattcccagccttggtcccttaatgtgagagcaacagcgtatagtgtcttccgctctctgggacaaacccaagtttgaggcatagtccctgctgtccaaaagctcctaggtctaagtaggaagacaaaaccagcacctgtgaaacaattagagcgcaattaagtgcgaaagtatgtggcagcatctgctagctcaaagaagacagctagtgcagactgactgggaaaggaagagagagcttcacagagccagctggtgttcagcttgacttaagaatgaccatcaagggcttggccaggcctaggaaaggaagcatgaggatatatgaagctcagaataatgaaaggcacttgctgcccagagccaattcaaattcctgccttccgggaattctggctgtgggtcctgccactctcttcctcacccagccatgatgcccttcttatagcattctaaccatgccttttttttttttttttgagacagagtctcactctgtcacctaggctggagtgcatttgtgtgatcttggctcactgcaacctctgcctcctgggtttaagtaattctcctgcctcagcctcccaagtagctgagactacagtcacgtaccaccatgctcagctaatttttgtatttttagcagagatgggatttcaccatgttggccaggctggtctcgaactcctgacctcaggtgatccacctgccttggcctcccaaagtgctaggattacaggcgtgagccaccacacccagcctgaccatgcgttttttgtgtgcctcctttactttatgcctactctcctatgctcaaaatgctctgctgaccaatcccctacattttttaagaagcagctcaaatggcaccttctccagtgaagacttccctggcaggcccctacccgagtgtttgagcagagttggagggtttctcctttgttctccattggtccttgcatagacctctgttgaagctccgtattgtccataggagttaagggatctttgactcactcactgaagcagagctgtgtctcacttacatagggctcccctgagcygaatttggtgtctggcacataagaggcgtttgataaatgattcttgattgaaattcaagcccttataggtaacagtgaagtgccccaccaacttggagtagaaggcacaggttatgtgttacaaggagtctcagattggataaattagatggagccaattcctagaggccttgaggagtctgagtgtaatgcagtggtggtgctcaaaactcagagcaccccctattgccttcactatagaattctagagtcttcttgatctgcccccagcatatcctctttagcctcatcttccaccagctcccaccttgagcccacaaatctaccttctgagccactgcagccccaggtagctccccaggcctaggctctctcttctcctttgtccatgctrtttggcagccttggccaggaatgcctactgctctccctagctaattcctgatcattaatactccagatctgaatcccctatgtgcagaggcccctcargctgggttttcaaattctcctctgtgctccatagcaccctgcacakcctctaayagcatttatcacaccctcttatggctgctggttacttggccatctccctgctgggatggctccctgaaggcagtgattgagttaatccttgatgtatcccccatcagctaacattgttcctaggagatggtgtccaataagcattggatggtaggctgaaccagagtgataaaaatatcaaacgaaggacaaatctagagacatctggaaggggaaaactagaatttggtgatgagttatataaagagagtgtattagtctgttatcacactgctaataaagatatacctgagtctgagtaatttataaaggaaagaagtttaattgactcacagttccacatggttggggaggcctcacaatcattgtggaaggcaagggggagcaaagtcacatcttacatggcggcagccaagagagcatgtgcaggggaactcccatttataaaaccattaaatctcgtgagacttattccttatcacaagaacagcacgcagaagacctgcccccaggattcagttacctcccactgggttcctccctcaacacgtggggattatgggagctacaattcaagatgagatttgggtggggacacagccaaaccatatcaaagagtaagggacaaggttttttcaaacctatgaggcaggtggagatggtgtgctrcagctgtaggattccctggcctggggagaagtccacttatatgtctcygagtactacgcaaaaatttttttgtttcctggaggattttcaaaattcaaaatatcaagtcactttgagacatattgagtctgatgttaaaaaggaaatgwtctagagtcaactgaaacacacactttaagtacaagtgaggtcaggcctagagaaagattttgggagcatagtggcracagtttaacttgtgaargcaaatgtggtcactgatggaagaagcctgaagcagagaacaaggtcttggggaaacctrgaagccatgggggtgggaaaaagaaaagtatctgttggaaaatagaatgmtagaaagatagggaaaaaactaaggaagccaaaggaagagatatttcaagaagaaataggtggccaaagctgcccaatgctaaacaaaacaaaacaaaacaaaacaaaacccacaaggagattcataraagaaagaggctgggtacagtagttcatgcctgtaataccttgggaggccaaggtaggaggattgtttgaaaccaatagttcaagaycagtctgggcaacatagtgagacccctccacccccacccccacacacaaaaattatctgggcatggtggyacatgcctatagccccagctactccagaagctgaggtgggatgatcacttgaaccccggagttcaaggctgcagtgagctctgatcgcaccacttcactccagtctgggtgatacagtgagacctggtctcaaaaaaaaaaaaaaaaaaaaaaaaaaaaaaatttaaaaagccagacctgaggaggttaaagagaggctagttactgagttactgggcaatggaaacattgggtggggtttttagactttttgtctgaggaatttggccataaaagaaagaaggaaggaggggtctgctcaagagaagactttctgtttgttttatggtaagagagatctgcctccctttgaccacactagggaaggagctcatttatgctaaaggaatatggataaatattcatattgttcacttggttatatttcatttaaaccttcctctcctcctttcctgtcctctgcaagtgccccatagaactttccttctggggaattgccaaagtcatggtattgctaaatccagtgacagggtgttgcaacacagaaatcattggttctcacttcactggcctgtaatgagactccctcaaatgcttccaaacaactttccttcctaatagtgctagtcaggcattttctcttttactgtgcacaaattaataacacagtaaaagcagcaataatagcaaatgcatagatagcagttactctgagctacagactattgtgagtacctttgaggggtaagtggtgaaccagtattcaagcttagcatatttgtcttcagggtccatgtacttaaaccactatgctaaattcaagataagtaagtttgtattttaccatagattgatgttcatgttcctgacactactacaagattcatactcctgatgctactgacaacgtggcttctccacagtcaccaaaccaggtatctctctggacccaggttcactgtgggttggactagctttaatagtcaataaggccagggacaatggcacacgcctgtaattccagcactttgggatgctgaggcgggcacatctcttgatcccaggagttcgagaccagcctgggcaacatggcgagacccacttctacaaaaaatagaaagattagctgggcatggtagcatgtgcctgtagccccagctacttgggaagctgaggtgggaggatcacctgagccgggggagttcaaggttgtgccatgatcatgtcactgcactctagcctgggtgacagagtgagactctgtctcaaaaaaaaaaatttaaaaaacagtcaataaataatttgatagtcaacaagcaatctgccacatgcaaagtattgcaagggaccaaaaaatataagctatatgtcccatctcatttactcttcataaccatcccattttayagtcagggaaactgtctggatttgaactcagaagaccatgataaaggcaaaatcagaagtcacttttagtcctgagtttctggggtctgagattcctcctcatcttggtcagagatataactgggttcagatagcttcaagactaccttttcttttatttcccaacctgtgaaccaaaagggtagtgagtgtgaatctctagcatgcacagatgtgcaagaaatactgcctctcctctattttctagatattaatattagtttagagccttcatctcatctggccagcaaccatagaaatcaccccaggttgtgtcactgtgtcacaatttcagatctcttatgcattgccaagatcccaggggctcgggtgcaggtatctcctgctcccccatctggtccactcgggttaccactgaaggcactcttgtgcctgtcttgcctagcaagtcctcactgcttccagaccacatagctaactcactggggtcctgccagagtcctgtcttcctggtgctgacagaccccttttcccttcctgtcttcctgtttctagaagcatgtctctctgctttacccatcagcacaccccacccctcttcccccaacttggcaaagactttgtgtccccaacctaaggccctgtttggaaaatcaaagccagaagaacttgcaggctattcctggtagggttctgacatatacctgccctggaccaatgactagggagctggctacagaggtggaggtgagcctaggaaagcagaaatacaaggagagggggaaaaaaaagtcaaatctcaaaatatctagccgcagacataagctcctctgasggtaatttcttgaggggggaaaaagttgctatttaaagctaggatatatgtggttccatttttttcatcggtacattaataacatcattttccactatgtatcttcaagatccggtgtaacagccttgcaaatttgccagaatgaagaaggaatgttctgcttcagggaggattggccctggtctatgattgctgtcatgatgatactcagcaagtttccttagataacttcagagttaacaaggatktaaaaatgcttccatttcaaactcaccgttatacatatgcagaaactgaggacaatgaaagttagagttgtctaggatacccagactgtggctgaaggaggactagaaccgatatttatcctctcccagcccagcatttttgccatggtctcatgtatctcgaaagtaaccaccactagcaagttggagccaaatcaactagctgactccctgccctgactcagaatggagcatagccaccctgggcagcctgcccaggcagattccacatgcagtaaacctccttcgggtcccaggacactgggcacagggtggggacctgtgcttccagcaggggtgcgctccccagcctcacctgtccctgcttacagtccctcaggcaacaccagtgaaatcatcttcctctcagggcatcctcatcctggcctgagtgccccccacctttccttctcaacctcttcagggcttaccttgcatcagggggtgtctccagcagctgcagggtgcattggattttatctgcctgggaagctttctcttgattcctttgctagcccagcacagactacacatccctctcagaacagttctcaagtgtttgatactctctcttcacattcccatttcgtatctaactgatcaggttaatagggttcctagttgccggtcaccacccccaccccagctgtttccaatttacatcacactccaaatgatttttgcagcgcttagcagattgtctgtgtcattactttcagggatgctatactggacttccctactctcatctgctccagccccctgaccttatagttgcccagctttcctggcaattgactttgcccatcaatacacaggatttagcatccagggaagatgtcggagcctcagatgttaattttctaattgagaatgttggcgctgtccgaacctggagacaggtagggatgttcactttctgggcgagccaccttttcccgacgattttaaatgttgtgctagttgttcgtttttaataatcactaaaaattatttctttcaatcagatgctttaaaattgtgtgctaaagagttataatgtgcaaacaacggggaagccattctgtacctaaaccatgtgttttcaacataacttttcagagtatcagcgcctttgcttgctgctgtttttgctgttttttgatgctgggaaccaccacctaaagatagtaaagaaaacacaggaagctttccggtaactcatgctaaagaaacacaaaatcaccccagtgccttgagaaatttcctttccctctctaactttccccttcagtgttctaaagggaaggcgtttctggtaaggtgtagttgcgtaaatgatggctgcctacttcagcaagcaagaactgttggagtattaagcatgggtaactggatattctggtttgggcactggaggatccctggaagccggaagcaggctgttgctgccggggtaggggcggcgggggtgggaggtagaaacttattgctgtgattttataggcagtaaactgatgcttagagaggttcagcactcgcccaagctcacacacctactaaactgtggagctaggatttgaatccagctacaaatttagttgtcattgaaatgtctaaatgcactctactgcgcaagcgataggaacttcccagcggagctcagctcagggacgcttgcagctccccgcgccccgctcgactctccggccgcggctccgcgggctcctccccctcggtccctgccccttttgcgccctctgctggtctctagggaaagcgcatctcctgaaatcagaagtcgcacccaagctgtccygtttccttagctcctagtaaagcgatatgacccatccatcccctcctcctcaaagcctcacatgaatcttctttgaggtactctctgatgcttcactcttcagcgctgagaaaaatggggaggaaggggaagtgaatgtattagtatagccccttctcaaaaccaatcgtgcagcatcttagccatgccttatcctggaagaacgaggcagctcacgtgggcatgggggtaatgagcagggaggcaattacagactcttaggttctcaccgctaacagtgtggtcagtggaccagcagcagcatcacgtgggagcccgttagaaatgcagactctcaggtccttcagccacagccctgatgaatcagaatcaccgtttcaaggaggtctcaggcgggccgtttcaggttccgagctcgctttgaggctctgtggatgttttgcagcatattcaattttgttttgttcaaaggtcacagtgacaactaagtttgcagcgggattcaaatccgagctccacagtgtaataaatgtgagatcttagayaagtgcttaacctctctgagttaatcatctatcaaataatgaaaagcactataagccaactcttcaactttcaggacattgttcacccgaaacccgaaatccaataactgtgcactgtcttctaacacagccataatttacctagatgtacygcttagaaatgtctcactctcatrgtgaccttagttctatctgtccctagagagccgcaagaccattttgtctggargttctctgctcactggacaatagggacagtggaattgtcctcatccttgtgcttgagtctttggaaaccaaatgaccccagaaatgtcatgaaagagatttttaggtcccagaggaactgaatggcttagacacccaccttctgaacaagaggctgggccagagatttctcaaggtcccaacttcaaccttggtgttctgtccgccttgatttacaaaatggtcttgatcttttccaattaaaattcyatttagtagagatacacagaaagtttgcaattcttccacaagaaaactgctgtatggcatagaaaaatatctacataatattttttgtttcttcttcttaattagctttcctattttcccttaggaaaacaaaaagtcctttctcctgattcaccaaaaaataaaatactgactaccatcactgtgatgwgattcctatagtctcaggaactgaagtctttaaacaaccagggaccctctgcccctagaataagaacatactagaagtcccttctgctaggacaacgaggtaagtgcttctggtaaaaatgtgtcatagtgtgtstgtgtctgtgtgtgtatgatacrtatataaatatatgcatatttgtacatatatatatacatatgtacaaatatacatacatataaggtctctctgtcgcccaggctgaaataaagcagtgtgatcatagctcactgcagcctcaaactcttaggcttaaygatcctcctgcctcagcctcccaaatagctcagactacaggtgcacaccagcatgcctggctaatttttctgttttttgtagagacaaggtctcactatgtggcccagggtggtatagaactcctgggctcaagcagtcctcccatcttggcctcccaaagtgctgggattacaggcatgagccaccatgcccagtcctgtcttcaaaakattaatggagaaaaatattgctggggtacttaagttgtgccaggtactacagggggatcctgcatgaatgaaactgagtgcctgcccctcaagacttacaatctagtggagaaggcataatataataaaaatgccatgatggaaatgtacccagaataccaggggacggagataaagagtgcatataggccaggcatggtggctcatgcctggaatcccaacactttgggaggccgaggcaggtggatcgctggatcccaggagttygagaccagtctgggcaacatggtggaaccctgtctctacaaaacaaaaacaacaacaacaacaacaaaaattagctgggcatggtggtacaagcctgtagtcccaactacttgggaagctgagatgggagcatcacttgagcccaggagattgtggctgcagtaagccctgattgcaccactgcactctagcctgggtaacagagcgagatcttgccgcaaaacaaaaaaacaaaaacaaactagtgcacatagaagtgtgagaagtgcatgtagaattctcatggcagaggtggcttctgaggtggcctttgacgggggagttggaatgggatgagcagatgagacattcacgagcattccaagccccaggaccagcctaagctgagagaatggggatgagggcagactctgagaatggcaagttagatctcgagcacaaggcagtgatgggatgccagtgtagatacagccaggaaggcagggtggctggagtttcctgctctgtgaaatgaaagggttcaagccctgagggcctctctagtcaaccattccagaattcacttagagtctgtggtggggaccctgaggtcatcctgaagagtttgagtgatatgagcatgaggagtcagtgaagacttctaatcagagtcatgccctaggaagccccctcagatagtaagtgaggggtgtgtgtgtcagggtcaggcttactatgggagactagcaaggtggtgtctcccatatctagaggggaggcagtggagccttgcagccaagcagtggctgcagaattggaagaaggggaatggatgctggaggcatcctgacgtgaaattcacagaactggccaccaacagcattgatgccctgcttaaagcttcttccagctgggaattaaggaaaccagaatgacctcaccctcctggttagattttaaggatatatacactaaagacagaaataaggatccatgagcaaagatgaatatcaggcagtgtctgaccagtgagaaaggtctcagaatggctatagccctaaatgctctgaatttgggggaaatgctacaaagatgcaaaatgatttttcaagctctgttcagataaggaagaaggaagcaacaagctcactctcagaagcagatggtgcaatggtataatactagcagataaccactccctggcaggagagaagtgatggcccaggtaggagagaaagaagcaagcaagtgacgtggggctgttctgaatctgcccaagtccttctcagaccggcccatccaaggaacccagagaactggcagaggagccctctgcacctggcagccttttctgcagggccacgaagagggagggaggcaccaggcaggatgtgagcaaattcattcattcagcagatatttgccaacataatacattctaggtgctggcaacacagtgagtcaaagagaaccaaacaatacctggcctctggaacaaaattctgattcacaaaaagggacacaggtgggcttttaaaccacaaaccagcgagcttgacaacaactgtggacaaatttctagaagaggtttagtaggtggtctgcagctctgtggaacggtgcggggatccctgtatgtcagcttgtgtttctgaatggccagtcacagagaactcagcttgtttccatcctgacagggttacccttttctagcaactctaggaatttggcagggcatttgatagtctctcagggtacgccccagcccccacccattgctaatggaataaagactgcacataaaagtgcacataaaagggaaatttaggctacacttaatagacgtgctttgtattatggaatcataaagacctagagaggcaaacagaccctaatgagaccaccgggcatcagtaaataaatcaaccgttctgcagtgcacagaaacctcgtgtgctgattctctgagtcctctttagagaacagtagttagttgtcagacgtttagcccgctgtgttaatccctgatgctaatgactgttgctgctcaggcgtgtgatggctctgaggagaaacctgggtaggagctcgctttccattttgcccgcatgaacggactgcctgttcctggccgtggagtgcattttgcactcacgtttgcacgagtgagctgccctccctccctgaccttgttggcctgagtgtgactgcctggggcccagtcacacctccctgaccccagtttcctctcccagtggcgctgctgggtgctgttccccgggactgcggcagagccctcctcgcgggccygacacggtgtccggccgcacggatgaccggtagagggcagcagcgcgctccgggtcggtcgggagcagggccttcctagtccagaaaccgcggcaggtccgctgctgagggccagggcctggtgggctaggggcaagagcaacgtggtgaaccggtgggctcactctgcaggaagaagagaaagaggagacgtggagaagtcgtgctgaccacatggcgtatcggacactgcacatttatgtgggccccaatgtgcctggcgcatggtttctgcgacaggagcccagccgtcaggtgtagacgtgcaggaggctggcagatgggctagaaaagcaaggaggctcagcacttggaggtgtcgaaagagggtttgaagagaaagcccggagtgcctggaatggtggggaggcatgaagaggctgacaccatgaaaggcaaggacagttcaagggcactttcaaggccttcagggaatggtgcagagaagtgagcgcgcgcaacagctggagagggcggttgtgaggaaggtcggagagaaggccctcctgtcactggcagagggtcttgactgcaagttgtccaggttcttggcgttttgaacaaagaattggacaaaatacccagcaaagcaaaaagcaaccaatcggaggctaggaagaagctacagttatattcctatgcaaatgaagactcgacaggccatcagtctgatgggttgtggacagcagtcattcagaggctggagtgaacttacaaagttgcaaatgaagactcacctgcagtcagtctgattggttgcggacagccaatttcccatctgccacacagaaaaggacaaagggagtagcgtctggtccttttgttacttatgcatggaaagttaggattttcctttcaatttagttctgggaagtcggtgtgaaacagacttaggttccctgcctccagaccctattctactgcctcactcccacattgttccattgtcaggaataaacgactctgggggtaaggtggacctccagatgacgacgaaggtagaaggggaggagaggctgagaggctaacctgccactgggacccagggccaaggccctttgtgattgaggggaagtgaccacagatcagcagatgatgactgagagatgggctggagcaggaccgtggtccggtcctgaacaacacatgcagccatgcccagagatgctaggcttagaggctaacatgcagtagacagctgcgtggccttaagttacttaacatctccgggcttcagtttcctcatccgtaaaatggtacctacagtaatggtacccagtaatagtacctacaaaagactgggaggatgagggaagggagggagctcccagctgtgtggggaggagcatacrggcgagggtaaccccccatatggtattatagggatttgcgtctatttctgtcctccctccagactctagcctcatggttctcagacatgggtatgcatcagaatgacccagatgcattaaaaacactgccaggtcccagccccagagcttctgattcagcggggctggggtaaggcccagtaatttgcattgctcgctaagcccaggtgctgctgctgctgcttgttcccggactgcactgtgggcaccactgctctggagtctgcagagctccagcagggactcctgttgaggagagacgggcatatagtgggagcccaggcctaggacgagtaactctaggacaaacaaaaattccagatacagtgcaagaagaggtagtgatgaatgaaaaagcgatcactccagcagagctttcaagtcatggtggtttatgaagggagttagaattgcacctggggagcaagtgctgaggttaatggcagtgcaattccccgtctgttttattggaactgttgtcagaggcagaatgctgggctggagggactgtggccctagcaatgttttggacttgacaatgcccatttgttgggcatggttccggtgggatgctgtattatgcagctagagaatgtatttgtcctggaagagttcactttgttcactgccctcgagcctttatccaaggctaaacccacatgctgtacctacttttggaattggtccaggaattttatacctgtgtgaatktggagaaactctctcagacacccatttggaaatgcattagtgtttttctcagtgagtcctccatgcttgctgttccaatggccctccaggtttgggcccagcacctgccaggagaagcattccctctatagcttccacctgaccacagccagcccaagccctgctcagaaccccaggcctgccagcgagcctgtgactggaattatctattagggakcaagcattaacttgacacaggagcagccctggctcagctggaggcatccgcatgctgtggtgccccaggaacagaggcaccccygaaatgcargctgtgtgtttgctgcagagacaccatggcccataactccccaagcataagtgagcagctctgctgtccaggcaatgaagtcaagaaagggaaccaacccagctaatggctgggattaaagctaaatgaattcagctcaaatgaaagggatactgacccttctccctctggcctcattaacttaattaacagtgcttggcaggagtattgaagcctgcattgattgttctgtttctgtttttccccctcaaagccctagatacaagttaaatcagccttaataataaaaacccaatactcaacagccctcagattttcttaccagcccttcttcctctaagagaatcacttggtttctgagttggaggggatccattagaccaacacttctcagagcatggcctgagaccactagcttcagagtaactgggatatggctataaaatgcactttccaggcctcagaggcctgtggaactggaatattgagaagtccagtttgggtatttgtagtgggttttgggggtttaatttaatttttttaattgtggtaaaatagacatataattttcattttataaaaaatgtccattttaataatttttaggcagacagttcagtgacattaagtacattcacyactgtttgtctccagaatgttttcatcatcccagactgaaactctgcccattaaacgctaactccccatcctcccctcccagcccctggtaacttctgctctgcttcctrtctctgaatttatctattctagatatcttgtaagtggattcatgcaatatttgttcttttgtgactggcttattttactcagcataatgtcttcaaagttcatccgtcttgtaccgtgtgtcagaattccattcctttttaaggccgaaaaatatcccattatatagacaacaaattttgttcatttattcattcattggtggatatttgggttgtttccaccctttgactattgtgagtgatactgctatgaatattggtgtgcaaatatctgttgagcttctgcttccagttcttttgggtgtacacccagaagtggaattgctgggtcatgcgacagttagttctgtgtttcattttttgagtcagtactgtttttaagcagcccacatggttctaagctgcagtcagggttgcagccagaagaccaggtgatcagactctctgctggtggagtcacctgaagactctgaacaaccctggatgcccaagccacactccacaccaactaaatttgtaattttttaaagtctcctggtgattccrgtgtgtagccaagtttgagaaccattggtttccatcagtgattctcaaatttgagtgtgtataaaattcacacaatggctaaggatacagattcctgagagagcacaccaccacccccccaccaacaccacaacccccaccgccaccaccatcaccaccaaccaccgccaatcccaaagaggctcatttaatgcatctgtggtcagtctgggcttcctgggtctgaagacttcccaggtgattctagtgtgtagccaaggctgagagctactaatcttgttaagtctttcaatgaaacatgagaacactgagagtgtgaaaggtgacacactctgcccaagtccctgagctcgttaggttctgagtctgcactcattcccagggctgattttcaagacagtcccacgggttctccatactcagccttgcaggtgcagggggtagaatcttatatagaacctgcatcttttctactcttaatttgaactgtaatccttgaattagagtgtagtcagtgctgctataatgcttgttttggaatgtaaatttgtttctaacgtgattgatgtattagggaacaatattaatgtgttagggaagactattgatatgctggagaataatattaacatattcaagaatgtgaatttcacatttgcttatgtgcaatttyttgcatgtaaaggcagaaaactgcacccagctgtgccaaaacacaaaagaatacacaaaatacacctccaatattagtcagctacctcattctccatgtgtgatttgagccacatgcacccacatctgttgctgtaacttcccctctgatatcaaacaacccttcttcccccattcacaataactcactggcggagtgcggtggctcagacctgtaatcctagcaattctgaaggctgaggcaggtggatcacctgaggtcagaagatcgagaccagcctgtgcaacatggtgaaaggctatctctactaaaaatacaaaaattagccaggcatggtggtgcacacctgtaatcccagctactcaggaggctgaggcaggagaatcacatgagcctgggaagtggaggctgcagtgagctggattgcattccagcctgggtgacagattgagacttcatctcaaaaaataaaaataaaataactcacaagctgcaatctttcggatgtccacttccacaagcaaactgcaggtcattttcaaagtcaagtgctgtattatgtatttttaagaatttaacttggctaaaactgtgctaccttaagggggctccaatcctttttttttcyttttctttttttttttttgttttagayggagtcttgctcttgtcgcccaggctggagtgcagtggcatgattttggctcactacaacctttgcctcctgggctcaagggtttctcctgcttcagcctcccaagtagctggaattacaggcacccaccaccacacacagctaatttttgaatttttaatagagataggtttcaccgtgttgtccagactggtctcgaactcctgacctcaggtgatccacctgcctcagcctcccaaagtgctgggattacaggcgtgagccacagcgcctggcccaatcctttctttataggccactgttaagttttcaagtgtgaaacaccctagctctatttttcccatgagccttgtggtttttattgtgtgattttgcatagtgtaatgacttgtaaaaaggaatgtatgtcacctgatagaagaactaactgtagatgtaattatacacattgctttttagcatccttttaacaatgagtgagcagctcactgcccccttgagaattttagttcctgtccctctctttcctccctctataaccactagatggcgcactcctccgctggggtcgggcgcctttgcagcggcaacctcaacagcgtggacgccgttcttgaactctcgtctcactgaggtttgattgggtctggaacaacttcacagcctggttctcctctttagattggatttccccaatcccagtgctcattcaagatttacttccgcccactttagctctggcttctttttggatggtacttcttcccaggctatctgcaggaactgcctcgctgcacacacctctgctcacctgctcacctggttcctctgctcacctgtcctgccatttaacccacagagatctacttcagagacaaaaatctcgttatttcatgcctttctgtacttcataaagaaatctgtctgcgtggtatctttgtaatacgacataagcccagacaatgttctttcacatccatttgttcagctggccttatccaccttacttacttactttcattttagcttccctattaggtacttgaaaattcagtatcctggaacatatttcgtttggggctgtctttcacttatctttaccacaaattcaaggtcacccagtttggtggcatgtttgggaaccggcattgagtcatccataaaaacaaagaatttaaactaaaaaatgtaactgttcttcagagctggcattctcactcccatgtctgcagggatttctctggtttcatgagatgagaatttccttctcgtgtttggataaaatagcagctgcaaaactgtcagcaacttggggtccaagtttgttctttcctgcaaatactggtagttcaatattggaacatatttatatcttagagtcacttaaaatcctcatttctgaaatcaaattttctattctcttttcttctagaatagagatcagcaaactacggtctgtgtttggactgcaaaacctaaaatatttaccctctggccctttagagaaaatgttttctatctcctgttctagagcctaaagtgtgattgtttaacagaaactaagggtcctcaatgtgacatggagatggacaggcctcaggaagtcagcaaatcctctgaaactgggttcaaaatttggtttgtgatgcaaatgtgcatttttataggaaaaaggatcaaagctatcatcagagtctcaaatgggtccaagacttcaaaaggtttaaaaacatgttgtctacttatgggcagtgtgactgagcatgagagcccaccataacatcctaggtgtgagcaatgaagccaacatgcttacatgccttgttagggcacttcagaatctacttcatactataagatgtggaaaaggttatgtggaacccaatacaaatatggtctttccattaccatttattttcctccttgggtgtcaaggcctgttctcccccactattcttgtctcatctgaagtacatcttcagactcttcaccccaggtaccactgagtaagggctcatgcttcctaccacacacccttatctctgcctcccaggattatatcagcttctagaatcacagccttccaattgcacgccaggaaccctggagctggatttagggcccattgcaataactgcctctcatctcatccattgtgacatctgtccctctcttcatagattctattctgccctttttaggttggtttatcatcatgatgcatatttgatattattgaacactgtggggtgtcaatgctaaatgtgtaattgaggatggcagggacagagcagagcacctcccatggcacctgagaaagcctgtcccaaaccttggaggtaggagggatggtgcttgcctttaggagtttcttctgaactgtaacaccctcatctgccctgattggtttctattttctttcaataattcttcattttatctattgagatcactttgaacttttatcccattttccaaaatgcagcctcctgcctgtgtgtgtcatctataaatacaaggtcattasctctgaggcccatttgaagccacaagaaattcactgagacagaaagtggctactttgtttgcattactcaatctcatcacctacaaaagaaacaaacactggccaggcacatgcctgtaatcccagcagtttgggaggccgaggtgggctgattgcttgagcccaggagttcgagaccattctgggcaatatggcaaaaccctgtctctacaaaaaaagtacaaaaattagctagcatggtggtatgcacctgtggtcccagctattcaggaggctgaggtaggaggatcacttgagcccaggaaattaaggctgcagtgagctgtaatcgcaccactgcactccagcctggacagcagagtgagaccctgtctcaaaacaaaacaatcacaaactatgtagrtggaaagaatacataggattcgcagaattcctggctttagtcatcagagtgcctgtaaggaatgtggaaaaagacctggaagctttacctctcggcactgcagcactgtcagacccaggcctctgttttataacaaatatttgaaatgacctctttattattttgaaatgacattcatagctgtaacataatccacctacatacataattttatagaaatcaatatactgtcctaacttggatataaaaaagaaataaaaggggaagtaatttataatgagttggtacatgtctcaatgtgtgaatgcttatgtgcaactagaagatgaaatgagttaaacactcacacctacttataaagaagatgcttggatttaggagaagtaaaataatattcaactgacccttcttaaacattttttttccaaggcagggtcttgctctgtcgcccaggctggagtgcagtggcacaaacacagctcactgcagcctcaaactcccaggcttaagctatcctctcacctcagcctcccgagtagctgggactacaggtatgcaccaccatgcccagccaatttttgcattttttggtagatatgggtttttgccatattgcccaggctggtcttaaacttctgggatcaagtgatctacctgccttggcctccccaagtgctgggattactggagtgaacctccacaccctgcctcttctcaaacttttttattacacttgacattttgaaatgaggactaagtaaatttgctcacacataaatgctaccaccatatgatgcagatgggcactgtttgtgacattgtttgattctccacagaggcactggccatcatgaagtgattttctgaaatggtgaataacactgtcaataaaaaaaagtcaaactctgcaaaatatttcgagagtttattccaagccaaatgtgaggaccatgacctgtgacacagccccaggaggtcctgagaacatgtgcctaaggtgttcaggctacagcttggttttgtatattgtagggagacacgagacatcagtcagtctatgtggggtatgcattggtttgtccgaaaggtaggacaactcaaagcctggggcttccaggtcataggtggattgaaagactttctgactggcaatttgctgaaagaatcaagtttttatctaaaggcctggaatcaaggggttgtgaagaaaggttcttatgcagatgaagcctccaggtagcaggctttagaaagaatagatggtaaatgtctctttcatgagaactaaaaatgtgccagactcttaattaaatccctcctggatcaggaaaagacctggaaagggaaggggattctctacagaatatagattttcccacaagagacaactgtgcagcgccctctcaaaatatgtcaaagaaatgttctattttggggtaaaatatttaaatttctttcaggtcctgctatctgttgtgttgatatctttttattttattttattttattttattttattttattttattttattttattttattttattttattttattttatttttgagacagtctcactctgttgccaaggctggagtgcagtggcatgatctcggcttactgcaacctctgcctcctgggttcaagtgattctcatgcttcaacctcccaagtacagatgccaccaccccgcccggctaattttttgtatttttagtagagacggggttccaccatatcagccaacctggtcttgaactcctgacctcagatgatctgcccaccttggcctcccaaagtgctgggattacaggcatgagccactgtgccaggcctgttgtgttggtatcttattgctacaaagagtctgttctatcagtctgaagatctctgttttaatgttaacactggtcagttgtgcctgaattccaaagggaggagggtataatgaggcgtgtctgaccccctcacctttcccatcatggcctgaactagtttttcaggtttttttttggaatgtgcttggccaagagaggggtgcatcagtcagttggggagcttagaattttatttttggtttataacactttattaaggtccaaactaaacaaggtagtctttcctagattgacacagtagttgcattcctgaaaaattcagtatatattaaaaccgtgcaaaaactattttgttagcatgtaacacaaagttaggttctgaggkaattttgagcaagtttttgacccttggggactttgggcaggacatcctacagctgtgtggatgctggctgattctgcatggtacgggactgtcatgcacgtgtcaaccaaaaattaaattctaaggccccacaaccatctgaatggactttctttctcttctttttcatttcttttcttttcttttgagatggagtctctctctgtcacccaggctggagtgcaatggcacaagctcagctcactgcaacctctgcctcctgggttcaagcaattcycctgcctgagcctcctgagtagctaggatttcagacacgtgccaccatgcctggctaatttttgtatttttagtagagatggggtttcaccatgttggccaggctcgtctcaaacccctgacctcaggtgatccgcctgcctcagcctcccaaagtgctggggttacaggcgtgagccaccgtgcccggcccatctgaatggacttccttctaggtcagggcactctaaaatttaacctaaaagtctggtttaggccatgatgggaagtggaggctgaaaatgcctcattatacccgtcagcattaacatcaacacagaccttaagtctgatgagaggcatttatattatattctctgtagcctgctacctggaggcttcatctgcatgatcaaactttggactccacaacctcttatcacaacccagacattcttccctattgataactctttttttttttttttgagatggagtcttgctctgtcacccaggctggagtacaatggcacaagctcagctcactgcaacctctgactcctgggttcaagcaattctccttcctcagcctcctgagtagctaggatttcaggcatgcgccaccatgcctggctaatttttgtatttttagtagagatggggtttcgccatgttggccaggccggtctccaacccctgacctcaagtgatccacctgcctcagcctccaaaagtgctgggattgcaggcgtgagccaccatgcctggcctctattgataactctttcaaccaattgccaattagaaaaattttaaatctacctataaattggaagctccctcgcccctccagttgtctcatgcttctggaccagaccaatgtatatcttaaatgtatctgactgatgtctcatgtctcccaaaaatgtataaaaccaagctgcaccctgaccaccttgggcacatgttctcagggtctcctgagggctgtgtcacaggtcgtggtcctcacatttggcttggaataaacctctttaaatattttacagagtttgactcttttttattgacagcgttattcaccatttcggaaaatcacttcatgatggccagtgcctgtgtggagaatcacatatgtggcactcatatttagctcagaataaatctcttcaaatattttacagtttggctcttttcattgacatacattatcatgacatcttgattacaggggtgatacccacccctatcactgtgacaaccaaaaatcatccctgcaaaattacagtttcctaggaggcagctgtccccatcaagagccacggcttttagagtgttacagataaaatgcactgaggcaaaggtcctcgaacagatccaatccctttatctttctgttgatggcagtgttgttcattcaacatactctttcctttttttcttttcttttctttttttttttttttttgtgaacaccatgcttctttctgtttgctgtatggagaatatagtctaccaggggacagagatgataagtattgagaggtgacagcgtgctggcagccctcgctcactctcggtgcctcctcagcctcactgcccactctggccgtgcttgaggagcccttcagcccaccggtgcactgtgggaggccctctctgggctggctgaggccggagcaggatccctctgcttgctgggaggtgtggagggagaggcacaggcaggaaccagggctggggtgctcacgggccagcgcgaattctgggtgggcgtgggcttggcaggccctaactcggagcagccaggggcagtgaggggcttagcacccgggccaggagctgcgaagggggccccgggtcccccagcactgccggccccgccggcgccacactcgaattctcgacgggcctcagccgcctgcctgcagggcagggctcgggacctgcagcccgccatacccgagtccccctgtggtgggctctcacgcggccaagcctccccaacgggcgccgccccctgctccacggcgcccggtcccatcgaccacccaaggactgaagagcacaggcrcatggggtgggactggygggcagctctgcccctagccctgacgcgggatccactaggcaaagccagctgggctcctgagtcaggtggggacttggagaacttttatgtctaggtagaggattgtaaatacaccaatcagcaccctgtgtctagctcaaggtttgtaaatgcactaatcagtgctctgtgtctagctaatctattgtaaatgcaccaatcagcaccctgtcaaaacggaccaatcagctctttgtaaaacagaccaatcagctctgtgtaaaatggaccaataagcaggatgtcggtggggccagataaggaaataaaagcaggctgcggcggccagcagtggcagcccactgcggtcgtctttcacaccgtggaaggtttgttcttttgctctttgcagtaaatcttgctgccgctcgctctttgggtctgcactacatttatgagctgtaacactcactgtgaaggtctgcagcttaattcctgaggccagcaagaccatgaacccacagggaggaatgaacaactccggatgggaagaatgaacaactccagacgcgccaccttaagagctgtaacactcaccgtgaaggtctatagattcactcctgaagccagcgaggccatgagccccccagaaggaagaaactccraacacgtccaaacatcagaaggaacaaaycccagacacaccacctttaagaactgtaacactcaccgtgagggtccacgacttcactcttgaagtcagtgagaccaggaacccaccaatttcggacacagtatgataaataagcaaatagacaagacaagtaagggcttgtgatcattgctttgatggaaataagatggtttttgaaagagtaacayggcaggggatttatttcaaatagtgtgtgcaggagaagtctcgctgkggaaacactgatgtgagatctcgccrcagtaagagcagagagaagagggttcacatgaaggaagcagcacttgcgaaggtcctgaggctggaaagagtttggaatgcgtaccatgtgtgtattccaggatggctggtacttccaccctaggaccttggtgctggctgctcctttccctcaaacgttgggcctctccacatcctttccttacttctgttagacacctgctctaatctcattacatcagagacacccttcctgactcctctctataaacagcagccaccacccgagccatggcacccccatctcctttttcccactttactttcttccattgcatttacctctrcctgtcagtacctatttcctcttccttttgttgtctatcacctcttccgtccaccagaatgtaagctccatgagggcaggcttggtccattttgctcacagctgtatctccagctcctaaaacaatgcctgaggcttggtgtgctggctcatgtttgtaatcccagcactttgagaggccaaggccagtggatcacttgaggtcaggagttcaagaccgtcctgggccaacatggtgaaaccccatctctactaaaaatacaaaaattagctgggcgtgctggcacacatttctaatccaagctactcaggaggctgaggtgggaggatcacttgaacccgggaggcggaggttgcagtgagctgagatagcaccgctgcactccagcctgggtgacagtgtgagaccctgtctcaaataaataataaataaaacagtgcctgacacataatgggtgctcagcaaatttttttaatgagttattgaggagaaaaactattcaagataatgttgacaagacagccaagagctgaatcatgtaagtactcacaggattttattccaagtacagcaggaaggaagggaagggccctgtacaaagaggaatgatataaaccagattatgtttttgaaagaacatgctggctgctggctggaaaatgaaagcaagaccagaaataagagagccagtgaggagtctccagtctggcccaygcaaagagatggcggcggcttacagtagggcagtggataggcttgggaggtggcaccaacaggacttgctgagggattggatattggggggatgtttaaaagaatgatgtttaaaagactctgctgtgttgtcaccctgagactctggatggatatggtgaagccatttactgagatgggggagaaattcagagtggtgataaacattctcaccaagtttttcctaacgattattagatgcctgagtttgaaactttgagtcaatccaggcatccatgcctacttctgatttgctgtagcttgtgtgccacagcctcccagtttctgtgraaaccccaccatacatcagccccagcacaaagcacaacctcgtcagagctagcccacctccagcacyktgactgctccaggcttaatctctcctggtgttgacacttttgccagtgatggtgtctcatgggattcatgctctttataaaccattgccttcttcctatttctttcatttatttttcctctcattctcctgccctctgagctatataactcttcctttaccttccaacagaggcctttcattacatttaaagcaaatggaatgcatagtaggcaccaaagatggaggtgctrtgcaaataatagacaccaagctctctgcaggtggggtccttgtgtgttttctcttcatagcacccagcacaatacttggaacataagccagacacgttcattgagcaccatttctgctgcacccatgaaaaaaacactcaacccagacagatggtyagctccccgacaggacttaagcaagtgggccagtctctgtttattgtcgtacactcacacaatcacacagctgccaggcgagcactaggcacttatcacacttttattaaaccgatcacatctggctctttgtggggtgccagaaagtgcccaatttctgcatgatgggatggactgtgtgtggagtaaggtcggataaatggagatgggccagtagcctagacaaattaagggagaaaaacagtgaatttattttccactcatcagccgagctttctgtgggctaggaacggggtacccggctgaagtgaagcaacattgtgtctcttcctgctgttttctccacctcccctcagcaaatcatgaatgaataaacaaacgaatgaatgaasaaacatagagttattataaggattaagtgaaggcagggtgcagtggctcatgcctgtaatcccagcatgttgggaggccaaggtaggaggatcgcttgagctcaggagttgaagaccagcrtgggcaacaaagcgagacccccatctctatatttttattttaatttagaataataaataaaatttttttaaaagaaaagattaagtgaaatgttttttaagtacctagaatagtgcctagtatacagaaaattcaacgtaagtgtttgatagagagcaagaataggccaggtgtggtgactcacatctgtaatcccaacactttgggaggttgaggcaggcaggtcacttgagcccacaagttggagaccagcctgggcaacatggtgaaaccccatttctactaaaaatacaaaaattagccgggtacagtggcacgtgcctgtagttccagctaatcaggaggctgagatggaaggatggcttgaacccgggaggcggaggtggcagtgagctgtgatcatgccactgcactccagcctgggcaacagagcaagaccctgtctcaaaaaaaacagaaatagagtaagaatagttttgtctgtatctgccaacagccacgtctgtggagtcagaggaatgaaggggtcaaagggagcaggcacatcatagagaatacccccaagatctgaagaccccagtgcaatacctcgagcttaaatgcctgtgttttcattctcccttcttctccataggatcatgggagaccacctggaccttctcctaggagtggtgctcatggccggtcctgtgtttggaattccttcctgctcctttgatggccgaatagccttttatcgtttctgcaacctcacccaggtcccccaggtcctcaacaccactgagaggctcctgctgagcttcaactatatcaggacagtyactgcttcatccttcccctttctggaacagctgcagctgctggagctcgggagccagtatayccccttgactattgacaaggaggccttcagaaacctgcccaaccttagaatcttggacctgggaagtagtaagatatacttcttgcatscagatgcttttcagggactgttccatctgtttgaacttagactgtatttctgtggtctytctgatgctgtattgaaagatggttatttcagaaatttaaaggctttaactcgcttggatctatccaaaaatcagattcgtagcctttaccttcatccttcatttgggaagttgaattccttaaagtccatagatttttcctccaacmaaatattccttgtatgtgaacatgagctcgagcccctacaagggaaaacgctctcctttyttagcctcgcagctaatagcttgtatagcagagtctcagtggactggggaaaatgtatgaacccattcagaaacatggtgctggagatactagatgtttctggaaatggctggacagtggacatcacaggaaactttagcaatgccatcagcaaaagccaggccttctctttgattcttgcccaccacatcatgggtgccgggtttggcttccataacatcaaagatcctgaccagaacacatttgctggcctggccagaagttcagtgagacacctggatctttcacatgggtttgtcttctccctgaactcacgagtctttgagacactcaaggatttgaaggttctgaaccttgcctacaacaagataaataagattgcagatgaagcattttacggacttgacaacctccaagttctcaatttgtcatataaccttctgggggaactttacagttcgaatttctatggactacctaaggtagcctacattgatttgcaaaagaatcacattgcaataattcaagaccaaacattcaaattcctggaaaaattacagaccttggatctcygagacaatgctcttacaaccattcattttattccaagcatacccgatatcttcttgagtggcaataaactagtgactttgccaaagatcaaccttacagcgaacctcatccacttatcagaaaacaggctagaaaatctagatattctctactttctyctacgggtacctcatctccagattctcattttaaatcaaaatcgcttctcctcctgtagtggagatcaaaccccttcagagaatcccagcttagaacagcttttccttggagaaaatatgttgcaacttgcctgggaaactgagctctgttgggatgtttttgagggactttctcatcttcaagttctgtatttgaatcataactatcttaattcccttccaccaggagtatttagccatctgactgcattaaggggactaagcctcaactccaacaggctgacagttctttctcacaatgatttacctgctaatttagagatcctggacatatccaggaaccagctcctagctcctaatcctgatgtatttgtatcacttagtgtcttggatataactcataacaagttcatttgtgaatgtgaacttagcacttttatcarttggcttaatcacaccaatgtcactatagctgggcctcctgcagacatatattgtgtgtaccctgactcgytctctggggtttccctcttctctctttccacggaaggttgtgatgaagaggaagtcttaaagtccctaaagttctcccttttcattgtatgcactgtcactctgactctgttcctcatgaccatcctcacagtcacaaagttccggggcttctgttttatctgttataagacagcccagagactggtgttcaaggaccatccccagggcacagaacctgatatgtacaaatatgatgcctatttgtgcttcagcagcaaagacttcacatgggtgcagaatgctttgctcaaacacctggacactcaatacagtgaccaaaacagattcaacctgtgctttgaagaaagagactttgtcccaggagaaaaccgcattgccaatatccaggatgccatctggaacagtagaaagatcgtttgtcttgtgagcagacacttccttagagatggctggtgccttgaagccttcagttatgcccagggcaggtgcttatctgaccttaacagtgctctcatcatggtggtggttgggtccttgtcccagtaccagttgatgaaacatcaatccatcagaggctttgtacagaaacagcagtatttgaggtggcctgaggatctccaggatgttggctggtttcttcataaactctctcaacagatactaaagaaagaaaargaaaagaagaaagacaataacattccgttgcaaactgtagcaaccatctcctaatcaaaggagcaatttccaacttatctcaagccacaaataactcttcactttgtatttgcaccaagttatcattttggggtcctctctggaggttttttttttctttttgctactatgaaaacaacataaatctctcaattttcgtatcaacaccatgttctgtctcactaacctccaaatggaaaataatagatctagaaaattgcaactgcccttagaggtttccagtctccattgattttctttcagatccaataataccgttctgtcctgctgtgttgattatggaatgtatcctaatcatgggaagggcaccttgggagaagttgcagatggctgacgtgctttctctagcattcagctaaaaaatgggatggtccatgattctgygttctctgtgttctgcaaaacaacattaagtagaaaacaaacagaagcagaggcacatttccttcttttgccacagaaacaatgccactgttgagtgcaagtcacactttgtctcatagataagaggtggccccaaagaagctgggatgaatgagtcactacctgtcttgtgactgtactgcacttcatgttcttaccttcggcttctccaggtctcgccctagtgagccaagaactttctctcacatgctgcctttatttaagcctggccttcaagaccttccatgatttatcaccaacctaccttttcagctttgtttcctagcacacctcattgatcagctgctcaggctgttgcatgaagaacatggactttgcacacagatcctgggttgagttctgagtcagctgtgtattagccatgtaaccttggccttggtatgcccttgctggacctacattttctcacgtaacagcatctatgtcatagaattcctgtgaaaattaaattggccaaggatgtcagggcttctcagatcttttctttcgttgccctaatgaccacaagagaacacatacactgaaggcctcctggggggcagttgcaatttcactgaagttgtatttttttatcttaaatgaaatctatgtgtattttccattctgttctttttttcatgtttattaatatagaaatgtgtttttgcaaaaggattaagaatacttaaaacaaggaaactgtgccaaaattaccccatagcttcacacactgcctcctccaagtccagcgtaactccaggtcagctcctgcagtttgaggggtacacatgggtctgggactcagctctccaaactgtcaccttcttcccctcactgggcccctcaatcctgactcctccaacacacacacgcgcgcacacacacacacacacacacacatacacgctattctcatcccaacttcttttggccacttctaatcaatgagaccgagctttccctgcacccagcgatggcattattttcacgcacaccatgcagtccccactgtacctctttcctctggattcttctcccatctctgcacatccatcctacgttttcttcgttttcttcaaaatccagcccatgaagctccctgggatccctaacccaaagtcctctctcccttttgtgaaaactcttgacactttatctggtcttttaaaagtagcacttactactacttcctctatccttttttctgagcctgcccggctgcccgcctctctggaagataagttccctgaggaaagaccttgtcttctgtgtcctgccctcactggctgtagcagatcacttatggtttggggaccattcaagggtttcccacttacacatctgcccatgcttcttcctccccatggaatttcttctccccatcctaccactcgtctgcctgatgaatttccttgtttagcaagactgcccatccctcatgaccccagtgacagattttctgtcactgatacatgacattgtgttgcgccagtgtgtttatgtatgtgtatggacggcttagtttgtgagacactgcagtcaggatcttgtcttgttcatctgtgtatcgcaggcccagtttgtgcctggcccacagtatgtgcttagtaaatgtcttgtggatgagtgaagtatactgggaagcccagcctccctcatrkcaacacctgctgttattagactttccactggaggggcagggaggatgagggcctgagagagcaagatatccatggaggtgctgagtggtaagctgaaaagggcaggagaccacaggctgtcagacacccctgaacactatttcaaatggccaggcatggcacaggcctcctgggtagtgggacagtggcagcctggattagcagctaggaacggggctagaatggagagctgagggggtggggaggaaaacagaacccacatgaatttgcagtgaataaggtctcctggaaccctgtgctaagaaatacagtaaaacagggccaggcactggtggctcatgcctgtaatcccagcactttgggaggctaaggtgggccaatcacttgaggtcaggagtttgagaccagcctgcccaacatggtgaaaccccgtttctactaaaaatacaaaaattagctgggtgtggtggtgcacacctgtaatcccagctactagggaggctgaggcaggagaattcctcgaacccaagaggcggagattgcagtgagccaagatggcactactgcactcctgggtgacagagcgagatcctaactcaaaaaaaaaaaaaaaagaaggaaggagacaaaacaaaagtatactgtgtcagtaacaggtataaccgcaaatcaggaagactgtggaaagaccactctgctcggtttcatgccctcctgtcccacctgctgctcagccatggttttcccccagctctagggggtgggaggggcacccaggacactgaagaaatctcctggtcagaacaccttgtatgaacaggactcctagggaaaggggtttcctagtccggctaggggttggaggtagtgctacaccagggacctcccttggtttgggtgaccatcgctatgactctgttttccaaaccaaacctgggacatgtaaaatgacaagtgcaggtgtctttacaggaagaacaagctgaaacacagataactctcaacataggaaaggagtctatcccacagccttttctaatcttcttatttaaaaacacgaattacaggtaattttcctaatgaaacacatttaaaaggcatcttttgtggtctctgtatagagtgtatgggggacctgttcatgtctacatcctagccactgttagtttcaacataccactctatttcaaaacttcccttttctggcaaagatccaaaacttactaaaattcttttgtcttctttcccatggtcaggcccagcagttggaattctttttgaggccattttcccaagtctttatcacktcacaagacttgctgtgtacatggcaaaaggaaggcccaacrgagccacattgggaagtgggccctggggagtctgctgagacactggttgctaagtgactgccctgtcttccatggcgcagtgattcaaagccaggcctcaggaaatagataaattccacatagcacagacctctggggtcactccaaaatggtgagaaactaccacagttcaatctcagaatggctagagctttctgtagttgaaactgcaactattctggaaagatctagaatattgactagagctgctgaaaacttcaaagagaatcccactcatgccaaatacaactgactctgaaaatcccttgccaaccacgtgcacttgcagtgaagaatgttttagagagtcttgatattatgtaaagcaaatgcggtttgaagttttaaatcatgaaagaaccacgttaagaggacaagagactgtggagtaaaagtttaagatagttaaatgctcatgtaccacaatgtaaaattgattacaaaaaagtctacaatattaaatcaagaaatagtgttccaaatatatatatttagaagtatgaaaatgccagaagaaagaaccatacaaattaatgatgattgcctgaggaagttctgcccagttcttccattgggagcatctagaaaagctggagaaactatttttttagaatctatttaaagacacgggaaagttgcaaggtagtaaatagggccaagaggcaagagaagaaggaaatcgagaaagctgactacaatgcaattaagaccatctattaccaaaaaaagactatcagtgaatgaaaagggaaactttagcatggagggagatatttgtaatacacgtatccaaaaaggactcacaggcaaaatctaaaagaacttctacaaatcaataagaaaaagactacagaaaagaaaaatggacatgacacttaagaatttcacaaaaggctatccaatgtccaataaggaaacgaaaagatactcaacctcctttagtgatcagagacacgcaaattgatacaacattgcaatcccactacccacccaccagaatggctaaaattaagatgactgacagtaccaagtattggcaaggctggggagcaattgaaactttcctgcgtgattggtgagaatgtaaattggcatactataaagcagggttccccaacccccaggccatggacccatactggtctgttaggaagcgggtcacatagcaggaggtgagcggcaggctagcaagctaaacttcatctgtgtttgcagccactcctcatcgcttgcattactgcctgagctccacctcctatcagatcagctgcggcattagattctcataggagcttgaacttcgtgtacgagggatctaggttgtttgacccttatgagaatctaatgcctgatgatccatcattgtcttccatcacccccagatgggaccatctagttgcaggaaaacaagctcagggatcccactgattctacattgtggtgagctgtataattatttcattatatattacaatgtaataataatagaaataaagtgcacaataaatgtaatgggctcgaatcattctgaaatcaccccacccctatcccccgccagtcggtggaaaaattgtcttccatgaaactggtccctggtgccaaaaagttgaagactgctacttttattttttattttgttttattttttagatgaagtctaactctgttgcccaggctggagtgcagcagcacaatctcagctcactgtaacctccacctcccaggtttaagcaattctcctgcctcagcctcccaactagctgggattacaggtgcgtgccaccacactcagctaatttttttgtctttttagtagagatggggtttcagcatgttggccagactggtcttgaactcctgacctcaagcaatctgcctgcctgggctcccaaagtgctgggattacaggcgtgagccactgtgcccagccagagactgctaccttaaagaacagttagtcgtctactaaagttgaaccacacatgccctgtgatgctgaaattctactcataagtatatacacactagaaatccatgcacttatgcgtgaaaacacacatagaaaaacgttggtagcagcattatttgtagtagccaacattggaaacgacccacatgtccatcaaccacaaaatggatcaataaattgtggtaattgaaagccctacagaaatgacaattagccaattatagctacaggtaacaacataagtgaatcttgaaaaaaatgttaagtcaaagaagcaaggcataatgatgaaataccaagtggttgcaatttgagaaattttaacaaggcagaactcatctgtggtgataatgaggacagtagccacctctggggaggagtgagtagcgctggagggggcttccaggatgctgtgtatgttttatggcctgacctgggtgacagcaacacttttgataatacatcttatcggcactgatgaatttgttcacttttctgtgagatactagttttccatttaaaaaacaattttttgagatggagtctcactctgtcacccaggctggagtgcagtggcgtgatcttggctcactgcaacctctgcctcccgggttggagaaattctcctgcctcagcctcccaagtagctaggattacaggtgcatgcaaccaggctcagataatttttgtatttttagtacagacagggtttcaccatgttggccaagctggtcttgaactcctgacctcaggtgatccacccacct

SEQ ID NO: 5674 - DNA, 77922 bp, Homo sapiens
  misc_feature (1)...(77922): n = A,T,C or G, or insertion/deletion polymorphism (see Tables 1-2)
aatgggttcaggagcaaattagagtctgtggtttgtgtaacattagagttaaaggaacaggtcttttccttgaattattttttgttatatagcattcacttcagttactaatgaagtgtattaatgaagccataatgcaaatgaaaccataggctggggcagcaagctttagtattttgctgtgcaaaatgtggcacaacttcatatcacctgggaatctgttgaaaatgccaactgttgatgctgtccccagacttagaatctgctttctaaagagttgcccaggagattcatgtgcacattaaattataagaagcacagtttagcatctgtgaaagtttccttccagatgttctaggcagattagatgtcaagcacaccttggtaggccctatcatgatataaaattggctctttttactaattttcacttgcctttccatgatcctaagttttgtgactccttggagtttttatttctcattttatccaattcctaatatgaacttacatttagttaagtacatcttgcaagtcctgacctgacatgctcttgacccatcttaatctccctgtcaacttttcatattaacaatgtcacttctctcttacttgctacccatacttcctcttattcatctcttttctgtaagatggtttagaaagagtcattcagttcttcctcagtattccatgtggtcttgcttcagcctcattatagggttgtctggtgttctgaaattgagttaagtcatgtccagatcttctgtctcatgcttgcttgtcaggctcagaaatgcacagaggttattgcaaactaaatcatgactttcccaaggctttctcttgcttacttctttttgaagttttgattgtttcctttataactaggtttggtagattgaggattctttgagttctttttaaatatgagctcaataccaggttcttggcaatcattgcctattcttgctttcagaaggctttccaaattgtgtgtcgtgattctttgcctctccttctattacctgtggagaaccattagagatcaggaagtgactaagagagccaatctttcttcctacctggtcagaagctcttcttatatcataaacagaaggcttttgctacctgttttttgttttttaggctccaagatagcaattatatcaccatcaggagcttctctgtgactactcttctgcattgattgtaacaagtgatcctgaggtaatgaaggggaaggcactgttgacctctcagctattattaaccaagcactctttaacttctgagatactttaggtagagaattgttaacatgtggatcaccagtcccatcagagtccctggcacagaataagtactgaaaaggaaggagaagtaagagtgggaaggaaggatggaaataatctatccaactccaggtgagatggagagcctggaaattaactacaaccaaatagatttggaaagacaagttgggagaaaagaatggaagtactatctcatctttgtcttccttgatatatagtaaggaatacacaaaccatcctattaaaagtgacttactgaatttccttttagaaataaagacagtggactttgtcttaagaggtactccaattatttcttagttttctaagaaaaaggagttctctttcatttctgactttgtagactcctgctttgttacccatctcccaccaattccaagactacacatctactgagtgaagtttttgtgcctcctaatactgatgagcctcgtattaatttttgaacctatcttcataaagatgtgggcaaagaacaagctttataactgtggcataggtagaaaactgtgaatattaaacagctcatctataaggagtgcaatacccatattttgaaagcaaaaatccttccttctaggttgtattaatacattttgctttaagtttggtcatgttgttaggtagtgatccttaaggaataagatttgttcactattcagtctgaaatgttcttgccattactaaatataaatggggtcaaatgagccagagaagtgtgatattcatatcacagctgattggggttgtatgaaaaaataagataaccccaggaataagtgctactgagatgaaaattgtgacacatacagtgcttggcatctatcttaacaaatgaaattatggcaatctttacttacattagacactggatttctgcagatggaaaaaaattatgtaagtgagtggatggagataaaaggttggagagttgatagtgcaccaagagaagagaattgtctatcagatcactgagaaatccaaagtgggaataggtatatatagatatatggcaaacaccatatcttcaccactctccctagctccctatatcaacccttattatttagcaactcttgtccatcattttggtccctgagttggaggttttagtaatggttccaagaaataagagcactggttaaacatatttcttgggaaatatcttcagtacaatcatgtgtctaaatgatttcaaactaatcagtcattcatgttctgaatcctcaggcacctacaccaacaattcagggtatcccactgtaagatataattttcagaataaagatccagcagaggagtagctgatagtttctatacagaccacaaactgttgacaaaagagtcagaaaaatatatcacattgatggcaatggggaataatatgttcatatacagtggtcatctccttatgtcttttcaagattgcagatctgtgctagtcattgaatttgtcagtaggcaaggaaagttattaacagcattatggattccattctcaaaaaaccagttttgtccacaaagcctgtaccccaagacctctgagaatggtatgtaccagctgtcccagtcttagggcagcatctgctggctaattcatggatggacaaaaagtggcagtttgtgggcaatttgagcagtcctttcatttggcgagaactgttgtgttgatgactgtgagggtttctgaaatcctttcataaggacccatctcaggtctccaggagcctggcaaatctagaactactcctaatgagaaccaggaagcttttgtatacagatattttatctggagcctaagataagcctgtttgactttggaaacatttctagagaagcatgaactcaacactagacttactgctaataataataacccagtaccaatgggggctgcaatgaacagaggtccatgcacataattgggaagtaaaacttattttccataaggaaggcatttctgggatgggagagggaggaccttgaagcagccactgaatgcttatgttctgttgcttctaatcatcctatcgtgtaagtaagatttttctacataagcaagcaagaatgatattcaaacaaagcacttttgactggaataaagaaactggaaattggaaagggctgggtggtctgaaacttaagagctatccaccatcttctgcagcatcgctgtgcctcatccctgcagtcaatagcgccacggccagggcctgtgacgccgttggtgggctccccttggtgggaactcagagcgagtaaaatcatggtgtcagtgccaaaacgacgaaacctgaaatgcgtctggggacttcccagggcactagcgctcctcagagcgacggacatctccataacaactggtctacattcatccctggttcttctgctctgctgtgctagcgatggctgagggtaggcaaagggcagcttcagtggaaagataccttgcgttagcgcctccctaggctgggggacgttgccaaagctcgagttattgcctatttcccgagatttccggagtcgtccccacatctcccgcggagagcggcgcccctccgccccccctcccgcctccccctctattagacactccaagggggtagtttgtttcattgtgctttttttcctcttctcaaagttcatcctttcgcctccaagttactttccgccaacacgtgacctcttcgcttcccagcttgcgcagccactggtggggaagcgcgggcgctaaccgcagggcttcctgggagagccccctccgaggttcgccaccccagccctggctcccgccgcgctcaccccggcaccccggcggcggggcagcccccgcaggatgaggaagcggctccggggaagcagcaccgagcagcagcggagcgcccaacctgccgcctcccctcccgtccctgccttggcccgcggctccgctctccgcggctcgccttccgacttagctgcgcaccggggctgttaactcacatttgggaagccataacccattagagcaaacgcagtcataacttcattcaactcagccgctcgagagctcggcttacacaggttcctgtgggcaactagtggctcgccttggtgcctctcgcctagtcatcagtacctaagaggaaaagggaaagttgttgggctggttcgcgcttcgacgcatgcagatgttcccaaggacaagtcacttactcgcccccctccccccagtccccatttgatcatcactcacgacctcatcggctggagacccttagtcatgatgggggagggggaggggcacgaacttttctaagaagtttcctttttttacccagagagtcacagtgagtcggtcacgtaaacagcgaggttagtcgtcgccgttgccgccccccaccccctccctgctgcgcttttctggtattattattaaagcggtagtctgccggcgctgataagcaacaagttccccagcggtcttcccgccctagcctgacaaggcgaaggttttcttacctggcgacagggaaatctcccgagccgaattcagcttcgccggagccccaggtgtgacctgcgtagtgggcaagggagcggtgtgcaggctgagtttttttttttacaggggtaccctgaaactcctcactttctctgggaactttcagtgccaggacccagtaacgggcggttagaaggcagccctaggaaacacctgctacatagcagggcagttgggcaatcattggtaacctcgctcattcattagaatcacgtaagaactcaaaaggaaacgtgtctctcggagtgagggcgtttgcgtaaatctataggtttttcgacatcgatgccagttgctttgtcttctgtagtcgccaaggtggttgagagtttaagcttgcggatattgcaaagggttattagattcataagtcacaccaagtggtgggcgatccactgagcaaagccgaacttctcacatgatgacttcaaacaagacacattaccttccagcatctgttggggagacgagattttaagacacttgagtctccaggacagcaaaggcacaatggtgagtagcaataaaacctgcattataattgaaaaatcttgacatgttgcttaacaacgggcatatcacggctcttcctagcacttcacacgccaaagaacagcagctactcaggccaggggaatcgggtttttacacagtgcaactttaattggaatcatttgagatttgacacagctatgtggaactgcgtggaacaaacttggagctgggtgggggggtgtgtgttatattggttgttcaaggctgatgcttgtctctcagcagtcttgcattctattcttttccttaatgtgtatggtgtatgatcatattctatgatttatatgtgggcatgtaattgacatttgcaagggggttaatttccatctaaaaacaataatgctgttagaggttggggttagggggtggagtgggggtaagggtggggtaaacactgggagtttaggtgtagatggggggtggggttggggggagagaaataagtcagaagtgcatatcaccggtaatgggtaatcctctcgtagaagaaaaggttctcatcaacatgtgatcaactattaacaggatggctttggcaaagccatccgcacgtgacaaaccgtaaggaagtggaagaaaccgtctagagcaatatcaagtatcacttaattagagatttttaagccttttcctcctgctgtgccgggtgtgtaatccgggcgataggagtccattcagcaccttggacagagccaacggatttgtccgaggtggcggtacccccaggtagtcttcttggccccgctgtaaagccaaccctgtgtcgcccttaaaaagcgtcttttctgaggttcggctcacactgagatcggggctggagagagagtcagattttggagcggagcgtttggaaagcgagccccagtttggtcccctcattgagctcgctgaagttggcttcctagcggtgtaggctggaatagactcttggcaagctccgggttggtatactgggttaactttgggaaatgcaagtgtttatctccaggatctagccaccggggtggtgtaagccgcaaagaaggtaagcaccagggcggggaccccttgcatccccaattcttgagctattttgatactgtcttccggagaggacgcgtggtggaggggaggaggtagagggagagcatgagagggggttgtttcttggtatttgcccagtttgaattgccctaggtgagaaccctggggcaaagggagaaagaaaaaaaagaaactcagtcttcctgcggatataatgagtttagttaacttggacctgcaaatgtctgattcaaatgtaagatttatctctctttttctcctcttcacctccctcttttccgttctctttgctggtgtgtgtgtgtgtgtgtacagtagattcattactaattatgaagcttttgcaaaacattcgaattcctaaaatttgactttgtagcatttagaatcaggcggtggaggtggtgtgcggtggggagaggaggtggaggttgggaagagggaaggaggtaaagctaaacctccaacacaaaaaaatgaatcaaggtaatttcagctcttctagtgagaaggattcattctctctgtatccctccctccctctcttttcccctccctccctccttcccgccccccttcttccaccccgccccctcctccagcctccatccctccctcattctatctcttcctctccgtcgccctcgctcctcgctggatgcttctttctgggttttcttttttttttcccttctgtcctccctccccgcgagtttcgggcgctggcttagagggttcccgctttctcaagggaaggggagctgccgagaccgcgctccgytccccagccgggccggatgcctcactgagcccaggtccgagtcagtcggggtaactcagggaaaggggagcctccgcctgggagtagaaggtcctttccggaccgaagagccagagagcgggccgggcgagggggcctgggcggctggaggcggtggagaagaacacttttagctccgtgcggcggctggacagagccaccaatcagctggacgcgcagaccgccctgccagggcgaggttgcgtccggaggcgccggtggagggcggccggctagtcgctgagccgccgccgccacccgggtgggcaggggactggcggtgggtggaggtgaggggcttggcgggtgagatagaagcggcgcggagccgcccagacctgtgttctacctctcccgcccccgcctgcacccccgggggacagcgaactgccggaacgcgcggctgcgttatcctcttgccactcttcagggagctcagggacttaggcgcccctgggcgggggccaccaggctctccacactcctataaccctcacccccacccccttctcaggccttttgttccggccacagagccaagcccggtggcagttttcgccccagggtttggtcgttctggactcctcccccgatcagctcttcttaattaaaaggcaagagcttggggtaggggtgaggggaacgtaggaaaaatctgtttccgaaactcaagaccactgttttaacgaacgaaagaaagaatcccaactctgcgcaggtggattcataggcgaagcgaggatattgtggaaattcagaaggaaaagataaaaaacaggcgctaggatcagatgacggtgataggctgctcggcacacaaagggagcgtagggcagggtttacggagcaagcctgcagcgaatggggcacagattgttccgagatccagtcgttttctcagtcagatctacgcgaagggaggggaggggaggggcgggcaggggagcgtggcgggaggggctgagcttgggggcggggggatttctgatcagtctgatgcaattccaagcgtgctgcaaaggaactccaaggcgcccgcatcaccatcgccacccacccttcccagatggtgctgttttaaatacggatctgcagggctgaacrcagaactgggagatttattgcaaaatcccgggaggggcgggggggggtggtgtgcggaacggggaatggaggagcagaatttaaaggtgcaacgcttgctttttccaatcaggcggcaaccggccggaattattatttttttctttctgtctgcttgtctctggattctaattcaccaagaaagaggtgtaaatattgtgacattttgaggcagcttgatggatgggaaagaaatcatctgtcactctaaattgcagagttccctctccccgcgccatcccttgctagcgaatactcgctgctgcctaatacagttgctagggcttcaaatgaatgcatcgttaagggaatattatccttttagttgacttgccaatttagttgacagttgaatcgagaaaattgtagatttcgtgtctctgggaggaaaaatgcttaacagtctaagtcttgtaaccttgaggtctttaacaacttaaataaacctcaaaagtgtcacgtcatcctctacacacacacacacacacacacacacacacactcaacttgtaagatgacatggtttcacctaaactgttgtggaaatgaatagcactttaaaaatggtgcacctgatattcactgtttatgtgtatttacaaagagctcttcagcatgaaggcaagacatttcaattgtcctgtttggaatcagtcagaagactagaaggtgatggagagaagaagggaagaaagaggaaagagagagaattttaacctagatgctattaaattaacagtaacctagcctacttttataccccttggtcttgcatattaatatttctgtatgtgagattttagcttggtctagctcccccaatggagtataccagtattgattcagatgagaatatgagcatcctgccagtagctttttcagtgtcattgatagtaagacctacaacacagcaatttttggaggatagaagagaatatatataagggctttgcaaactgggaagcaggcactccataaatgggaggtatcattatgacattctctttgcacatatcattttcatttcactgaaccagagtactagttattttaaaacataatctaatgtatatgctcaaggtagtaagtggggattttaaaagcaagtgattagttggcttataaaatattatttttcaattgtctattaatgtacattggaaagaaggcttttaaagatctaaaatcaacataaataagcttcccctttcatttgccagactctttccctatcagatttctgatctaaattcttaataagaagagaagctggtgaatttagtttctttccttttcctggcctgtcctctaggggaagctttagtaagaaacaacattccaaaatcaggcagtgagcgagagagaaggcaagggactggatgaccacaaaatagataatcagccaagaaacagaaatgagggaaaaccagcattaaagcatgacttacaaagggtttttattttgtaattctgtaattttgggaccaggctcaaacttgctcaagtaacattcactcgatcatattgcttacaatctgtcagttaaaatgatgtctaactgagcatattttttattaaatatacttctctcaaaggccagtaaagctactctttggttttaattagacaaactagtctaaccacttaaataactctaatgaatatgaactgatatcatcagatttaaaagctctgctgaaaactaaatttattctgaaaagcactgacttgccagaaaaatatctatttttgcagctttcttttcactctatggataatttaatgagttgcttattttaattttacaactgctacctcagaagtatctcaaattatctttctttggctggtgtctttctctgctgatctgctactgckgtgtgtgtgtgtgtgtgtgtgtgtgtgtgtgtgtctgtgtgtgtgtgtgtatgggcgtgtgtgtctctgtgtgtgttttctagtgggaatttaacaagcagtgagtctcttaaatttacatgccataatctatgtcaagaacattgcgtactacttagcaataaaaataaacattagcatctagtgaaagcttaccatcattgagtgctatggaaatagaggtcttaaagaaagattaaatttttcaacaaaaaaatttttcccctttttggcttaaaggtgattataatttcaaaaatatgacatctttcctcttttactttggaatgtagagctgctgctttaacaagtgtcttttgagaaagatacacgtgtttcataaagattaatacccttaaaacactatggtgcagagagggaaggatgaattctttaaccctgcctctaatctcatttggcaatttttggagtattcattctgactttttaaaaattcaggtggattttttttctgctttctttccaacattataaaacaatcctataagagatttttctgctatagtgcagactttatttgtatttcctagtaataacactttagattcatatagtactttgacagctctctataggtttcatttgatttccttatcagtcatgtaaggtaggaatcaccaatcaccttttacagatgaggaaagtaaggtgcagaattatctaacactacactgccagtaagatgtaaagactaactcagagtctttcttcaaattttaaggaaatttgtgtttgttcctctctagaccatgctgccttaaactccactagggcatcagagggagctgtaggcattattttctcctattttgatttatttaattaaattaaaaacattttttacaaatagttttyaaaatttcaggcctaatggaaagttttaactagtcttcctaagacagtatttccctctcccacagttagacactcaaagaaagcaggactcttcctctagttgacataccatctaagtcatagttgctaattccccaaaaaacaaatacaaagaataagaagaaccaaagccaagatgtacattacctttacttgtgaatcatagaatctgggttctgggaaggttctcagaggtcacttagcccagctcatatctgatacatgaattcatgctggcttgttttgtttcaatcctctggaatttcatcccagtcttggacactgggtacttgtttatcttggtagatgttctgatacttatgtggatcatgagcttggctgatcatttcccattttgcccaaaaggtatactttctatagagactctagcattcataattttattttgtaagtattaattggcaacacataatttgccattatgtgccaggaactgtattacaatctggagattcaagaacaagcaagaccaaatggtccctatcttggtggatcttgtggcctagagacaaagactggtctctttatttgctccaatccttagaaggggacagacctctggactcataagattccttttttcaagagaacacagtgaataagattaaaagcctgagtttaggctttacttccaaccgcttgtcagtacccaaaaaagtcaatcagtcactcttgatctctgcttcctcacacataaaacaaaagagatgttctcagaataaactctaaattccacttccgttccaagtttgagtgatataaaagatatagtctataactatttcttgcagtgtaggggaaattaaggcctaagttaccctaacctttggtgatttacaattctgggtgggtaccgcaaatttttaacttgttaagaagtatatcatgaaaaaaatcaaagtaacatatttgaacccagaatagaaggaatctaggtgttgaacctgttcatttatggaatgatggctaggaaagttttaatttagagaatgatctcaaatttctgcggattatttttaaaagcaggtggtgcgatggaagacctgctatcaaatttactgcttattttctttgtgcaagcagaagttataatttttcaggtcatttccttttaaaatcaaaaatattacatcctgaaattgcctgggtctcatgaataatgcattatatacacatgataatagataattagatggacaagccaaaagaaacatgaaaggaagcaggtagcccaaggattgcagaaggtgtgtgggcattttgacatccaggaaatgctatagatctgtccttaactaactcagcctggtggagataattaagaaaaaaaatgtgggtgtagaaagactgcaagccattccctgggattggctagattgctgcagtagttcaaaaacaattggcacagccacccacactagacatgattgccctttgatgaggcagctattgacttttataaagatgtcatatttaaaataacttctgatgcactaggcataacagacatcattcttgaattctattttagacaaatggcaaaatgtattacaaagtattaatttaaaaataaaaaatctttaaagtctagtgtctaaaaaccagcagtttagtaacatgcaacctctggatttaagaattcagcctgaagctgggagaaagctgtagcttgtataggacattttgatccactctgggcatttcccagaccactacaggaagtaaaatgtactttgtcaaagtttttaacctttgagtgaatgttaaatccactccaaaatcttcgcaacctgggaaaggtgatccaacaattttcctaaatagcggcagaaaatgctctgagatctttgttcccagagtgaatgttataatgttatgctatctagaaatttccttgtagcaccatgctcatcagtaccaaaaggagttagaattgattcctcccgcttcaaggaaatatatcaaccacctcctgtctctaagtaacaaggttactgtggggaaaaaatacacaaattaggtgattgcagaaaggtgtcacaaacatccaaagcctttgggatagggcattgcagtgtgagtgaatagagaaaagaaagagaatgtgggaaaaaattgagaaataaaaagggaagtcacagtggagttctaattatacaggggctcttgaattgactgttctctaccttccatgctcattgttgttctggctactttagtaggaaacaatgatttcttctgctttcaccttcctcctccgctaaggacttcttacttgccaataacttccataatcaatgtttaagaattgctctgatgcccagtgtggtggctaacgcctgtaatcccaacactttgggaggccgaggtgagtggatcacttgaggtcaggagttccagaccagcctggccaacatggcaaaaccctgtctctactaaaaatacaaaaaattagtggttcatgcctgtaatctcagctacttgggaggctgaggtaggagactaacttgaaccatggagacagaggctgtagtaagccgagatcatgccattgcactccagcctggcaaaaaaaaaaaaaaaaraaagaaagaaagaaagaaagaattgctcactgtaatgactttcatgccatggactcarctctcttggcagtctggtaaagcttatgtaaacccttctcataaaaatgtctaaatggggccaggcgcgacggctcacacctgtaatctcagcactttgggaggccaaggcgggtggatcacttgaggtcaggagttccagaccagcctggccaacatggcaaaaccctgtctttaccaaaaaaaaaaaattagctgggcgtggtggcatgtacctttaatcccagctacttggaaggctgaggcacgagaatcacttgaatctgggaggtggaggttgcagtgagccgagattagccactgcactccagcctggatgacacagtgagactttgtctcaaaaaaaaaaaaaaattctaagtgaatgaaataaatgtataagattacaaaggaagccagtggcattgatgtacagttataaaaacatttaaaataatatattgtgtgatatagtaatatatatgctttttaatacattaaataagatctaacagcaaggtaaatattataattttgaaataatgataagtatcaatgtattttgaaatatctataaaactgacgtgatatgaaggtgtctgtgatgtatactggtgagaaagcatgcaagtactactgtgtaacatttcccacacatatttaacaacagaacacttgagaagcacttattaacacagcatagattcagaaatattaatttagtaaatgtcaacattagccattgttgtttccttcctggcaaaaggaaatcagcattgggagaaaacttttaaaattcacatttgccattagacaagctgtcaagtggggaaaggaccaaatactgagaaggccagggtatggtaagcatgtttctattgactgagcttgctattactctaacgtttatctttagcatcaccagcacaaccccattaccctagcaatccatcactccattgaaaaagataaaaagttcagattctggtcattaactcagcattgcttaagatacctgttctgacctcactaacccaagagattactgaaactcttcctgtttgtcattactacaccatgggaaattataatgatgtgggatgacatttactctgcattcatccagtgctgttatttgttttgtatttggcatatattacttaactcttaaagtaactctcagagatagattaagaaaactagagctcagagaatttaagtaacttgcccaaactaacacagaaaatctgaagtggagaagctaaacttcaaacccaaagttttctggttccaaagtccattatgaagttgtgcctccccatcttatagctaccacccagatttaatctgggtctcccattatcagatggtttacatacacattttcttacaagatcttgaccacaactctttgagatggccatgagtctcacaattcatttccaggagtgctactttagaatcattttgatctttgctaaccgatgagagattttcaaatagctaattgtcacctaccctttttgaagcccagttttcataatcataaaatggaaacagtattacaatgttttgttaggatcatatacattaataataaaatctaactttgttgagctcactatggtgagcattctgcatttccttagttcattgaatcctcacaacaatctttctaggctaagacgattatttttcttttaaagataaggaaactgaggcatcagtaattaattaactatcttaaattagcagagccaataagtggcaaagctgggttcaaacctaggtctgtctaatgtcaaagccctttttttaatcactaatctgcaaatcactattcaatcttagcttttattattataattatcatcacacttaaaacactatcaagatacagaatgatccagacataagtatatagtcactgaagagattagaatctgaaacttttcacctgcatgttcttccttccactttagtttattaacccaatggatgatgtctgactcctttcttaacttgtttagggcagttccaagttagttgacttctgagagttattgagtaagaaatgttataaattgtttggattaggatttagtatgtttagaagctatttcataagtttgcctttgcgaactgttactggctataatactgcagatgctgtgatgaggaacaccctctccaaagacacacagtggatgacaaacctccaaagctaacatgttgtttacagatatggagaagaagaggatggacaagcacagtctaaaacgtaattacaaggcttatagtccctgttggggactagaatgtttattggctttccttgtgcaattcaatgctcttcctccaaaggatccactccaaacttggaactttcctgaaaatagcatctcatttgggagcatgccaggaattggtgtctgggtcctttgtgtctttgcaccaaytcagaactctggatactagctctagaaactaagctgggatatattctgggtaagggagtagcatatctacttgggcatcttcctgatacatttatttcatccatcttcctcctagagagcacctcctagaaagatgtggttttaaatgagggattggatgcatactggtatgtcttagcacacaagtcagtggtctttgcagagctgccaaaggcatataagtaatcaaagatgcggaagtctatgaagagacttcatcccacctccactctgatttattcagggaaggaccccatgaacacataatggatttgatacgtcccagagctctgaaagcagcctagcaaaaaaggataatcttgaaggacattttgatgtatgaaaaagtccacctaaagctttgtcagagataactaagtaatatgatggctggtagactgtaagtccttaccttggctcaggaactgtatatcatttggtaaactaaacttgtcgttcaaatttagatagaaaaagtaccttacaaatgatctagttcactgattcccttcatgcattgaaatcacctaaatcatctcttctttctgagataaggtctgaatgtgttgccagctttagcaaactcagtttgtagcccactgacctcatttgattgattgggcaactgaggtgcacagtggtagatctctcaatttattcaataaacaattatatggcccttacgatatctatctgaacaatcttgggctagtgaagttgcttgcccaggttacatggccagaaactgacagttttaaattaggaccaaagttcttttgactactatctgggccttaaaataatatcatatgacaaagatatttcttctgtttcctaatagtcacatcaaaaggaaacaatggacagtttgtgcaagattttagttactttaatgttcaaaataaaattaaaaacagattattactaaaacataagcataacaacactttaatagcattctaatcagatattattaatttcaaaatggtaggacaaaactaattatactttatacttcttaaatatcctatagttactttatgactattgagacactagctaaaacttgaaacttcaagttttcattgattcctatattattacttatttcagagttacttcatttggttcttttatctgagattggacaacagctttatttgattttcagcgacaaaattcttttcactcctgatcctccaccccaagaaaacaacagctactaatatattttccctaaagtgatcaagaaataaaagaggaattctagccaggcgcggtggctcatgcctgtaatcccagctctttgggaggctgaggcgggtggatcacctgaggtcaggagttcgagaccagcctggccaacatggtgaaactccgtctctacyaaaacttaaaaaatgagccaagtgtggtggcgcatgcctgtaatcccagctacttgggaggctgaggcaggagaattgcttgaacccaggaggcagaggttgcagtgagccaagattgcgccattgcactccagtctgggtgacagagtgagactctgtatcaaaaaaaaaaaaaaaaaaaaaagaggaattctaaaattaattatatctattaatatccctactcttaaaacgttagaaaatgtttgctcatttaaaatttttatttttaaaaccaccttatattccaactaaatactctttggagcaatttctttgttcctcatataatatccatacatataattctgcttttgtgattaacttttattactactcttctaaaattgtgctcttataaacatcagttaattaaagagtaaatctgatgttttataaattctttctagaaacagagagcaaaatcatataaataacaatatgaatttccaaaagtacaataataaaaaaaaattagaaaaaaattaatctaggaaatagtcaagaatatgtcaaacttgtacatacttttgagataaattggcatcatgtagattagcatgattcttctttatggaattcaacttatttttactcactttgctctaattagtttttgtgtgcggacaagatggaaggtaatggaaatttggcttgcaaagtagttctaacatgatctacatccacaatctggttataatgctataagaatattatgtgggaatagtagttcaaatcagtatttagtatgaacataaagggacaaacaatgcaaagctaacttaagttgtttacacttggaacttatttaaattaaaaaggccagtggatggtcatatgtttggctcattcttctcaaggccttcaggaaaacatgcctatgaaataaaagatcctcaatattaaacattttactgcatttgggggacacatgaaatctggtaataaaggaagtgttggtcttcatttttctaattcagcatggaaactatcttgaggaaaactgactatggtcttagtttgtgtctcagaaatatatttagtctgaatcatggcgtcgacatctgacttccaaaattggatatctagccgtatagtacctcacctcccacacacaccaccccccattcccaggtcatgactactgtccaagcagcaaaaaaagaagtaatttcccagagtacatacatggcagtgactaccaaccaaacaaaaaacaattataggggctggaatttaaattaatggctgtactctcaccaattcattccccattccaccccatctctctgtcttcaacttttatgaaacattatatttgtcctattcttctgtatcagcatcagcctttcctatatccaactagacttataacttcttggtgcctctcactggctgactaaggtttcagaagtacctacttacagcaaacacttgcagcagtctctttttggttacaaagtccctggacaatttctcaaggcgatattatgaagaggaagtaaacattctcctctgctaccccatttctttttagagtgctaactttattctatatctggtttaatgtcttcttaggccaattggactgattttacagacaccatagaatatctcctgagtaatgggaacaatatttctgctgatcccatgatttggtctcattgggttgttaggccataatggagacatacttgatgaatttatgaagacttgattctaggtatcatgtaggttagcataattctcttttactgaattcaacttagttttattcactttattctaactggattttgtgtgcagaccaaatgaaaagaaatggttcaatttaggtgaaaggtaaagcttcaaaagtagtgtagtatttcatagaccttacctttgagagaaattatatcagtatataataagcacctgagaatatgaaagcacaaatccaatttaaatgtgaaaggtctacaacttgggattttaaakggagtacagaaaagccactgtttcttaaacaattttgttgagggggaaaacagtgaaagctaaatgttctattcaagagttgtttcttttgaaaataatgcttcatttaaaagctaaggacagaagacgtagctttgttatgaaggctcatctttttattaaacaaccactactttgtctccaagttgcaaagggaagatttgtcaatctgattgaatcttccctttagtttttcccaacagctgtgtccagataattcatgactcctgtgtttcctgagccctggataatttcacacacatgtctggtttggggctccacattttcagaaaaatatagaaatcttggaggaggtccagggtagaccaagggaaatgattaatgggttgaaagttggagtttatgaagaaaggttgtgagatctgatcttttgctacgagaaaagtctgagtggtgacttaataacataaggaggttagtaagcagctgttctccatcttcactaaggttgaatgaaatgaaataagatataaattgcaacaggaacaaaaatgcattacaagtgaggacttccaagcaccagcattgctggattctagatagctccccaaaagaaggatgtgtagtctacttccctggtctgcaatgacaggcctataaatagtgagaaagatgagataatctcttaagatcccttctggacctatcttttataggtctatctatcatatttagaaaaattatttgcctcaaacaaaaattatctgatttcctccctctcaccctatccactccttctcttttgtctaccttttgtaaaacactgctaaccgaaataactggggactgattaaccgtggtgggccctcccccgcctctaagtgccactccagctttgggagcaagtttcttgtccatcactaccaccccctggccactaggggcatgtttaccatcatctttctacacaccaaacctacggcaagggaaaataaaacaaaacaaaacttcctagacttaacaaatttgcaagtgtcaccatggattaaaatacaactcttatgtcctagaatatgagcatgtaaagggctaaaatgtattttatgcatctgcctgtatcagcccatagaatagcctcctgacagatagtagatactcagcaatctttcatcaactgaatgactgtaactatgaagtgaaaggcaactaaagttgagaaagtcaggagtttcggatgtttccaaatgattctgtatgccagactaatctaaagcctaacccattcttcacaaccatgcactattaaggatttcattctcaccatgcctgtgctatctggaggtagaaagagggccagttgcacatcctgctcaagtccttggtcaaaaagaccactaaagagtgctttgtagattcatgtatcagaatcacatgaaagtaggccaaattcttagtgtgtgtttttaaaataagactttaggaagttcacttatttttttctaaattatttttgcatattcttctttttcatttttttcatgaagaatttaaaatttggctgtagaaaatctctcactccaaacatcacacagcctaaataggtgagtctcaaaaataagctaaygttcatctttcatctgattcaatgtcctgaaaccctttggtttaaatttgttaattcttctcatggcttttctcctagcaaaaccaactaataccacagctatttattactgtcagctctaacttatgcccacaatctcacatcccttttgaccacgcttatagaactattacaacaagtaaaccaaatttattcttcattattaatttttaaatgttctcagcacaaatctggtaacttggagggctacaagttgatatttctcatatgtttgggggtttagtctcaacagtttcttaatggtttctatgccgtttttcttgatccaactaaatattattcccagatgggatcagcttttgaccctcttgttctactctcctagtcttggcccttctaaaagtttcttgctgtggttcctttcttttgtctgccactaatggctatgcctggttacataactcctgtaacaggtgttgaccaatttgaacacattttggtatggtattgagctattcttatggttcataaaaagcttagtgagaacgtaacatctcatgaatagggaaattacttctcccttaaggtttttctcaggacaggcctcatacaagaatttcaaggattgcgagtgacatagtttaacattggaccaggcctttcaaattatccaggatgagtttgaaaacacctgtgccactctgctcaacagcagagttttctgtttactaagtattttccctatgctaattacggaaagtttcaacagtttttttaggccaacttatttgatgctagactagacaacttattttttttttcttgcaaggaagactgaaggtaggagtaactaggaagcttaaataaacataaatataaaatgcttatagtgatagaattgacctcagccaattaaaattattaatagwaaaaacatgtcaatgtcaagcctactacctctgttctcacttgagtaatgaggattagtttatatttcccgacaagaatagatgggaattcaaatttcttcctgacctttgttccccctggaacattgggttaggatcatattagaacataaccaaaaagaaataaagattcagacgaattcacaattaatttttaagccccacaaaagtkaaataggtagcattattttttcaagctgtgaaactttccctcattttagtaatagagaaaatgttcagattataaacttggaaactttgctcctaacatatcaattatgccagaggccaatttttaagaagaagagaaatgcatgctctatattctcagcatcatccttgcccacaatagggaaataattttgtaaaatgtttgattttagacctccaaaattatctctatatgctacctgaattaagcaaataaaaaataatatttagaattccatgcaaggcactggtacaattttgtttatcttggcttcattgtttttgaatgtaagatgtacttttaaggcaaataagtacatgttttaagctggtcgcatacagtattggcaatgctataatcacaaatcagaaagtttggaaatgcttacaagtgttaagaggtgtgattcatcatggttatctgaattggcatctgatcttcttttctttctaaatatccctgacatttctgactcctctgtcttttcctcagtaaaactgcaccacacactggaaagcgaagatacacacatttatttatataatgtcaagggagagtaggaataagaagattggccatagacccacccaatcagagtctgggaaatgagaacactttttccttcagcagaaatgctgacgtgccaatgtgaatttagcagaaaaaagatttgccataacttctaagtgagcagccttcagaatgctagcttagattcctggcattaacttgccaggtattttttcaggaaggaaataaattacaattgagcttaaaaacctgagggtagaactcattttcaagcaaatgtgaagcatcagtttgaagttaacaaagttaaagtttggagtagggttcctccagtcctttataatgtagtacaagtattttttttaaatgtataacactagccttttaaattgtattgtgctactaaaagaaattgtgcctgcattcatcttacaacctgggaaccaacgcagagggtctstggggtagcggtatccagcttcatgccctctgtcctttattgctttctggttagcctgcgtatttcacatacattaaatattccacaataaactctgccatctgtgctgtagggtagtttgtattggtcatgtgctctgtcaagttgacagaggtgcaaagctaaatgtgtgacactcgaagaatatgcatatatttgaataatttgactatttagtccaacaatttgcaaaggcgctctgaatgatcacacattctgataacacttccaaggaacagatagcttcacttagggggtgggggagatggaagcagggttatttctagcaggaattcttgagttcactgaagtcttgtccctggtacttcactgtgtgaacgtgggtaaattatttcctggcagaggatcggattcttcttttataaaacgggtaaataatttctgtcactagtctttagaagttctaaaatagctaatgttagtgaattcattttgctaactgtaaacccttaggtaaattgaactgagtatgtaataatattatatattcagttcaacagcacattcttggtaaccacaagagggtccaggaaaggaaactgtttataaatctttccctttagcaaaattaatgttggagtctttagggaaattcttacagcaatagtcttcgcaattattaggtcaaacccctttgagattacagaaaaacgcacacacacagaaagctgcctgcagaatttgggtgtgggcttggtgggagattcctctgatacccagtgttgtacccccaagagagtgtttctcaaagtgtgacttcagattgtctgcattcgaattgcttgtggtatttattaaaattataactcctgggccctgccccacccctactaaatcacaatttcaggaggagggaccttcattttaacactcacccaggtgatttttatgctccgaggaggtccagggwctccaagttaagtacggtactgctgtcttattctttattctaaattttaaggtctgcacaaattggttgaactaatgagaagaaaattcagctttaaagcagaaacacaggtagacggttgacagagttcatcaaatggataattgaaaatgtcctctggaccctagccatataagttctcttcaagggtcttggctacaggcaaatgagaacccgaaaggctatttgctcttttgctgcgggcagtggtgggggtggagggcgggggaggattaactgagccagttctgcccccaccctcgaatcacctacccccactctggttaaagcagaagactttttatttatcttggctgccctggttcgttattaaaagggttagcttatacgtgtgtttgctggggctggaagtgaaaacatctgcaaaagcatgcaatgccctggaacggaactcttctaataaaagatgtatcattttaaatgcgctgaattttgattctggtaattcgtgcactagagtgtctatttcgaggcagcggaggtatcatatgacagcgcacgtcaaggcaccgtggagccctctcgtggactcccacccactttcccattcaccgcggagagggctgctctcgctgccgctccccccggcgaactagcatgaaatctccctgcctctgccgagatcaaatggagcttctcgctgatggggtgcgagtattacctccgccatgcaatttccactatcaataatttaacttctttgctgcagaacagaaggagtacataccgggcaccaaagactcgcgccccctcccccctttaattaagcgaagggaacgtgaaaaaataatagagtgtgggagttttggggccgaagtctttcccggagcagctgccttgatggttactttgacaagtagtgactgaaaaggtgggtttgttttctttctttctctttccgtttttctgtttggtcggctagaaagcgtgtggctttagcgaggtctgtcattgcctgggcttcctggctggaacaagtaacttggtgtaacgttatctgggggcgttcatcaataaaaaatgctgttattatcttgattgaattcctattaggcaaactctagagaggtcagtgcgcgaactctgtttaagccggcgtgtttaaggcagcagagtaaaccaatagcccccatgctctgtgcgatttcattgtgtgctcgcgttcgcaagctccgtagtgcaggaaggtgcgggaaggtgtgtctgtggcccgggaaacgcacgccctctcccagagaacttgggtgctgggatggggaggaaggggagagttgaaagctaggggagcgagacctcggggcgtgcgattctcactcgctccctcccgccccagcgcccacagccggggtttctgcagagggcgcgggacgcggggttccccggggctgaggctggggctggaacacccctcgaagccgcgggcgtcctgtccaaggcgccccaggagggcgcaggactcgcagggcgatgtcgcggggccctaggggaggaggtgaggacaggccccgggggagcggggagttccgggcgcccctcggttccccgcgcgaggaaaagacgcggcgttccctttaagcggccgcctcgaacgggtatcggtagcgcgggcgagcggggagcggggggcggggggcgggggggggggcggcgccgtttgaccaatcgaagctcaaccgaagagctaaataatgtctgacccgggcgcaaggcgcagcctggagctccgggtccccgccgctgccgccgccgcgcccgggcgcacccgcccgctcgctgtcccgcgcaccccgtagcgcctcgggctcccgggccggacagaggagccagcccggtgcgcccctccacctcctgctcggggggctttaatgagacacccaccgctgctgtggggccggcggggagcagcaccgcgacggggaccggggctgggcgctggagccagaatcggaaccacgatgtgactccgccgccggggacccgtgaggtttgtgtggaccccgaggtaggcaagcgctgggaatggggcttggtgcaggagctgcccgtccgcgggagagagttgactgggggatcccccaccccaaagttgtgggacgaggccagtctccttctttcctcccctccggtagaagggacgatttggagttactcttggggagttttctcccccatcccacaacccagaaggtcagccggcaccaccagggaaaaagggacccggggaagtcacgaagtagaggagggaaggcctggaggagacccagagctgcgtgatgggagcaaagacggcgacccggggatccctcgcagccctcccccagcccaggagtagtcgagagagacttagggggccagagctgtcgagggtcctgactgaggggagggtgctggggctaggctaggaatccttccagggggtgggtggtccccgcgccgacttgcggggggagtgggagggaagcttgcgccttcagcccgcatcccttccccggagctgcacacggctacctgctccccaggaattgagactgaagtggacttacaagtccgaagccaatgtagcttggaaaacttgggaggcggaattcctaccgctgggaactgaaagggtctgcgacactctcgggcaggccgaacccacatctctacccatcctgcgcccctcttctgaagcgccctccagggaagttaagagttttgactttcggggagtggttgggatgtacgtgggggattcttgactcgggttagtctctggggatgcagagccgggaagaggaatgggtgagtgagttactcctggaaagaaatagctgaggattgggggctctgtgcctgacgggcaagaagaaggggagattacagactaggggcatccctaaggaagaagcctcggggctgcgagggtgaactggaggatgcagtgtttgtgtgttgggggtagagcggggatgagggaccggggtggaggggaggcgaggaggaggaggggacccagagaacgaagctagggaaggtagagggtgccctctgccggccatgctgccaagagcagctactgggggcgggaggctgggggtggggaagtggtaaaggaaggttttgcgggatcccttagagagctggtaggagggacttgttgaatggtgctgctgactccagctcggtggggcgtgcgactcgtcgtcggtggattttgactcctcgttcttgtttggcttctatgcaagttttcctcgcgctgggggagctttgataagcctcgattggcggtgtgttagggcttcttggatcttattttagggtcctctagttatcctgcacttactccttaatgtcagtagcaaccaaagaacattttccgacaagcacgcaggaatgttcttggccagaagcaaagaaaggcatatttctgagtgtttattaatcctcctagtaatcttttaaagcaaagtaatatgtaattgggaacgttgattttctaactgcatataaaaggcgacatgatattaaatgagacccctccctactgrctcaatatcctgcaaaatctctctctcccctttattattatcgaaaaatctatttttatatgagtttgttgtaaggtcaaaagccattttggtcttacaatttgatatgtctttacattttaacttattgaggcataattacagatttaatttgtatgaacgtgtgtgccttcaatgcttatctcatgcaacataatttttaggttggagatttctgatgttatggcatgtagcgtttcaaggcattacacataataggtaacatagcatgttgaaattacaccacaaagttttgaccctgggaacagcaccttttaaaaacaatcactaaactcctgttcctgttttctgattttgcaaatgccttgcttaagacttttttttttttttttttttttttttttttttggtaaatttacctctgggttagcaggagaggtaagagaaaggaaagagacacttgttgaaatgtaaccataacctttactggaatttaaaacatgttggtcaccattactggaattccagggccataaagtcgttgtcttttttttcttctacttcattttgtaaaatgtgataaatgttggtaaatatagaccagtagtaagtattatgacackaaaagcattatgtatgtggaactattttaagttattacagaacattttctatttataaatgatataagcagaaagaaatgatttccagataaacaaggcttacgtacatgttttgaagcattagaacattgcagacactcttagacatcacattttttaaagcaaaataacagtaatttttcacatacctttggagcctttcatagcccattcagagctgagttagtagctggaagtttcctttattttaaggtgatattttaaaaccatttaacatgtatagtaggtcaacattggtgcatccagaaaatgaagcatttaggaaatctgtttcagtgtcttttcaatgtgtgtaacttttacttgcaaaccaatggaaccaagaaagtcatcatttgcctaaaatgcagtcatcacctcaaatgattcatttatactatgtgagttaattgccttcatctcattaatggccaaggagggaagggaggtcctggggtatttcttgttcattttgactcaccaggagggaaaatcctgtaaaaaaagaaatgcaaatttctaaaatcctggctcaaagtccgtgggtttcctgtttaaaaggggcgccatgaaaatgtaagctattccctttttcctggaatctttaagagtcccagcttttcaatagtcaaaatgtagatgattgatatcatttcttatatgaatagcactggtttgtagttcagcacgcacagtgagctgggcacgcccacctgatagtatagcagagaacttgtttacattctttttacattcatcttctaaaacctggggtgctctctctctctctctctctctctctctctctctctctststgtgtgtgtgtgtgtgcgtgcacgtgcgcgtgtgtgtagagggggagagagagagagagagaactgtgaactgtgaaatataacacagccagcagctttgggtctcaatcgtagacttactcttaaggaaatttacagaatggaaaggtcatgttcaagtagtttattaacattttgagatgtaggaaattaatcccggagtacagaagaacaatttcagacttcctgaataaaaacagacagcatagagagtggatgatagctaaactctgaatatcttttgagaagaaaggcactcccatttcaggtgcccataatatggatttgattttagtgattaaaacattaattttcaacttgcatctccctgtgtggaagagttcaatttgtgtgaggggtctcgcctatccaacaaaagtgaatatgtcccttttatagggtaattgctaacttgtctcaacttgttttcaaacaattgttatagagcactcagtttccactaattgcaaaattgttgcttaattgaaggactctcagccatctagtgcagccattcagccactggcaggctctgtgatctcaaactgtgaattgcattttaaagaggaatcgaggagagaattctgtggaattctaggttttaagtgctggctgttgttcaatggaagaggaaatcatttgaacaagaatcgcatcaagttgtgttgtgataaattttctttattaggatgaataacatgcacagatgagcttcaaaagtgaatgagcaaacttactggttacactctgcatccatttactctgtttagtatggagtaatgttaggcaataaatgatgctggcaaatgaaatccgtatgttatttgcatgtggtatttaaacctaggaaacatagagtggctttggtatttgtaggcttagtcatgtgtgtcctaaacgtcctcttaaacttctacttaaggcatagaattayttaatcctaaataattttatacttaagtgcctcactggatttccagaatatttacactgtaaagatttagaaaggtcatgaacccaattattgactatatggaatcattattgatggcagatgcaaaatggagctcactaatgtactgacattgaaaaccttttgcaggggagaggagggggagtggtaaatgtgtgtgttctttaagtggaacaggaaggtattctcttttctgtagaaaaatttgagtatctggtcagataagtgtggaagctttcatttaaattaagtatttaagttcaagtagaagctctagggcacttatcctcttgatgagacaaatcttatcaaatatactagatgctaagaagtggctcattgccctgatgtctcatttatagattgatgtttgaggatgggttgcattaagtgagttagggggctgagtgtgggacaggagaacgattggaaggaagcaaagtaaatttacaagctttagtgacagccataataaagtaaaagtttatttccagagagcctagagagtaaggaacgttatatagttttccccaaaggttcacttgaaagaacttttcattggttgtcatggtagtaatgtcctgattttgaaatctcccagaacctagtagctcttaaacatgctttcatcttggttcctttggtctgacggaaactttatgacgaccctctgtgtttttgacatgcctctgcatttttggagagaggaggtcaggcaagggaggatttcttaaaactaagacagtatagtaaggaaacataaaattatatgataaaaaatcactgaacttcaaattgacttactgaaataaaacctagaaggcaacctgtcgtttaattacaactagcttgtataaaattaaaatttataaaatgggaattcaaagaaaataaacgggcagttccaagtaatttaagcaactcaccaaaaattgaagtaatagtgccacctagagaacaaaatcaccagctttactagccaaatggcttatttccatatgaaccatttttccaacgctacagttactaggatttccttgttaccatattcagatcttgtgagtgtgtatgggggtgggggttgcatgtggaattacagatgaaattttaaaacaagcagatccacaatttgatatatgcactaaatccttttaacgttgtaatgtagccaaatgtagaatagcatgccaggaatcaacggctagcatcctttttaacatttattattttcatggatatgtaccaaaccgaaccattgagtataaaggttctgattttatttatttgctacaggcaattcattatactttctgagatacaataacaccaaataatttgagtagagagacctttaagaatgttttcgatttatgatctacctttaactttaatgtactcagaagatgtgagaataaaataaagtcaaatataagcaagattttaaacacacacacaaaaaacaaacaaacaagaaaaaggaagaaaattataaggattgccttaaccttagaatagatgaaggtatacatctgagccagcaccaaaaaaaaaaaaaaaaaagttatggaaccaggaaccaataattacaaattgacttaaaattcttggatgacaaaaatctatatttagttcatttttgcatgcgcccacaacagcatccaaaacagttctggggaggcactttgataaatgttgctgaatgcactaatagattgattaatggctgcttcagattatcactagtgatgtagacagaaacttcatgaaaatggtttgtcttgctggaagaaaggcagaaattggaggaaaaggtttaataatatttttccccagtacctattataaaagtcatttagttggcttagttctataatttcttatgtgtaatttgattcacttatgaaattgtgaatatatgaaatgttaaagttgatttagacagcaactataagcttgtggattttcttttaaatgtcttcaaatttttaaatgccagtggagatgccagcgactgtgcttcagggagtagaatatagtatatcttaaatttgtgccaatttctggtaagcagagaaaaaattgcatgataaccaaagaaagtcatattgtttgtgctttgtgttattcatggaagcaatcaggtgcagaaaactttctttttcagaaaaaaaaaattactaaaataaaggtgcgtgtgtgtgtatgcacatatatctaaagggagagagggagaaggaaacttactaaataaaatttttgccacatgggatttagtctaatcagtcttggttttggagttgctatcatcagtagttccattttgtgattctttctttctgccttcatgtgcctttgaaaactgaaactatgcccaaattaaaacaagtttttctgtcttttcacatgttcacttatttcttgaatgtgtttttaaacacagacaaacttcttttacatcatgtagaatctgaaggtcgagaaatttgcagtcattttgctggagagagatgcttggcggagtcccaggccacattcctaggccaaactctcgaaggtattcctcttatgcaacattgggaaaatacatccagcaccgacatgttggctgataatgtgtctgaaggcacagacgatatgcttatcatatgaaacataaagccagcagatattgcagacattctgttgaatgatagaatctggatcatttacatttacttaaatgtaaaatactatgattaagtacaaaaaaatcaatttaggagagaatagagagttgcgggcacggttttaggggatgacttatcagcagattgtagaaaggaagcttgaatgttttaaattaactgcaagttcagtataagccagtggtgtgacaagaggctgttatcatagctactgaaattttgggctgcactgctagaaatataatactgaaatggagaagctaataattcttcactttttaaatagactgtatctagaatattatcatcagttcaaggaaatgaaataagttgttttaggtacatcatcgataaattagtgtacattcaaatcactgtgaccaggatgcatagggaatttgaaagcattgcatgtgagcaatggttgaggggacttggaatgcatgacttagggacaagaaaacttaggctggaatggcaagtggtttttgaatgttgggttgagaagaattctaaaactgtgaaggattagtaaaaataacattcagattgctaatgcctactgtggctgggagattagagtgtcaacatgtgtgatgtatttttgacatccttattttgaggatgggcttcaaagatttgacgaactgtcataagtgtaatttgtgttgcttcagacagcagttctagaaccaatgatgtaaatttagatactctacatggtagttagaaaactttccattaatttaatttagcaaatattgaatgctcactgcatacagagcactttattagaggaatatataataaagaaaaaagaggtctggtgtggtggctcatgcctgtaatcccagcactctgggaggctgaggtgggaggatcacttgagcccaggagatcattacgagtctggacaacatagcaagaccccatctttacaaaagacaaaaaaaattatccaagcctggtgacaggcacttgtagtcccagctacttgggaggctgaggcagtaggatcgtttgagcccaggaggttggggctgcagtgagccgtgattgtcccactgctcttcagcctgggtgacagagtgagaccccgttggagggaaggaagggaaggaaggaagaaaggtaggaaggctgaaatgaaacccttttagaaatgacactaaaatgggaggttggagtaaggtattttctgaagtgcctttgtacttgtttttttctaatgcattggccataagtctgctccttatttatagtccataaacaatcctaatgagaacagttatatatttctgcctttgaatcatctacttgaagtgtttagcatcatgaattgagtatcagaaatccctcccatttctttgcaaagcgctgtattttacttttccttatttgtatacagattctcaaaattggctatttttcctttgggttagacagaacagaatgtctggaaaaaaaagttcttatcaaattcaggtgcccaaattgcttaagaaattaacttttgaggttatatttttttagggttcagtagctaaactaagaaaacttctcaccgttcaccttcacttttggaaaccacaaaatcttcagatattacagttttccaaagagtttctctttttaaatataaactaaaaggaattgactcctcccccaactccctcaggcctcagcatggatagagttactttttttctttaataatttatttataacttattttgctcttctgtagaacagctggagattaagcaacatggccatgacataaaatgcaagttagaccataagatgagcagcccactccaagtatgaatgagtacttattctttgtgatctctcatactgcttttaggtattaatagtgtcagtcagcaaagcaaacagtttaatatttacatctcctttaggatatcatatagtttatagtttgtatgtgttcttgcgtgtatgttttcttctgtttcaaattcttttttcttaaagtaagaatgttatatgtagcaaatggttctttcattaattcatttgttaattcaccgtgcattaattgagtgcccagtgagtgtcaggcactgggctacttggatttcttttccctgtattgatccatatatcttcaggtgctccttgatatggctctccattgactctctcatataaggctttcattacctattcacatactccctcccaaagaggactggtccaaaagtaaaatcttgagcaagttctctgagttatttcagaacttcttgcccccaaactgtatttttaattattgactggtagcattttggaataacttacctctcttttttaaagattgaagttctttatcctctctgattttcaggtgtcagtttgtgtacaaattgagacaataaaaatgtttgttagacattttcttaaagcattttgctatgtgagaatctttcatgaagaactctttttaacaatgactctatagcagaagccacagtagagggagaactactgaatcaaagatggtgtttgagtctatgattttatgatggattttttttttttttacatacaaggatatgcatgggtcttttagtattcaggaatctgttcttcacttgacagtatttayaaattgtgtgtttccccctaaaaaaacttaaattgtgagaatgcttccatttactagaagttggttaatgattatgccaaataaggaaaataagacagaaaaatcagtttagtgaatactattttgcctttaaatttagtaatttagtaacagtatctctttggggtttactagaaaccactttttaatccaataggtctctttcattgtgaagtcaggaggtgattttgcttaaatgtgtagtataggaatctatatgtggtgttcaaggatcatgtaaatatgctgatataatcggagcacagtttggcatcattaactcagaaatatttaaactcttgctatacaacatggaagcaaacttgtgcatagtttgtgtgtgtgtgtgtgtgtgaatctcaaaaaaagaaaaaaatcacaggatcaggaagtcggaataggtcccacttttcttctagtaccaaacctacagccatgttcctagccttctcttttactcccaagcaagacagacaggcaaatgaccatcctgctgcccatttctgtgtatattcacttgcattgagagttgtattcacctgcttgttgagagtattcacaaatggtacctgataaagtagatacttctttaaacatgtgaatttttttgcattgtataatgtttagaaataatcatgtataaatggttgaatattaatacaggattgccttatcaagtattttattaatcattaaaatgtggtgtcattaatacaatttattttaagtgcttttcctaaaataccagattatttttctgattttcacatccctgacaatgactttcttaaacttggtagccaggaacagaaaacctaacactgcatgttctcactcataagtgggagctgaacagagagaacacatggactcagggaggggaaccacacacactggggcctggagcagggggcaggggaagggagagagtgcgtcaggacaaacagacaaatagctaatgcatgcgagccttaatacctaggtgatgggttgataggtgcagcaaaccaccatgacacatatttacctatgtaacaaacctgcacattctgcacatgtatcccggaacttaaagtaaaataaaaaataataataaaataaaataaacttagtagcatctattgttccagagcctgtaattgctcttcaggcagtctcacataaaaacctaggagaaccttcactgtcactgttccatgaggtgttaggaaaacttgctctactgcagtgccccagtaggcattggtactgagaccaaaattcagctggtttgttgttactacgattcctacgtgatttcacttgtcatgtagacaagattgcacacttcaataataatcttgtccaaatgtgtggtattccatacatttttaaaatgcattcacatatctcattccatttgatcctacaaataactctataaaaaagattggcagacattatttctatataacagaggaggaaactggagcttagagaagctaaatagcaatccaaaatgcacagctgtagaaccagagcaaggatgatagcccagtgacttcacctaacctagtccccttaccaccactccagctgtctataaccaaaacctgcagtattcaagtaagaaaccatatcttgcccttgatgcattaatgtgagacctggagcaggaacaggctgatattgtcaccctggcctactgtccacctttgtctccagcagagactggtacccttctgtgtgccaaggaataaagtggtaatgggaagattaaaaatgttttttccaaggagttttttaatttaatttttttaaaaaagaaaaaactcttagagggaaaaatgaatatatgacttttgatgtattgttccttagtaacttagttataattttacttaaacctgagactcttgctaagtgaatgattagaaatattaggtggctggccagatggcaaataggaacagctgcagtctgcagctcccagagagatcaatgcagaaggtgggtgatttctgcatttccaactgaggtaccgggctcatctcattgggactggttagacagtgggtgcagcccatggagggtgagccaaagcagggtggggcattgcctcactcaggaagcgcaaggggtcaggggaactccctcccctagccaagggaagccctgagggactgtgccatgagggacagtgctatctggcccagatactacacatttcctacagtctttgcagccggcagaccaggagattcccttgggtgcctacaccaccagggccctgggtttcaagtacaaaactgggtggccatttgggcagacacccagttagctgcaggagttttttctcataccccagtggcacctgaaattccagtgagacagaaccattcactcccccggaaaggggctgaaggccaggcagccaagtgatctagctcagcagatcccacccccatggagcacggcaaggtaagatctgctggtttgaaattctcactgccagcacagctgcctgaagtcaacctgggatgctccagcttggtcgggggaggggcatccgccattactgaggcttgagtaggctgttttcctctcacaatgtaaacaaagccactgggaagtttgaactgggtggagcctaccacagctcagcaaagcccctgtagccagattgcctctctagattctccctctctgggcagggcatctgggaaagaaaggcagcagccccagtcaggggcttatagataaaactcccatctcatgggacagagcacctgggagagggggtggctgtgggcccagcttcagcagacttaaatgttctttgcctgttggctgtgaagagagcagtggatctcccagcacagcacttgagctctgctaagggacagactgccttcttaagcaggtccctgaccctcgtgattcctgagtgggagacacctcccagcaggggtcgacagacacttcatacaggagagctctggctggcatctggtgggtgcccctctgggacaaaccttccagaggaaggaacaggcagcagtctttgctgttctgcagcttctgctggtgayacccaggcaaacagggtctggagtggacctccaccaaattccagcagacctgcagcagaggggcctgactgttagaaggaaaactaacaaacaggaatagcatcaacatcaacaaaaaggatgtccacacgaaaaccccgtacaaaggtcgccaacatcaaagatcaaacatagataaatccacaaggatgaggaaaatccagcacaaaaaggctgaaaattccaaaaaccagaatgcctcttctcctccaagggagcacaactctttgccagcaagggaacaaaactggatggagaatgagtttgatgaattgacagaagtatgcttcagaaagtgggtaaaaacagactcctccaagctaaaggagcatgctctaacccaatgcaaagaagctaagaaccttgaaaaaaggttggaggaattgcyaactagaataactagtttagagaagaacataaatgacctaatggagctgaaaaacacagcacgagaactctgtgaagcatacacaagcttcaataactgaatcgataaagcagaggaaaggatatcagagattgaagatcaatttaatgaaataaagcatgaagacaagattagagaaaaaaagaatgaaaaggaaggaacaaagcctccaagaaatgtgggactatgtgaaaagaccaaacctacatttcattggtgtacctgaaagtggcggggacaatggaaccaagttggaaaacactccttaggatattatccaggagaacttccccaaactagcaagacaagccaacattcaaattcaggaaatacagagaacaccacaaagatacccctcaagaagagcaaacccaagacatgtaattgtcagattcaccaaggttgaaatgcaggaaaaaaagttaagggcagcgagagagaaaggtcgggttacccaaaaagggaagcccatcagactaacagtggatctctcagcagaaaccctacaagcctacaagccagaagagagtgggggccaatattcaacattcttaaagaaaagwattttcaacccagaatttcatatccagccaactaagcttcagaagtgaagtagaaataaaatcctttacagacgagcaaatgctgagagattttgtcaccaccaggcatgccttacaagagctcctgaaggaagtactaaataaggaaaggaaaaaccggtaccagccactgcagaaacataccaaattgtaaagaccattgaaactatgaagaaactgcatcaactaatgggcaaaataaccagctaacatcataatgacaggatcaaattcacacataacaatattaaccttaaatataaatgggctaaatgccccaattaaaagaccacagactggcaaattggataaagagtcaagacccatcagtgtgctgtgttctggagacccatctcacatgcaaagacacayataggctgaaaataaagggatggaggaagatctaccaagcaaatggaaagcaaaaaaaaagcaggggttgcaatcctagtctctgataaaacagactttaarccaacaaagatcaaaagagacaaagaaggccattacataatgataaagggatcaattcaacaagaagagctaactatcctaaacatatatgcacccaatacaggagcacccagattcataaagcaagttcttagagacccacaaagagaccaagactcccacacaataatagtgtgagactttaacaccccaatgtcaatattaggtcaacgagacagaaaattaacaagcatattcaggatttgaactcagctctggacccagtggaactaatagacatctacagaactctccaccccatatcaacagaatatacattcttctcagcaccacatcacacttattctaaaattgaccacataattggaagtaaaacactcctcagcaaatgcaaaagaatggaaatcataacaaacagtctctcagaccaaagtgcaattaaattagaactcaggattaagaaactaactcaaaaccatacaactacagtggaaactgaacaacctgctcctgaatgactactgagtaaataacaaaaagaaggcagaaataaatacattctttgagaccaatgagaataaagatacaacataccagaatctctgggacacagctaaaacagtgtttaggggaaattcatagcaataaatgcccacaggagaaagcaggaaagagctaaaatcaacactctaacatyacaattaaaggaactagagaagcaagagcaaacacattcaaaagctagcagaagacaagaaataactaagatcagagcagaactgaaggagattagagacacaaaaaacccttcaaaaaaatcagtgaatccagaagctggttttttgaaaagattaacaaaatagatagaatgctagccagattgataaagaagaaaagagagaagaatcaaatagacgcaataaaagatgataaagaggatatcaccactgatcccacaaaaatacaatctaccatcagagaacactataaacacctctatgcaaataaactagaaaatctagaagaaatgaataaattcctggacacatacaccctcctaagactaaaggaagaagtcaaattcctgaatagaccaataataagttctgaaatcgaggcagtaattaacagcctaccaaccaaaaaaagcccaggaccagacgtattcacagctgaattctaccagaagtacaaagaagagctggtaccattccttctgaaactattccaatcaatagaaaaggagggaatcctccctaactcattttatgagtccggcatcatcctgatacaaaaacctggcagagacacagcaaaaaaagaaaattgtaggccaatatccctgatgaacattgatgcaaaaatcttcaataaaaaactggtaaactgaatccagcagcacatcaaaaagcttatctaccatgataatttggcttcatccctgggatgcaaggctggttcaacatatgcaaatcaataaagataatccatcacataaagagaaccaatgacaaaaaccacatgattatttcaatagatgcagaaaaggcctttcataaaattcaacagcccttcatgctaaaaactctcaataaactaggtattgatggaacatatctcaaaataataagagctatttatgagaaacccacagccaatatcatactgaatgggcaaaagctggaagcattcatttgaaaaccggcacaaaacaaggatgccctctgtcaccactcctattcaacatagtattggacgttctagccagggcaatcaggcaatagaaagaaataaagcatattcaaataggaagagaggaagtcmaattgtctctgtttgcagatgacatgattgtatatttagaaaaccccatcatctcagcccaaaatctccttaagctgataagcaacttcagcaaagtctcaggatacaaaatcaatgtgcaaaaatcacgagcattcctatacaccaataatgacaaacagccaagtcatgagtgaactcccattcacaattgctacaaagagaataaaatgcctaggaatacaacttacaagggatgtgaaggacctctttaaagagaactacaaaccactgctcaatgaaataagagrggacacaaacaaatggaagaacattccattctcatggataggaagaatcaatatcrtgaaaatggccatactgcccaaagtaatttatagatccaatgctatccccatcaagctaccattgactttcttcatagaattagaaaaaactactttaaatttcatatggaaccaaaaaacagcccgtatagccaagacaatcctaagcaaaatgaacaagctggaggcatcatgctacctgacttcaaactatactacaaggctacagtaaccaaaacatcatggtactggtacataaacagatagatagaccaatggaacagaacagaggcctcagaaataacgccacacatctacaaccatctgatctttgacaaacatgacaaaaacaagcaatgcagaaaggattccctatttaataaatggtgtcgggaaaactggctagccatttgcagaaaactgaaactggaccccttccttacacgttatacaaaaattaactcaagatggattaaagacttaaacataaaacataaaaccataaaaaccctagaagaaaacctaggcaataccattcaggacataggcatggcaaagacttcatgactaaaataccaaaagcaatggcaacaaaagccaaaattgacaaatgggatctaattaaactaaagagcttctgcacagcaaaagaaactaacatcagagtgaacaggcaaccgacagaatgggtgaaattttttgcaacgtatccatctgacaaaaggctaatatccagaatctacaaggaacctaaacaagtttacaagaaaaaaaacaaccccatcaaaaagtgggcgaagggtatgaacagatgcttctcaaaagaagaaatttatgctgccaacaaacatacgaagaaaagctcatcatcactggtcattagagaaatgcaaatcaaaaccacagtgagataccatcttatgccagttagaatggcgatcattaaaaagtcaggaaacaacagatgcaggagaggatgtagagaaataggaacacttttacactgttggtgggagtgtaaattagttcaaccattgtggaagacagtgtggtgattcctcaaggatctagaaccagaaatatcttttgacccagccatcccattactgggtatatactcaaaggattataaatcatgctactataaagacacatgcacatgtatgtttattgtggcactattcacaatagcaaagacttggaaccaatccgaatgcccatcaatgatagactggataaagaaaatgtgacacacatacaccatggaatactatgcagccataaaaaaggatgagttcatgtcctttgcagggacatggatgaagctggaaaccatcattcttggcaaggtaacacaggaacagaaaaccaaacaccacatgttctcactcataagtgggagttgaacagtgagaacacatggacactgggaggagaacatcacacactggggcctgtcagggtgtaggaggctaggggagggatagcattaggagaaatacctaatgtagatgacaagttgatgagtgcagcaaaccaccatggcatctgtatacctaggtaacaaacctgcacgttctgcacatgtaccccagaacttaaaagtattattattattwtaataataataataataaaagaaatacaataaaatagaatgcagcatacagcagtgattctcaaacacattcagcatcagaattacccttgaatctttaaaatatatatacatatgagatcttagtctccaagatttgtaagtttggtattgggtccctgggcctatgttgggtttagaaacttctacagatggtttggatgtatgggacagtttaagaatcgctgaactaaaatcaaataaactgaatatcctgtgatttagagagacttatcgtttatttcactatccaagtacttgcattagagcgtggctagaagggatttgcagccttgtaaataatcagaaattcagacattttgagatgagagaactgctgaagattttattctgacttgaaataaattttctaattagaaacttccaggtgagagcaaaggcctggaacaatattcctgagccagaggaggatcgagtttgwctccaggcctaacacttactaggtctatgaccttgggtcagtaatttaaattctctgtatctcaacctctcaacagggtattggtagggattaaatgtgttagtgtctgtgaagtgcttagagcagtgcttggcatagtaaatgcttaatgaatttcagccactgtttttatttttagtactttccagctcccccaaaaagatactttttttagacttgtattaagacaataaaaagtttaatcagcatgcttcatacctaaatatgcttcactttatagcaaagtttacawgactaaaactgttttgttgtaattctctgagtctcatgtgtttattaatgattttttctgctgtttattcatctgaattctactcattcttcaagacctagctggaatcctgtttctagaaagactcttgcccataataataaacctgccctatctgagttcctaggtggtctgtacctcataatttggtaattaattgtatatgcacttatataacaaaacattattgtgtgtctttgctgtatcagattctaggctggaagttgtagataygatgtttttgtctagaaaaatgttctagaatgtcctactcaggacagtctgttgactttaaagacacatttcctaaacagacacttcatgaggcagccccagcctgtacctgtgttcctggacctgatgatcaagtttgatttaagcctcaccacttactagctctgtgattttgggcaagttacttgaattctctgtgtgtagatagaacaatgttgagggaaatccctttcccccatccttgtgtttccacaagggaacttgcttcctaataagtaacactttcaggggaatattctaggcccttctcttatccccattacttgttctttctgtgaaaagaggagaggttaatctgatggatgaaatccttaatctttcatcttctggactgtagagcctgtgaaccaaagcaatggaccacttgcactgaaattgaggctgaccctgtattttgattcttatttggcaacttatttctattctgttcccaattcaaaatcccaaggggagaaggaagataattgattaccagaagtatgtaatggtggtaggaagttgaataaatggtaactttttaaaagttgcatgagatatagtccttatcccagagaagctaagtttgcttttctttcctctcatgtattttagtattatttctacaattagattgtaaaccctttaaaagcaagaatatttctacattttcttactcctgatagcacacagtagactgctgggcacatacatagtaggtggctctgtaggtacttgctaaatgattcaacatgtttttccctcatggaaaagaaagatttcagtattgttcttatcagctaggaaggcactctgaataggaaatcagttctaggcaggtatccataaatgggttatgatttccaacttacttgccccagaggctcgctaatgttgaactcttcatgggtactttgtcttgcttcatgagctatacatgctaaggggttagcagatcatataatcttttgatctacaaaatatgatctttattgaacaaaaacttgggccaaaggcctttctcctttgccaccttcctccctcttttcattctcttttttgggaatgccctttgtgcatgttagttacagcatgtaccacattgcactgtattgttggtttttgggtctaacccacccttaacactgcagtccccaagggcagaaattcagtctcattcattttgatgtcctcagtgcctgtgctcagagaatatctattatttgaaaaaatagtgcaaaagtaaattttaggagactacatcacactcatctaaactgcaagtttgacaagttgacatccaaaagaaaggctctcctaaataacctcgccacagaaatttgggtgacctttgtagytctggagaaagcagaggcaaaaatgaaacctaaaaattatttgtgggtttttaaaaaatgttttctcatggagtaaaggtctacagctgagttcttttcatatgagggaatgacagaaacacagctggttctgactttcagcttcaactgagcgaccagagctctgctggtgaaacaggaacttgtattgtgcccctgacgtgcaccttgaaggtgtcagctcattgtccctttgttcacataaatagttttttaagaattgtttttgatcttgtgagcctctaactaaatgattaaccatgcaaagttggccatttggggtaatactgaagcacttctcttgagggctattgacaggtgggaatgtgcccacctccttgggtctctggttttcatgtcatacttgcaaatcagtgacagtttaaacttggggcaatcacttagcaagtctattgagttaccaagttaattattcccactttgcatgaagcaaccttgaaaatgattttcctaaagcaaagtacatccaaactcagtaccttcttaataacctttgctgaatgaataaatgactaattcataaaaaatgtaacatatctttaattcttacttacgggcagtttaagcctcttgtgtaagaggaggcctcggcttgagataacataggatagtaagcctcctagagaaatttctatatggaaacatggtctgctatgaagctagaartgagaggacattatatttgaccattatatttggcttcagagcttctcaacatggggcccaaagtcaaggtcccttgtttcattaagaggaggtccaggagtgcatgacacccatcagactactgagacccagctggaactaggcaccttgcacaggggccttgcctaatcaaaatagttcttattttttctgagttccaagtaactagtttcctaacccagtgtctggatagtagtgccaagtgggagtaccttcaatgaacttcctcatgaggttatttctagcctattggaatgtttcgttttaggagggtgaggaagggaagtcttgaatttttgtgcttagtttaatgttgtgatacagctttgaccatccgtttaatgggagatctgttttccagatgactatacatgtggaaaggagaagttttttgagtgttttttttaaccccttttaaagaatggtttttcatttagtstctacatttgggggtaaaaggtcctctagggagacttttcaaaagtatttgaagtttgcatctgatttcagaggtgagttggaggcctatctgtgtatgacagacacatgtctccaacaactatatgttcacaaggactaagagccatccttttgggtccatcattcaacattgatctcacattcgtgttcrtatcagtatctttacagtgcgctcccagttacatctccctaatttcccttagtaggcttcacagaatttgcagtgtatgcaatggcagatgaccacatgtggagtcatttaaccacatcttccactgcaagtcagcccgctcttgatgtctgtttatgtttagattccatcttttggaagatttcattcctctgcactatctcagtatctcagatgcttttgagamtgggtccttttcccctcctatgtttggccatggccaccccctcagggttgtgttgtgtttcacagctgctgtttgtagggttgacctttacaatgtacaaagctctttcccatatgttgacaatccctggtgtgatgctgtgagttaggcagggtgtgtatacgtgtcctcatcatattacagtggtaaggcaacagggtttttgaatttgatcacccatgaatttgtctaatttgttggtaaaaaatggtcatgtatcagccgtttcacagggtcagcttaatagaaagtgggagttaggcaggaccagaattcaggacttcagcccccggtcccagggactattctctatacccaattgtcccaccttgaatcagtttcttctagggaaatatctccaaaactgagatggcacccacaggacttcttaattgtagtcattaccaggaaaaacaagcaaaggaactggtgtaaatctctgtttttggtgattggtggagatttggagattgtcttgtgtcaaaagtaaagccactagattaaatgttttgttaataaattggttatttttaatttaattatttgacagttaatttacattattcaaaaatcaaaataaaatttaaaagaagtttacactgaaaagtcttgccccacttataccctgctcacctcagtatcccccaatacataccatctataaggtgatcatttgtattagtttcttgtgaatccttgatagtgtgttttatatagatacaggtaaatatgagtatgtactattatttcccccccaccccaccctgttttttttttgagacggagtctcgctctgtcgcccaggctggagtgcagtggcacgatctcggctcaccgcaagctccaccattttcccccatttttaaaacaaaaggtagtagccatatatacactattttacaccttgttttatcacttactaatatataccagagagctttccatcattttgtacatatgcacctatatctgtcaattattcccagaagtggaattgctgggtcagcaggaaaaatcatgtataattttgataggtattgcctaattgtcctgcacagggcttgaattgtttgtactcccacctttagtgtatgagaagacctgtttctccatagcctcatcaaacagagtgtgtgagattagatgagaaataggaggtgagcagtcttttaccccatccgtagtttgcagtgggaacactgcacagttgcaagagctggtgcaggtatcagattagttccagtggaaacgctgcctcaccatggccatgggcttgcgccagctctagtgacacacacggaatggacccacgttgccacttgcagaatttcctgtagcagaaagttgaacatgcattcattattcatctaactagccatgctggatctaaagagcacaacagtgttttttagaaccaaaaagaaaattgtttcactacaacacactgtgtataaggctttcaatgctcttttctcagctattaacattattttcaggactgagttcaagagatgtatcccaaatcacagggatgtcttgctaagcttggaactttcatactcaagggatgcttttttgaggaatgattttacacttactcaacatttgtaattaaataattagtactttataagataaatttaaactgtccaagtacaatataaacattgaactatgatgcattattgctagactttttccttaaagttgccaagtggtttcctgcattaggcaaataggggatcatataaaaatgccatgatttacggcctagataacatctccaccatttgagcagcatatattccaggtcatccccacataactccttaccattctcattagaaaggttgattcttagtcttatttttctctgaggacagcaaaaaaaaaaatccccttcagttccactgcatagaaaagtgtggtaaatggagccgggcacagtggttatttaatttaaatggacaatattttttatagaattttgacagggccactgtataggggaaagtcactcctcttcccctttatagaagagttgcacctggacagttgcattgatgactgtatccagtctacacaagaggtcattcctgggcataagaatggactgccaaaatctagctgaaacaccattgacaaatagacattttcttttgttaataatacctgtgaaggctttcataacagacatttccagttttgttctcaggctccttgcagctgctcctctaaaagtgtgctctcttccaagagctgacaatggccagaagcaaggtgttctgtcttttgtgccatcatcatctaacttgccacacacatttgggatgtcagcctaggtataggttttgtatccactcagtatggcttgtgggtctggttgcctttgttattcatgctgagggcctctgggcatcagtttggtgtgagagaacccattccatgaccctccttcctttggctgttttgactcgatggctcttgttggcacagtctgtgagtgtctgatgctctatccatgccggaccatctgttctgctgtctctgtggtctgaagtcgttttctgaactattccttgataataaatttgagatgatcttgttctacctttcttttcaagtcacatcttagccccttagccacattcccgaagaacatgacaaatggatgggtcacaagtcacgtagcatagggtgtcagaccacgaggctttgaagggattctgttgggtgctaaaaagaaagattttgtgtcaccacgattttttttaaaggcatgttgacacttaggccttaattgaaagcgttcttactcaagtagagttgacagaggagtatttggtagtcgcggttgctggtctgaagagcatgtggttctgtttcaatgcccaatgagatcttctcacgggaaaatgttctgacatctcaaacaaatgaccttcatgcatagttttgacaaaataccctattaagtatgcatatatggttggtaccttgtggtaataattcaatactggaaacagagtagcaacaaagaaacattagggttatatttaacctctgtggaattagtgtgtaaacaaactgcttatcagaaatgctcatatggggctttgtttaaataaataagaaactggcatatagggtctgcaggatatttctgccaagtagacctccctcacattataagacaccacatctatgtctgaccccatatggaaagaggcatagcaagccagcactggttcatattccctctccaccacataatgggtatgtgatcttagggaatccaccgaaactctctgggcctcagtttcctcagctataaatggtggataatcaaattatttacctcaccattaataaatgttagctattattttttatcaagtttaatacaaagagaaacattttacttatttttccagctatccagagcatcttccaaaatcctatcaccaacaaatactgtattgtatttattatagcaactatgtaaaaatggagtccctgtcctatgcttagatgaaatatgttggtatttgagtttgcatgtcttctataggaatcagtgtttagtgaaaacgggtggagataaacagatgttttcacagtcctgttgttcacagtaccgccaaattgaatgtttccatataggtgcattctaatggcttaaatgatgcagatattttctggccagccatatggatcttttgtcatctaagatgttaatattttccttatattttatagtagttctggagtacagccagtttcttgaatagggtccacatggctcattatgcacagggcctggaaactgccttactcgtgctgttgaaatgaaccgtgacacttcagaagagctgggagctggggtagagcagtggctaggagaacatattcaattatatttcctcctgcattaagctacaagtaatgakcactttcctgtgctttacagttaagtaattaaaagaaattatagagtgggatgcaaaaataacccgaaggacaactggatgtgtggagccaccagttttctccatgagtgcacaaggttaatccttgttactactcagaatgctgagtttctacagaaagggttgcaggtccacacatgttttggcgtctacccacacgcttctgtatggcatgactgtgcatcccagaagaagggctgtgctgtgtacctccacgtttcagtggaatttaacaaactgatccctgaaaatggtttcataaaggtgagtaacagagagctaatagccttctcttgctaattttatctttcccccaagatttcttgataatagtttgaaaaggagtgttattctttggtctctagaggcaacttacctttccagtttcttccatcacctgttttcacctctcttgtttttttaaatttaatgctctatgtatttcagaggataggatctaatctagtgcggtcccttcatcaggtgagaattattcatctcattttcattttagcccttctgaattaatgacattgaagcccggcagtttggtcctaagatgggtttaattatgtacagatactctttctataatggaaattgctcagataactaattaaccacaagaatacactgtctatggaaaatttcaggagcaccgtctgtggaaaaactgggaagggcatgctgtcaccacagctctggggtctattaaaagtgtggttatgcagcactggtgtctagtggggtgttggctctcaactgccagaattcccatagcatttcatggcagaaagtcaaggtgtccagcaatactctgaaagtgacctgttgattaaagtcgtcaattctgaagaaagagactgaaataagacaaatgggtcttaactttttttctctttctctcttttgtaaaaatgtgtgattgttctggcatgttcccaatccccacataatgccaacatcttttcttaaagggggattccctttatccttggatctgagaattattgcatgttctccctttagggacaatgaatgcagttgcatcacccttgcttttttttttttttttgtacacagcatgcttattcttggatgcagggacttgaaagacaaagccccacctggctttcacaacatctcctattagtaggtgtgccttgtgtgtaatttgaaggaggcggtcccttagctgtgtttacactgtacttttaaatgtggggctgaaggtagaatcaaccatacttaagatgccacctgggaaaatagggttctgtgtcatctcagccccacccatttgcaaatgacttaacagcagcactattagggttcctagtgtgagtcatttgcatttggactggtgaacttggtgacttcttggtgtttggaaacaaacaacctttgcagtctttcgtaaaaagcctgaacagtggaccagtctccagttctacttgcaaagctgcccccatcaaatccctcataatgttcaacttaaaaaatgttacacttttctctggaaatctaaccttttttccttttttaaaagccattttaagtacttcagtcttgaatcaaatgatcccaaatattggacaccaacctagaaattgggttacctcctgggaastttatcgaagaagagagattttggttggagagggggttttgatgtttgatacttatatttactattttaatatttcattgttgttgttgctgctgctgctgtattattttgcgagtttcgtttgtttaaatttcatggtatttggtaggagagagctggatctgttggtttcaggacaagtctagaaataagaaatctgccttgagtgagtgagttggttccctctgttgctatttcaccattaaggacsaaaggaactcacaaggaccagagacatctggctgaaagcaatactagtgtgactggacatctactacctgccatagttggtcatatcgtttccagtatgattctgattgagtgagtgatattaggctatgttcagggatcagggaggctaattatgcttatattgccttgtagcattttggtaagaattaatgattgtgtagatgtccagatttaggtcagcaatattctaaaagttctcattgaactaatcatgtttataagtagcctgtactttctatcataataacaatagtggaaaagctagttgacataaaaggagcccagattttacttaagtaaaaacacaaaagcaaagatattttcccacataaattacaaaagcaaagatattttcccacataaatgtccccataaaacaagttgaaccaaagaggaaagatgacaggtaaccgtatgacacgctaagaaagtatcataatacttaagttaacttcaaccttttatttccttatcctaagcagcctcttttctctttatcatttagtcctgtgcttctcaactttgataagtaaaaaagttattgcactaaataaatcttattgaaatgcaggatctgattgagtgggtggggtaggtggaatgagggtggggaagttgagattctgcatttcttagaagtttctactttatgttaaaatggctaatccatctcaacattgagaagtaaggtttcacttaatttcagcctgtgtaagtttatcccatatgtacatttcctaaaactctaatctcaggccccaggaatttctcctttagttaaaatatttttaggaataaatttgaattgcattaatacacaatttataaatttaacacaaaaaattatttgaagtttgagactttaggttgcatgaaatcaatttcatacttgaaaattttctataaattcaaaagtctgtgtatttaaatacaatttaaatacctgtgttacagtgacatttgtttttctgtctctctctccaccatttccagagtcatcatccctgtacagaaaaatttttcccacatgatttcaccataaattcattaaatatgatgcttacttgataatttctccaggttctttttttttttaattatactttaagttctagggtacatgtgcacaacctgcaggtttgttacatatgtatacatgtgccatgttggtgtgctgcacccattaactcgtcatttacattaggtatatctcctaatgctatccctcccccctacccctactccatgacaggtcccagtgtgtgatgttccccaccctgtgtccaagtgttctcattgttcagttcccacctatgagtgagaacatgcggtgtttggttttctgtccttgcgatagtttgctcagaatgatgtccttgctcactgatggacatttggttggctccaagtatttgctattgtaaatagtgccgcaataaacatacgtgtgcatgtgtctttatagtagcatgatttataatcctctgggtatatacccagtaatgggatggctggctcaaatggtatttctagttctagatcctagaggaatcgccacactgtcttccacaatgtttgaactagtttacagtcccatcaacagtgtaaaagtgttcctatttctctacatcctttccagcacctgttgtttccggactttaatgatcgccattctaactggtgtgagatggtatctcattgtggttttgatttgcatttctctgatggccagtgatgatgagcattttttcatgtgtcttttggctacataaatgtcttcttttgagaagtgtctgttcatatccttcacccactttttgatggggtcatttgattttttcttgtaaatttgtttaagttcttttagattctggatattagccctttgtcagatgggtagattgtaaaaattttctcccattccgtaggtttcctattcactctgatggtagtttcttttgctgtgcagaagctctttagtttaattagatcccatttgtcaattttggcttttgttgccattgcttttggtgttttagtcatgaagtccttgtccatgcctatgtcctgaatggtattgcctaggttttcttctagggtttttatggttttaggtctaacgtgtaagtctttaattcatcttgaattaatttttgtataaggtgtaaagaagggatccagtttcagctttctacatatggctagccagttttcccagcaccatttattaaatagagaatcctttccccatttcttgtttttgtcaggtttgtcaaagatcagatggttgtagatgtgtggtattgtttctgagggctctgttctgttccattggtctatatctctgttttggtaccagtaccatgctgttttggttactgtagccttgtaatatagtttgaagtcaggtagcgtgatgcctccagctttgttcttttggtttaggattgtcttggcgatgcgggctcttttttggttccatatgaactttaaagtagtttttttccaattctgtggagaaagtcattggtagcttgatggggatggcattgaatctataaattaccttgggtagtatggccattttcatgatattgattcttcctacccatgagaatggaatgttcttccatttgtttgcgtcctcttttatttccttgagcagtggtttgtagttctccttgaagaggtcttccacatcccttgtaagttggattcctaagtattttattctctttgaaacaattgtgaatgggagttcactcatgatttggctctctgtttgtctgttattggtgtataggaatgcttgtgatttttgcacattgattttgtatcctgagactttgctgaagttgcttatcrgcttaaggagattttgggctgagatgatggggttttctaaatatacaatcatgtcatctgcaaacagagacaatttgacttcctctcttcctatttgaatatcctttatttctttctattgcctgattgccctggctagaacgtccaatactatgttgaataggagtggtgacagaggacatccttgttttgtgccagttttcaaagggaatgcttccagcttttgcccattcagtatgacattggctgtgggtttgtcgtgaatagctcttattattttgagatatgtcccatcaatacctagtttatttagagtttttagcacaaaggctgttgaattttgtcaaaggccttttctgcatctattgagataatcatggtttttgtctttgattctgtttatatgatggattatatttattgatttgcatatgttgaaccagccttgcatcccagggatgaagccaacttgatcatggtggataagctttttgatgttctgctggattcggtttgccagtattttactgaggatttttccatcgatcttcatcagggatattggcctgaaattctctttttttgttgtgtctctgtcaggctgtggtatcaggatgatgctggcctcataaaatgagttagggaggattccctctttttctattgattagaatagtttcagaatrgtaccagctcctccttatacctctggtagaattcagctgtgaatccatctggtcctgatggatttttttggttggtaggctattaattattgcctcaatttcagagcctgttattggtctattaagagattcaacttcttcctggtttagtcctgggagggtgtgtgtgtccaggaatttataaatttcttttaggttttctagtttatttgcatagaagtgtttatagtgttctctgatggtagtttgtatttctgtgggattggtggtgatatcccctttatcaccttttattgcatctatttgattcttttctcttttcttctttattagtcttgctagtgatctatcaattttgttgatctttttaaaaaaccagctcctgggttcattgattttttgaaggagtttttctgtctctatctccttcagttctactctgatcttagttatttcttgtcttctgctagcttttgaatgtgtttgctcttgcttctctaaattgtgatgttagggtgtcaattttagatctttcctgctttctcttgtgggcatttagtgctataaatttccctctacacactgctttaaatgtgtcccagagattctggtatgttgtgtctttgttctcattggtttcaaagaacatctttatttctgccttcacttcgttaagtacccagtagtcactcaggagcaggttgctcagtttccatgtagttgagtggttctgagtgagtttcttaatcctgagttctagtttgaaagcactgtagtctgagaggcagtttgttataatttctgttcttttacatttgctgaggagtgctttacttccaactatgtagtcaatttttggaataagtgtgatgtggtgccgagaagaatgtatattctgttgatttggagtggagagttctgtagatgtctattaggtccgcttggtgcagagctgagttcaatttctggatatctttgttaattttctgtcttgttgatctgtctaatattgaccgtggggtgataaagtctcccattattattgtgtgggagtctaagtctctttgtaggtctctaaggacttgctttgtgaatctggtgctcctgtattaggtgcatatatttttaggatagttagctcttcttgttgaattgatccctttatcattatgtaatggccttctttgtctcttttgatctttgttggtttaaagtctgttttatcagagactaggattgcaactcctgcttttttttgctttccatttccttggtagatcttcctccatccctttattttgagcctatgtgcgtctctgcacatgagatgggtctgctgaatacagcacactgatgggtcttgactctttatccaatttgccagtccatgtcttttaactggagcatttagcccatttacatttaaggttaatattgttatgtgtgaatttgatcctgtcattatgatgttagctggttattttgctcgttagttgatgcagtttcttcctagcctcaatgatctttacaatttggcatgtttttgcagtggctggtactggttgttcctttccatgtttagtgcttccttcaggagctcttgtaaggcaggcctggtggtgacaaaatctctcagcatttgcttgtctgtaaaggattttatttctccttcacttatgaagcttagtttggctggatatgaaattctgggttgaaaattcttttctttaagaatgttgaatattggcccccactctcttctggcttgtagagtttctgccgaaagatgctgttagtctgatggacttccctttgtgggtaacctgccctttctctctcgctgcacttaatgttttttccttcatttcaactttggtgaatctgacaattatgtgtctttgagttactcttcttgaggagtatctttgcrgcattctctgtatttcctgaatttgaatgctggcctgcctcactagattggggaagttctcctggataatatcctgcagagcgttttccaacttggttccattctccccatcactttcaggtacaccaatcagatgtagatttggtcttttcacatagtcccatatttcttggaggctttgtacatttctttttactcttttttctctaaacttctcttcttgcttcatttcattcatttgatcttcaatccctttcttccacttgattgaatcagctactgaagcttgtgcatgtgtcacatagttctcgtgccatggttttcagctccatcaggtcatttaaggtcttctctatgctgttttttctagttagccattcgtctaatgttttttcaaggtttttagcttctttgctaaaaggttcaaacatcctcctttagctcggaggagtttgttattactgatcatctgaagccttcttctctcaacttgtgaaagtcattctctgtccagctttgttccattgctggcgaggagctgcattcctttggaggagaagacgtgctctgatttttagaattttcagcttctctgctctggtttctccccatcttattggttttatctacctttggtctttgatgatggtgacgtacagatggggttttggtgtggatgttctttctctttgttagttttccttctaacagtcaggaccctcagctgcaggtctgttggagtttgctggaggtccactccagaccctgtttgcttgggtatcaccagcagaggctgcagaacagcaaatattgcagaacggcaaatgttgctccctgattgttcctctggaagcttcgtctcagaggggcacctggccgtatgaggtgtcagtcggcccctactgggaggtgcctcccagttaggctactcaggggtcaggaacccacttgaagaggcagactgtccattctcagatatcatattccatgctgggaggacccctactcttttcaaagctgtcagacagggacatttaagtctgcagaagtttctgctgtcttttgttcagctgtgccctgcccctagaggtggagtctacagaggcaggcaggcctccttgagctgcggtgggctccacccatttcgagcttcctggctgctttgtttacctactcaagtctcagcaatggtggacacccctcccccagcctcgctgctgctttgcagttcgatctcagactgctgtgctagcagtgagccaggctccgtgggcatgggaccctccgagccargcctgggacataatctcctggtgtgccgtttgctaagaccattggaaaagcacagtattagggtggggagtgtcctgattttccaggtaccgtcagtcatggcttcccttggctaggaaagggaattccccaaccccttgtgcttcctgggtgaggtgatgccccaccctgctttggctcatgctccgtgggttgtacccactgtctgacaagccccagtgagatgaacccggtacctcagttggaaatgcagaaatcacccgtcttctgcrtcactcacgctgggggctgtagactggagctgttcmtatttggccatcttggaacctccctttccaagttctttattacagagtgggtcactgaaacttcatggaacaaattggaaattatcttcttaattaatgtcactgtctaccatgtatgggaatttggtaaatattatatggtttcaataacatagtagatagaacattgtcaaatctaaacttcagtgaattgtaacagatcccacctgaaattctaaagaaaacagaattctaattgaagaggttaaacttttacagggaatgtcaactgccatttgggtcctgtaaacaaaaaactgttttttaaaaaagtaaactttaaaagtattttcagatgacctcatttgctatccaagtggcttgagtatgcttgatgctaagacttctttgttacagactggagatgtgtgctactggggcagtgttgctctgtgacaaggaggcagaggatgagggcaaggttcgatgtgactgtgaattctgggtggctctggctatcgggagccttcattgattacagcaaaacagttgctttcctagggcaatagtgtctctgtcacccaggctggagttcagtggcatgatcaatcgctcactgtagcctcaacttcttagactcaagtaatcctcccacctcagcctcccaagtagctgaaactacaggtgtgcacaaccacacctaatttttttaatttttaagtttttgtagagacatggtctcactgtgttgcccaggttgatctcgaattcctgggctctagtgatcctcccgcctcggcctcccaaagtgttgggattacaaatgtgagccactgcacctggccctttgcaaccttcttgacaatgcattcctttattccctaactggaagtaacttctttctctttataaaattgtatctgtaccttttctgggtcatttctacctttatattctagttacgtatgtcctacctccctcctagggagggaggtaagtaagactggaaagtagacttcatgtgtgatgaatgaatgaacaaaaggaagtctaacatatggatatagtcaactggatgcaaattaaaaatttttaaatattgatttgcaagatttcattaaggtcaactcttaatagtttgtatcatatatgttaggaaccaaatattaataacttcttcagcattaccattatctttataggactgtctaaaatgagcagccatatctttaaactgtgttttctctgattacacgctcacaggtaaaacccaaaggggctgggaacaaacaagacttttttttttttctgtatgcctgaattatctgtactgttgcttgttttcccacctttggccatagaaacttagttctaacatgctacaatttttgcagttctttctcttagaaaaagaccacattgtctgaaatttcatccatttaagtaatcaagccttaaagttgaaggatcttggtcatgattaatctagacctacaaagtagtatcttaatggcactccttttagaaagttaggttccaggacacacatagctgcagtgtccacattttgtaagctccttcgttgtcacagccactctcttctctgtggctgatattctaaaactggcaacacatcctgatggtaaaagcttggttcaggagacaggtgacctactagctttatggcatttgacaggttacctaacctctctgacgcataattgcctcatctatataatggggataataatacccatcctgtctccttgtaaaaatcaaattagatgacgcctgtgaatgttctatagtctcttagacaaatgtaagttatgactacagcaagagtaaaagagcatgttgttatggacattctttcagtgaaatgtctaagacttgtgagtcacacttaaagctaaacttgatatctacttcattgattttctttttagttctatgtactatattgaatttcctgacagtggggctatgaaagccttcctagcattttatagatgtggttgaattaatggctgtaagccttaaagcagaattagacagcatcaatgaatttattaagtataaataaatatataatctgcttagcaatattacacagcctctttatcttatgtgtgataaagagtcatccgaaggttgaaaatgaagaattgtcctggaagctcttacttaatcttttattatttcctaatacagtatataaaattactcattgaaagcttagcagaataagaaacaagaagttaaaaggctgaaaactacaaattttgctattattattgttattacttcccaagtctcttattgatctgttagaaatagagctacacaggaaattgtaggacagttagtaygtggtagtgttatctgctttttaattattcaagtaaggttttattccattagaggaactcaagaagttggtcatggctgataattgctatctgtcaaattccttagagcagggatccgcaacacccaggccatggattgttaccagtccctggcctgttaggaaccaggctgcacagtaggaagtgagcggcgggtgagcaaacattgccatctgagctctgtctcctttcagatcagcagcagcattagattctcatagaagcatgagccctgttgtgaactgcacatgcaagggatctaggttgtgtgctccttatgagaatccaattccttatgataatttaactgatgatctaaggtggaaccatttcatcccaaaaccatccaccctgctactcccagaccgtggaaaaattgtcttccacaaaactggttcctgctgccaaaaaggttgggaccactgccttagagtttataatttggggttagcacagcctatatttacctgagaatttcaatgggttcactgatctttccaaatgaaaaggcttcttacgaaaattatatccaaactgtcttttctcttagtttaataaacctatcagtaagtttttactgagtactgctattacatttttctctgttaagcattatgggggctcagacatgatccattccctcaaagaacttacctttcagctgaagactgactagaatgagcaaatacggttaacaattaacaagtgagtaggccagctcggccaacatggtgaaaccmtgtctctactaaaaatacaaaaattagccgggcatggtggtgggcgcctgtaatcccagctacctcctgctgaggcaggagaattgcttgaacccaggaggtggagattgcagtgagccragattgcaccattgcactccagcctgggcgacagagcaagactctgtcttgggaaaaaaacaaaacaaaacaagtgagaagggaatcaagtactacgtaagatgtaatgtggaattttagggaaggaaggcagtgtatgctggagtaattagagaaaggggcatgcatgatttgatgcttgaactggatcatgaaggataagcaagattttggcagcaagtgagagggagagaggagtttgtcagaggaatggaacaagtcaggaggcagtaatgtgtacggcactccaaggactctgtcctgatcggagcagaagtgatgaagcattgagtagtttgagaaagttagctaagaagggtgagggcagatgttggagagagttgagtatcagagagaagacattagatttgagcagatagaacaaaaatgccattgccagtttttgtgtaagagaatagtattagggtggttacccaggaagtggtcatcagagttgaatggagcagaaagagtgtctgatacagcatcgggacgttgtggtcacaaaatgaggtggtgagggctgagccaagatggtggcagtgggatggataaaaagggatggccaggacaaatattttaaaggaaaaattaacaggacatctttactgactggattggaaggctatgcaggaaatatattgtcaaacttgattccaggatttctatcctatgcctgggttgcccaaaatatcagggaaccattgttagaaaaggtaggagataccactgttccaacaaaaagtattgagtttggtgttgcacccacttaacttcaaggccttacaagtgagtagacagttagttagaattgcagaagtgccactcagagagcagggcttgcaatgtggggttggactttgtcaccattgtgttaattcctaattctatgcagatgctcagcttgaggaatacccatgtttgggcttcagaatgaaagccaagtaatatttactcagatgccaattttccctctgaaatatttgctcatggaactgagagaacaatatataaagcattaattatttttctcataaagttattaataaaaagataagatcagtgaaaggcagagtaaactagaagccaagtatagaaaatggtatcattcaaagactcattactgtagtggtgaaaacaaaacaattttccaacagcttaagatgcctcagtattttggaccatttttaagtagttagtgtgggcacttagtaaatatgtattaaactatagttcattaattcttttttttttttttttgagatggagtttcactctggtcacccaggctgcatttttgctttcttagtgatatataaaatgtcgagtttcacaatgatggtatcttagatttgattaaatatggtattaaaaaatagctgatcacagaaagtctctaccagtgtgatgtagatggctaaagtattccacatttgcaaacttttattgacctaaataagaggtgccccttgggttgtttttatttggactgggaatattaggagaaagctttttcattcagtgtgtaagtacaatctaccagaaatagaaacccccatggacgatctatttctttgatggtacaggactcagaacattcacaaagatttagttgttagcggaatagacatctgtattttattcaaaccaattttcccttcctaatctgagaacattgtgcaatctaagcagttctaagcatgtttgctattcgtgcaaagtgagagtaaatctaaaagaaatttttttgtgtgtttagggatggtaataaagtctcttagtggttgaaaatgttatttcttacaaaagtggagaacatttgcttttcaataccagagttttcagccatttctgcattctgacctattgactggaggtaggttgcctttgaattcagtaaaacttcatgggcagaaacacagttccttttcctacttatttggatatcatgatggccattgcatgtatgtgtctttttgtaagtccatgcctcagaactgagaagtaggaataaaattagggtcagggctggggatgctactctttgctgctgagaaacacaatgcttcaggtaagtgattctgaagtccttcaccacctgacggtaaccttgggttggtccataggtatgttttcattttgcttgttcatccattttaattggcttcctagagcatgcttgtagatgtaragccaaatttagagtagagcaaccctctggcaaacaggaagagattaattttgtggtatgcttttaagggacttcccaggaaacttcaaaagcagaaaaagaagcactagctgcctattccaaaatgtgtaaaacaccactcagctttttaaaagtaggataaactcagagcgcgcgcacacgcgcgcgcrcamacacacacacacacacacavagagracatctctagtaaaaagaaaagttgagctttcttagctagatgtgtgtattagccagaaaaagccaaggagtgaagggttttagagaactggaggagataaagtggagtctgcatatgggaggcatttgaaatggacttaaatgtctttttaatgctgactttttcagttttctccttaccagacacattgttttcatgacattagccccaggcatagacacatcattaaaatgaacatgtcaaaaaatgatttctgtttagaaataagcaaaacattttcagttgtgaccacccaggtgtagaataaagaacagtggaattgggagccctgagttctaacataaactttcttcatgacataaggcaagtcttctatggcctttggtttccttacctgtaaaacaggatggctcaatgaaattatcwttcttctttgctataatagagtatctctgtgggaagaggraaaaaaaagtcaatttaaaggctccttatagttccccaactgctgttttattgtgctattcatgcctagacatcacatagctagaaaggcccatcagacccctcaggccactgctgttcctgtcacacattcctgcaaaggaccatgttgctaacttgaaaaaaattactattaattacacttgcagttgttgcttagtaacatttatgattttgtgtttctcgtgacagcatgagcagagatcattaaaaattaaacttacaaagctgctaaagtgggaagaaggagaacttgaagccacaatttttgcacttgcttagaagccatctaatctcaggtttatatgctagatcttgggggaaacactgcatgtctctggtttatattaaaccacatacagcacactactgacactgatttgtgtctggtgcagctggagtttatcaccaagacataaaaaaaccttgaccctgcagaatggcctggaattacaatcagatgggccacatggcatcccggtgaaagaaagccctaaccagttttctgtcttgtttctgctttctccctacagttccaccaggtgagaagagtgatgaccatccttttccttactatggttatttcatactttggttgcatgaaggctgcccccatgaaagaagcaaacatccgaggacaaggtggcttggcctacccaggtgtgcggacccatgggactctggagagcgtgaatgggcccaaggcaggttcaagaggcttgacatcattggctgacactttcgaacacrtgatagaagagctgttggatgaggaccanaaagttcggcccaatgaagaaaacaataaggacgcagacttgtacacgtccagggtgatgctcagtagtcaagtgcctttggagcctcctcttctctttctgctggaggaatacaaaaattacctagatgctgcaaacatgtccatgabggtccbgcgccactctgaccctgcccgccgaggggagctgagcgtgtgtgacagtattagtgagtgggtaacggcrgcagacaaaaagactgcagtggacatgtcgggcgggacggtcacagtccttgaaaaggtccctgtatcaaaaggccaactgaagcaatacttctacgagaccaagtgcaatcccatgggttacacaaaagaaggctgcaggggcatagacaaaaggcattggaactcccagtgccgaactacccagtcgtacgtgcgggcccttaccatggatagcaaaaagagaattggctggcgattcataaggatagacacttcttgtgtatgtacattgaccattaaaaggggaagatagtggatttatgttgtatagattagattatattgagacaaaaattatctatttgtatatatacataacagggtaaattattcagttaagaaaaaaataattttatgaactgcatgtataaatgaagtttatacagtacagtggttctacaatctatttattggacatgtccatgaccagaagggaaacagtcatttgcgcacaacttaaaaagtctgcattacattccttgataatgttgtggtttgttgccgttgccaagaactgaaaacataaaaagttaaaaaaaataatamattgcatgctgctttaattgtgaattgataataaactgtcctctttcagaaaacagaaaaamacacacacacacacaacaaaaatttgaaccaaaacattccgtttacattttagacagtaagtatcttcgttcttgttagtactatatctgttttactgcttttaacttctgatagcgttggaattaaaacaatgtcaaggtgctgttgtcattgctttactggcttaggggatgggggatggggggtatatttttgtttgttttgtgtttttttttcgtttgtttgttttgttttttagttcccacagggagtagagatggggaaagaattcctacaatatatattctggctgataaaagatacatttgtatgttgtgaagatgtttgcaatatcgatcagatgactagaaagtgaataaaaattaaggcaactgaacaaaaaaatgctcacactccacatcccgtgatgcacctcccaggccccgctcattctttgggcgttggtcagagtaagctgcttttgacggaaggacctatgtttgctcagaacacattctttccccccctccccctctggtctcctctttgttttgttttaaggaagaaaaatcagttgcgcgttctgaaatattttaccactgctgtgaacaagtgaacacattgtgtcacatcatgacactcgtataagcatggagaacagtgatttttttttagaacagaaaacaacaaaaaataaccccaaaatgaagattattttttatgaggagtgaacatttgggtaaatcatggctaagcttaaaaaaaactcatggtgaggcttaacaatgtcttgtaagcaaaaggtagagccctgtatcaacccagaaacacctagatcagaacaggaatccacattgccagtgacatgagactgaacagccaaatggaggctatgtggagttggcattgcatttaccggcagtgcgggaggaatttctgagtggccatcccaaggtctaggtggaggtggggcatggtatttgagacattccaaaacgaaggcctctgaaggacccttcagaggtggctctggaatgacatgtgtcaagctgcttggacctcgtgctttaagtgcctacattatctaactgtgctcaagaggttctcgactggaggaccacactcaagccgacttatgcccaccatcccacctctggataattttgcataaaattggattagcctggagcaggttgggagccaaatgtggcatttgtgatcatgagattgatgcaatgagatagaagatgtttgctacctgaacacttattgctttgaaactagacttgaggaaaccagggtttatcttttgagaacttttggtaagggaaaagggaacaggaaaagaaaccccaaactcaggccgaatgatcaaggggacccataggaaatcttgtccagagacaagacttcgggaaggtgtctggacattcagaacaccaagacttgaaggtgccttgctcaatggaagaggccaggacagagctgacaaaattttgctccccagtgaaggccacagcaaccttctgcccatcctgtctgttcatggagagggtccctgcctcacctctgccattttgggttaggagaagtcaagttgggagcctgaaatagtggttcttggaaaaatggatccccagtgaaaactagagctctaagcccattcagcccatttcacacctgaaaatgttagtgatcaccacttggaccagcatccttaagtatcagaaagccccaagcaattgctgcatcttagtagggtgagggataagcaaaagaggatgttcaccataacccaggaatgaagataccatcagcaaagaatttcaatttgttcagtctttcatttagagctagtctttcacagtaccatctgaatacctctttgaaagaaggaagactttacgtagtgtagatttgttttgtgttgtttgaaaatattatctttgtaattatttttaatatgtaaggaatgcttggaatatctgctatatgtcaactttatgcagcttccttttgagggacaaatttaaaacaaacaaccccccatcacaaacttaaaggattgcaagggccagatctgttaagtggtttcataggagacacatccagcaattgtgtggtcagtggctcttttacccaataagatacatcacagtcacatgcttgatggtttatgttgacctaagatttattttgttaaaatctctctctgttgtgttcgttcttgttctgttttgttttgttttttaaagtcttgctgtggtctctttgtggcagaagtgtttcatgcatggcagcaggcctgttgcttttttatggcgattcccattgaaaatgtaagtaaatgtctgtggccttgttctctctatggtaaagatattattcaccatgtaaaacaaaaaacaatatttattgtattttagtatatttatataattatgttattgaaaaaaattggcattaaaacttaaccgcatcagaagcctattgtaaatacaagttctatttaagtgtactaattaacatataatatatgttttaaatatagaatttttaatgtttttaaatatattttcaaagtacataaaatctgggggttctgggtttttttctctttactgtaaaacaaacatgaaaacgtgttttattataaatacgtgtgttccttgctttaagactaatctgactagttttagtaattaaacagccctccagagaggatacttatttgaaagcctgggaggccaatcctgcagtctgtgagcttctgagaagttgtaggattggatctgtcttccatggtggaagatgggagtgtcattttctcggacacttgaaagttttacccctttgaagtgatatactttcatcagataccaaaccatgtatcctagcaacatcaggatccacgaatcacggctggctggctggctctatttgactataaaataactgttaaaaaaaatcaaagtaggtttacttagggataatgagaataaattggcccaaatttagaaagtcaagtactggggaaaaaagtaaaaaaagaaattcaatatttggagacaggtcacatatcctcggtttggaagtggtgccatttgcagtatgtatttgtatccatagcactgatttaatttttgtacgtggagcacacagattttatatcatagtacccacaatctaacagattgctaggatttctaaaaggatttgcctccgtgatggctgccaagccgctgggtaatttagttaaagtgtttaaagttatcactaaatcttagggaaataaatggaaggattttaaatcagagaaagggccattaaggaaaaaaagcatctgttcttactcttcagcctccccatttgaacactgacaacccatcccataacgtggtgaactatatctgtgcaatgtatcatttctatttctaaacatacacacatggtttcctcttgtattgtcttataaataaggatcaggaaagtcataacaaacattgacttgtgttgtgtatatggaaaaacagatcgaatgagatgaattactctatcctaatctgtccagtgaacttgaaaagtactctaagagaagcccttgactgccagtcatgacagcccagccatggacttagaactttgataaacttcaggcttgaccaattttcatagtcagaggactaaaatattttttaaatggttgagtaaaaaaagtaaaaattaaacatgacatccaaattacttgaagttaaacgagtttggtaaacatgactgaaagttttcattagaagatgaggttggagaaaaaaacaaaatagagacatctactaaattatcctacttggagttaataggagtaaccaatgtgtactgcattcattgagtaagcagttaaacttgtttaattactaagatgccaggaaataactcagatcattgctttgatctgttgtttttcaccatactgataagcctctgtggtcattagctgtgtctatgaaatctttttatgagctgtactaattcagtgaataataagacagttcgaaatgagaatctgaactaagtcttagaatgggtcagtgttaaattgttcctcattcatttaagtgacttctagatctggataaaatgtcaaacactttttgaactgcaacaaatggcttcaggcattgcctcagttcagccagcactcccaatagtgttaaggtttaaggttattgtaaaacatacttgtctccatcatgttctaacatcaagcctggtctacaagttaaagtagaaatggctgcatattttgataagccattgttaaataaagactgttaattgggataagaaacaatatacgtgtacataaatttaggaagatgaagcatttagcttgcaaaaagccattcacagatttgatccaacctcagaatgttgaccagcaaaattagtattttatggaacataggccatccttttagctgtgggtttttaaactgtggttttaaaggttggttggctgcttggtttggtgacaagcgggggtaatggttgggaatctgacttttgttggttacattgaactaactggtggttggtgaactccccacctaatagctaaacttagcaactagagtaggtgaagccactccaaaccagcccatgtttatggacattccttctaataaacacactgcctgcatgtctatccccaatcttgtgagtatgatcatccattctctcaattctggccaccatttgaattatttgtagggaaaaaaaagcaaactccttgctttttaatatgtgattatttgcagtaaattacttgaagactatgtttaaatattaacagaaaaagcactgtgatcttacacattatcataattgagaagacccatttctgtggcactctgtaggatttccataggcctttacctcacccccacaccctaattatttacaaggcacagaccaccagattaggagctccccagcctggcatttgcttttctaacaacaatcctgtgtgcttggtaatgtcagtagcatggaattgtaaaaagcaggccttccaattaaacctcaccacacaaacaataaacaagacctttgcatttaagtgtgagctgctattttatatctggaaaaacaaaagtcctttcctttagaaaaataagcttatctgtcctgaaaaaagcctcacacataatgttgtagttaatgacaggacttgtctcaagcctgtaaatgaccaaaaagtgttagttgaaatcctgagcttgaggtgtatgttctacatttagaaaggacataaagatgcttctgcagctctgcactttggtactgtactctatttcaaatggttccttagaaaccaggggctggtctgcatagaatggctgaacccaggggaaatatttttgtctggcttaagtgctcacaatttgaaaaaatccatgtcaagtactgcagtacacatttaaatttatttagtgaagctgcattctccattgagccctaacatttaaaaaatagttgctcaactgggatttggtgcatatcaggaaggaaagaggaaaaagacataaaatagaaaccttacccagcagagacctgctccaacagataccaagcagtgtttacttggagataacagtacccatactctcctccagttagactcatggaatgatctcaaagtgtgttctgcaaccagcatctgcatctctgggaactttttacaaatgcagactctcagttcccatcctagacttactaaataagaagctctgggggtagagtacaacagtctgagttttaacaacccctctaggtgattctgtgcccactcaaatttgaggatcattggactaaggggattaaacagcctttcacatgttctagataataggaagatagcacaacccaagaatttgaaactgtagatctgatcccaatcatgtcactacctatttgcttggccctgaaaacatcaaactatctatgtttgcatttcctaaacaacacaaaagtgatgggtgctcgcaggtggagcaaggcttagtgttgtaagagaagagtgcactgatggtttgaaagtgagcatgcaaatgtgagccaggaaagctcagtgcccttcatagtcaacaatttttttttctttcaaagcaacagcagtagtggattcaggacccagagcacgtagtcgtttgtaacacatttggaacgactgtgagaaatgagaagcaacatgcagcaaattaataaggaaaagattattccatctggggagctggtctctgcacatgccaacacagcccattctctgtgaaatagcgttttataggtcacaaattaaatcagcatcctgaattaatcagctattaacatccagctgaggaaatctaggttcacacctctagaatgaccagactataaatacaaagggcttcctcagactttgtggcaaagcttttctatattgtaggaactggtttctggaaatgaggacctgaacatagctattcccatctctgtgtgtatgtgtatgtgtgtgtgcacactcctgcacattttacaaggcaaattgcattagaagatttttctatttctaggatggaggggagggtgtccaaatgtattacccatccattaggcaatacagaagcctgaattctaacaagcctaccttgggagccaggtatcttggtagttcaatcatcaggttggccaaccctttccggtatctgaacctccatgccctcaactgtcagaggaagaggctgaacttgggggatctcccaagaggatggtcttggaggtaaatttcagttttaatattacaatttcattcttcctacttcattatttgccataaaaagagattaaagaggtttctgaagcacttaaaggctgggaagcattctgagataattcactgtgcatctcctgcctccctccatagctggtgtccttatatcatggtacttgccacaagattaaaagcaggaggcaccttgggttagtgtggcggttggggaggatgtgaccaaaggaaggtttctacttcatatgcaactataaaaatattaccaactgtctgacaagcaggcagaaaataccttggggaaggtgcccatatattcctcaagatgcaaattttctaccagggtctaaccttactttcaaagccaggcaatgtatttacctttgttttatgtcactcattcttactgtattacatggtgcctggcaaggagagattccttgtgttttgccaagttgcagggtcaggaaactctgcatgaaactgctggattagcatcctgtagagtcactgttaacagagctctttgaatgaaatgggtttgcatctctgttctttggggctttataaattcaccaaggatgtacggttcccaatctgtttcaccaccacctcccgagtactctggatagttcctcctcctgagaggatggccttgagaacaaaagtatctcataacaaatcacagcaacaccacattcagcagcagatttcctcagagaaacagcagatatttcagaatggtaaagaggtcattctgagtggagctttggctagcttaggagacaaacctcactggcatgccagtgtttgaaactcctcatttcagcaatccaactttggtttattcctggccctgagtcctttgtgcctgaatctctgagaaatctatgtttttgttcaatccacctctgctcccacttcatgccctgctttccttcctgatgacctcagagctctgcttcctctgggatccaacatctcaccactcagggggcacataatatagtaaagagtggagtctgaatcccaactctgctacaagagctgtgtgactgtaggcaagtcacttaacttctctgtgcctcagttcctcacctgcaaaggacaggtaaaaatattcccacttacctcatgggattttgtgacaattaaatgaggtaatacatataaagcacttaggaaagttacagacccatgagaaagcctcagaaaatgtttacaaactcttggaagtcactctgctgactggtaataagctgggctcatctagtacacacttcagagactcttttctcatattcagactcctggaagagatcccatctcatctgtgccattagcatccagggtcactttgtcttttctggaagactcagagagataactcttgtttacccactagcaataatactgcttggcagttaaactgtggccactacatacactcaagcaaatggaagagatatactacaataaagggtgtttttctagactgtacattccaaatgaagcccattattcctaagtgtctatcccagctgaatggcaatgactgaagccagggtgaaatggatgaactcacatagtctgaaagaaacaaggggccacagtcacatttctaaaaatagacatggcacatcaggaaaatcctacctcaacttctgccccatgtccttgacatacatttaacccattgcacaattatagtgactagtacttactataagcaggcagtgttcaaggcatcttatgcagattttctc

SEQ ID NO: 5675 - DNA, 36110 bp, Homo sapiens
  misc_feature (1)...(36110): n = A,T,C or G, or insertion/deletion polymorphism (see Tables 1-2)
ctcctgcctcagccttccgactagctgggattataggtgcccactgacaagcctggctaatttttgtatttttagtagagacgggttttcaccatgttggccaggctggtctcgaactcctgacctcaagtgatccacccacttcggtctcccaaagtgctgggatgacaggcatgagccactgcgcccagccactgttcgctttttttctcagtggttctctagtccattgccttaaccactcaccatgactacagctcttatttgcagtgactctcaagaatgcaaatgcaaatgccattcctgacctcgagttaattcagctttgtcccctgagcatgggggaaaggcaggctgggggctggaactttctgcttgtgtacctatctctttagactctggaggctcctccccaatctctgtcattccctctccaaccaaatccacctgccgtcccagactcaaatgctcagccacctaactgcctgaggacccagcagttaatgagtttacatgctgggggcaggagtcagggccaaccctccttggttcctctggctccctggaaagggaaagtcaccaagaggcagctgcaggcagcaaagagaataagcaggagaacctcaaagccacaaagggacagcacacagcatcttccctgtttagcctggacttgagaatgctgtccccagcagtaagctgctcaacctcaaagcaacttgcacgggggtttacaaaaaaatgcacttggccgggcacggtggctcacgcctataatcccaacagtttgggaggccgaggtgggtggatcttttgaggccaggagtttgagaccagcctggcaaacatggtgaaaccctgtctctaccaaaaatacaaaaattagccaggcatggtggtgtgtgcctgtagtcccagctactcaggaggctaaggtaggaggattgctcgaacccaggaggcagaggttacagtgagctgagatcgcaccactgtactccagcctgggtgacaaagtgaggctctgtctcaaaaataaaaataaaacataaatgcactggaggaaagagggtaccactctccttaaggcgggggctgccaacttgtcctgcacagcccgtccgcctgcctcaggtggacttaaagcccagctctgagggactctgagcagtcatttaacctctctgagcctctctttcctcccctgcagaagggggattataacagttcctaattcatgagttgttcttggagtgaaatacattactggccaggtgagatggctcatgcctgtaatcccaacactttgggaggctgaggtgagaggattgcttgagcccaggagttcgagaccagcctgggcaacaaagcaagacccccatctctaagaaaagtaaataaataggcagggtgcagtggctcacccctgtaatcccagcaccttgggaggacgaggtgggcagatggcttgggctcaggagtttgagaccagcctgggcaatgtggcaaactcttgtctctactaaaaaatacaaaaattagcgaggcatggtggcacacgcttgtagtcccagctattggagaggctgaggtgggaggatcacgggagccccagaagcataggttgcagtttgccaagattgtgccactgcactccagctcgggcgacagaaggagaccctgtctcaaaaaacaaacaaaaaagataaatatataaatgaagctgggcatgatggtgcgtacctgtagttccagctacttgggatgctgaggtgggaggattgcttgaagccaggagttctaggctgaagtgagctatgatcatgccagcctgggtgacagagtaagaatctggctcttaaaaaaataaaaagtaaaatggaacaggtgaagttattttctttaatttttaaaataaaaagttatttttataaataaaattttaatttaaaccaaattattttaaactaaatataacattatatttgtataatatataaataatattttaattaaatctaatttaaaattattctaaatgttaactttttttttttttttttttttgagatggagtctcgctctgtcgcccaggctggagtacagtggcgcgatctcggctcactgcaagctccgcatcctgggttcacgccattctcctgcctcagcctcctaagtagctgggactacaggcgcccgccaccacgccaggctaatttcttgtatttttagtagagacggggtttcaccatgttagccaggatggtctcaatctcctgaccttgtgatccgcccacctcggcctcccaaagtgctgagattacaggcgtgagccaccgcgcccggcctaaatgttaacttttaaattgtctttttttttttttttttttttttgagacagtgtcttgctgtatcacccaggccagagtgcagtggcatgatcttggttcactgccacctccgcctcccaggttcaagcgattttcctgcctcagcctcctgaggttaatttttgtatttttattacagatggggtttcaccatattggtcagggtggtctcgaactcctgacctcaggtgatctacccaccttggcctcccaaaagtgctgggattacaggcgttagccaccacgcccggccaaaattttcttaatttaaaaatttaactcaatatattttttaaaaattatcatttcaagaagtgacattagccatctttcaagtgcttggtagccacatgtggctggtgggtgagggcagggcctgtttttttttttttttttttttttgagacggagttttgctcttgttgcccaaactggagtgcaatggcgtgatctcggctcactgcaacctccgcctcctgggttcaagtgattctcctgtctcagcctcctgcgtgcatcaccatgcccagctttttaaatttttagtagaaatggggtttcatcatgttagccaggctggtctcaaattcctgacctcaggtgatccacccacctcggcctcccaaagtactgggattacaggcatgagccactgtgcctggccacagggcctgtatttagatgtttgctattttgttcagcacagattattttacattagttaaaaaatattttttgaggccgggcatggtggctcacacctgtaatcccagcactttgtggggctgagatgggaggatctcttgagtccaggagtttgagaccagcctgggcaacatggtgaaactccgtctctaccaaaaatacaaaaaaaaaaaaaaaaaaattagctgggtgcagtggtgcacacctgtagtcccagctactcgggaggctgaggtagaaggatgatttgagcccaggaggcggaggttgcagtgagcccagatcatgccattgcactctagcttgggcaacagagccaaaccctgtctcaaaaaataaaaataaataaaaatgaaaaaaaaaatcagaattgcacacatgaaatgggtgaattgtatggtaagtatatctcaataaagctacaacaatatttttattgatttacataccatcaaactcgcccttttaaaatgtgcaattcattgggttttaataaagtcacagagttgtccgatatcaccacaatcaattgtagaacatttttatcatcctaaagaaacccagcaccatggagtggccactccccattcccttctcccacccaggccctgacaaccacaaatccacttcctgtctctatggatttgcctgttctggacatttcagataaatggactcacacactatgtagtctttagtgaccactttttcacttagcatcatgttttcaaggctcatgcatgttgtggcatgtactggaactccattcctttatatgaccaaataatataccattgcattggctggatgcggtggctcatgcctgtaatcccagcactttggggggccaaggcgagggcatcacctaaggtcaggagttcgagactagtctggccaacatggtaaaaccccatctctaccaaaaatacaaaaattagctgggcgtggtggtacatacctgtagttccagatactcgggaggctcaggcaggagaattgcttgaacccgggaggcggaggttgcagtgagccaagattgcaccactgcactccagcctgggcaacagagcgagacccccatctcaaaaaaaaaaaaaagaaagaaaaaaatatatatgtctataccattgcatggtcaagccatattttgtttatatattcatcaggtgatgaatatttatgttttttccactttttggctcttgtgaataatgctgctatgagcattcacgcacaagtttttgtatagacatctgtttttaattctttggggttttgcattcattttaattttaaaaacatattgcataaaaatgttatttaccttgatgactgggttttttggcattcccttaaaatttgcacctgggctgccaggcatggtggcgcacgcctgtaatcctaacactttgggaggctgaggtgggcggatggcttgagtccaggagtttgagaccaacctgggcagcatggcaagaccctgtctccacaaaaaatacacacacaaggccgggcacagtggctcacacctgtaatcccagcactttgggaggccgaggcggacgaatcacttgaggtcaagagttcaagaccagcctggccaacatggtgaaaccccaactcaataaagaatacaaaaaaattagccgggtgtagtggtatgtgcctgtaatcccagctactccggaggctgaggcaggggaatcgcttgaacctgggaggcggaggttgcagtgagccaagattgctccactgcactccaagcctgggtgacagagtgagactctgtctcaaaaacacacacacacacaacccaaacacacacaacacacacacacaaaatcagctgggtgtcgtggtgcgtgcctgtagtgccagctacttgggtacttgggtggctgaggcgggaggatcacctgaacccaggaagtcaaggctgcagtaagccatgatcgcgccacagcactccagcctgggtgacaaagtgagaacatagctcaaaaaataaaaaaataaatttgcacctgaggcaagtgtcacactcatcccaactcagtctcaccttgcatgttttctgccttgctggctgtatgaccctggacaagttacttaaccgctcagagcctcgatttcctcctctataaaatggggataatctctgtaactgctcacagttggtagcagaatgcaatgaagtgaattcgccctcacagagccagcactgttcttggcacatggtaatcttaacatattttttcctacagggaggcctggtgtcaggccgggagtggggtggaagggtcccaaaatggatggaagggccccaaaatggccgtgagcatcctctgcccttgagaagagctagcccagctgtctagagctccctgctgctgccgctctcgtaagcagcaagcatttttggctctcctgtctcagcatgatgcccctacaaggttctttcgggggtgggacccaacgctgctctcctgatggcctccctggctcccagcaccttccatcccagctgctcagggcccctcacctgcgcctcccccaccctcccctctgcccactcccatcgcaggccatagctccctgtccctctccgctgccatgaggcctgcactttgcagggctgaagtccaaagttcagtcccttcgctaagcacacggataaatatgaaccttggagaatttccccagctccaatgtaaacagaacaggcaggggccctgattcacgggccgctggggccagggttgggggttgggggtgcccacagggcttggctagtggggttttgggggggcagtgggtgcaaggagtttggtttgtgtctgccggccggcaggcaaacgcaacccacgcggtgggggaggcggctagcgtggtggacccgggccgcgtggccctgtggcagccgagccatggtttctaaactgagcyagctgcagacggagcwcctggcggccctgctsgagtcarggctgagcaaagaggcactgmtccaggcactggrtgagccggggccctacctcctggctggagaaggccccctggacaaggrgragtcctgcggcggcggtcgaggggagctggctgagctgcccaatgggctgggggagactcggggctccgaggacgagacggacgacgatggggaagacttcacgccacccatcctcaaagagctggagaacctyagccctgaggaggcggyccaccagaaagccgtggtggagacccttctgcagtaaggagccctgccccgtccccgctcccaggagagcctagaggggcccccctcagctcctaacgagccccccttctgagttgagtccccrtgaccttcagcctttagcctagttgctgggaagggggacagggcccatgagagcccaggggtccttgcttggaggtttgagcctccagcccctgaactgctcctctgcagagtcccaaatcccatgagcccaggcctttagcccagtccttgggcaagggggacatttcccaggggggtccaagatgggagaaaaagcaggtgagttcacaactcaaatgcctggagaactgggaggtggtggaaatttttagccactctgatcatttatactctccagaccctaactcctgcactgagtcctcagtgggtaggctccggggcccaggaagcactgccagggaggagggcccgaagctggggtttgggggctttcctggcctcctagggactcatgcgtttagccagggaagcccaggtctttcttacctgaggcagacagagcctcgaggtgggagctgctcccctttcctgtatggccacaggcaccccacctcaccagcaggcgccattagaggctgcccgttctacatccccatccgctggcgghctccccgtctcctggagaactgggtgggtcctgagctcgatgcctcccctctcctcagcagagctgacctagttactaattacccatgtgctttattatttctcttttgttttataaatttataaatggcaaaaggctctgataaggtctgtgatcattaacttgtaggaatggtggcctggaaagatctgggccaacccacctcccacctagtgggggtgggggatgggggtgtgggggagaaggaaggatggcctgggggctacaggggccacccctccccagcggctccctgacctccaccctacagcgcctgcttgaggaggttcactacttcctgggcgctgtgctgaggtttcacaggaataatttcccttcatggtgaggagtcctgggcagaagctattggtgactctgcttcacaaatggggaaactggggcttagagccgggaaggagctagactaagttcaccaaactgaggccccaaacctactctgttcggtgctctcaattgctatgaccggggaccagaggcctgcagggggtggccagggagtcagagagagaccgagccccaaagatgctccaaaggggcccatctcttttctgtccaaggtcctgatcccagctggggtgggggagggctggtggattcctgctttcccagaggcctcagggagcctcccgagggcctggacagggggcaggggagcagtcagggccccctgacttggcaggaagaggagggcaaaggactccagagctgcaggggaggggcaaagagtcaggcatcccagacccagggcgaaggcaaccygacggggtggggctgggcctgacctgcccagggccccagatgggactgggggctttggggtgagggtgggggcaggggatgctttcttacctggctgagtgagctctctcggtcagcagccccctttggtgggatggtggggttggggaggcttgatccacagcatttgaaggggaagcagaggtcaaagtgcttcctagggaccagcagagacctggaagctgaggcagagagtgtagagagaggccattgggggagatggacagagaagctgggagaagcagaacggaggagccaggggggcgggggctcagacccagctgggagaaggggcacgggagagaatgaggcgccccaagcttgcaaggaggctggagtgcttcccgcctgccccgattgggttttctttaatgctaacagcatgctatttactttccatttaaatttgagatgttgctataaattatcaaccagctccttgttcctgcagagtttataactaactacctgggttacttattgttcaggtaacaaaagggatcggaaaacgccctgagtgaaaaaagtggggcctccagcgtcagggtcaggaaaggagccagggagagaggggcgggggacccctattgaaggcctgggccattggggaggttgaggctgggaagacggtacagaggcagaatgtctagtagaagctgtytcccgggagaagtcagtgtctgggaagaagccggggtgggtcctgggtcccaggcctccctggggtgccccatgttggtggccacagcaggaacctgagctctttcttcagatctcccccttagctccctgagtgaccttgggaaagtctgttcctctccttctgcctcagtttccctccctggccaaggaataaagtccaaactccctgccttggtttcgttcccctccctccaccccaccaaattcctggatctcttcccaggtctttctcttcctctcggcctttgctgcagtcattttggctttgctgttcctcagtaccccaagccaattcccaccccagggcctttgcacgtgctcttcctgctgctcagaacctctttccagatcttcccatggccgattccttctccttcagctccctgattgctccatccaaaagggggccccacccccgtcactctcttccactactgttgttyactttctctggttccctgtcaagacttgtgatcatctgatttgtttgttttctatctcctgccatgaaaatagaagctcttcaaggacaaggcccgtgttgccttatttaccacttgtacccacatcctgcccagtggctgatgcacagcaggaatgagtgagtgactgggattgtctgaggccctgaagatatctgctgccctgttggtcagggcccagcagcctgagacgtggccaagggagaaactgggacccagagttccttcctgggtgtcctcccgggtcctttctgtccctgatcagctcaaaccccagcgtgtttcttttttkttgttgttgttgttatttttgagacggagtctcactctgtcggcccggctggagygcatggcgcgatctcggctcactgcaagctctgcctcctgggttcacgccattctcctgcctcagcctcccgagtagctgggattacaggcatgcaccaccacgcctggctgattttttgtattttagtagagatggggtttcactatgttggccaggctggtctcaaactcctgacctcaggtgatccgcccgcctcggcctcccaaagtgctgggattacaggcactcagagccactgccctcagccttcaaaccccaatcttgaagtattctgatcctgcccatcaggcagcatcagggcactgagactcaggaaaacagtagccacggcrggrgggggsggggacagaggatctgacgtccccaacaaaagccagactgcctgcatcctaatcctagctctgcccctttctagcttgagcaggtgattttatacttctgagcctcagtttcgtctgcagggtagagatgacaatagcccttgtccacagggttaaatggyatggcacttgtagagtaaacatgtagtaactgcaatatacagcagttattattagtgatcccattttacagatgagcaaattaaggctgagagaggcagtgccttaccgaacgaaactcttccaaatgactgaaggcaagccaggacttggacctgggtcctcctacctcacgctccatacagcaacctcgaggtcacactttcccctccccagtcattcctgctgtttaagttgaccatcaactcacttccatacagtgctttggagttcacaaagggcttacaaaatgcgctaagctcattttttcctcctccccatctctgaagtctgaaatatcattagccccatttcacagatgcggaaactgaggcacacrgaggttaagcaaagaatcaaggccaggtctaaagcccccacactgagaagtcagctcccctccagatgtggagatgaataccacaaccttgcatgccctgaaaccccaggggccagagggcaagaggctcaaagccttggacatccgattgaccctggaaagggtaggagagagaggaggaagatgtgggcgggtcttcacttctcctgggctctgctgtgtggggccaagggtctccagggctgcattgttaagatgatgatgatgacaatattattccacaaattcagcacttactgtgcaccaggcattgccctaagttcatcctccctatttgaagctcatttaattttcccagtagcagtgtgaggtaggggtggatttaccccacgttacagggcagatgtgggtcatgcaagagcacgcgtggctaggtcacagtggtgggatttgaacccacattggtttgactctcaaacccattagagtcaaagcaggagatgcctggagacttgtcctcttagttctttcctttttctttctttctttttttttttttgagatggagtctcactctgttgctgggggtggagtgcagtggcgcagtcttggctcattgcaacctccgcctcccgggttcaagtgatcctcctgcctcagcctcctgagtagctgggaccacaggcatacgacaccacacccagctaatttttgtatttttagtagagacagggtttcactgtgttggccagggtggtctctaactcctgacctcatgtgatccacccgcctcggcctcccaaagtgtggggattacaggcatgagccaccacgcccagccttggcctcttagttctgagctaggacagttggagaatctgccctcaaaaatagtcaggcccttgaagactctgtgtgtgtgtgtgtgtgtgtgtgtgtgtttgtgtaagagacacacagagagacagaagagagagagtgatagcaagggagtggggggtagggagagagagacatcgattcagtaggttctagaaaaaagtggcacaggtggcttctcccagaaaagggaaagacatgccctcttggttctctgactcctaactggcatttaaaattcacttttttgttgtggattttttgcccaactctactaggaattgtttaaaagtggaacgttcgtatcagctcactttaacagtttgctttccattttcacattcaaaagcctgtcttcggtttctaagggttgcacatgtatttgtgcagggtggctggcctttgttttattttcaagttcagcttaaatttgacctggcatgagagaatgagaatgagaatgagagagagagagagagaaagaaacagacagacatggaatcagatggacaggggcacatagaaaatctttggtttgagcccaggagaggctctcaagaggtgagaggaagactgaccctattctctttgtgggagagagaagggaaggagggaggaagggaggacacaggaggacatggcacaggagggtgatggctgcagatgggggaggggaggcatcaggcagcctggctctaggatcagataaacatgtttgccacagagcaccaggctggactttgtactgcccttccttctgagctctvagcagggagatgaaggagagaggatcctaggagccccggaaagaagggagagagagaagctggggagaggcctgcgggggtggggtggtcctggcaacatgaaatatttttgagtcccaactagatcaccttgcacaagtgactgcacctttctgagcctcagttttctcctctgcaaaatgggcacaccgtctacttcctagggttataagatgtaagtggccagtcctcagcacggtgcctggctcacagtaaatcctcaagaaacatgagttctcagacttttttttttttttttttgagacaggatttcactctgtcgccaaggctggagtgcagtggcgcgatcacagctcattgcagccccgacctctcgggctcaagagatcctcttgtctcagccttctaagtagctgggactacaggcttgtgccaccacacttagctaatttttctattttttgtagaaacagggtcccactatgttgtccaggctggtctcaaactcctgggcccaaggaatcctcccaccttagcctcctgaggagctgggactacaggtgtgcaccaccatgcctggctaatttatttttttttttatagagacagagtctcactatgttgtccaggctggtcttgaactgcagggctcaagtgatcctcccacctcggcctttcaaagagctgggattaccaccatgagccaccatacccagtttacaattcagttttaaatattatatatgccaaggtgggaggatcgcttgagcccaggagtttgagaccagcctggccaacatagcaagaccctgtctctatgaaaaaaaaaaaatagaaaaaagaagaaaaagtacaaaaattagctgggcatgttggcatgtgcctgtggtcccaagtacttgggagtccgaggtgggagaaccaattgagcccaggagtttgaggctacagtgagctatgatcacgccactgtgctccagcctgggagacagagcaagtagcctctaaaaagaaaaataaataaataaaaataaatattggctgggcacggtggctcacacctgtaatcccagcactttgggaggccaaggcagatggatcacctgaagtcgggagtttgagaccagcctggccaacatggtgaaaccctgtctctactaaaaatataaaaattagctgggtgtggtagcgcacacctgtaatcccagctactcgggaggctgaggcaggagaatcgcttgaacctgggaatcagaggttgcagtgagctgagctcgcgccactgcactccagcctggccacagagcaaggctttgtctcaaaaaaaaaaactaaataaaaataaatatcatgtatgcatatatagtatatattatgtaatttacaaagtacacaaggacaacagagaaaactgtccttctcactcccatccccagcaccccgttctcctctggaaggaaccagagtccccagttccttgcgtgccctcyggtattttacacgtgcacaaatatgtagaaatcctcttttamctcacttcaaattattcataagtagcagcacagcagacacaccagataaactctgctccacctgggcacacagagcttcctcagcggggttttttcagtggttgcattgaacagatgcacctccatttagttaatcagtatccttttgctgggctccttggtggcttccaatcttttgctatggcaagcaacgtggcaaggaattgccttctacttgtgccatttgtcacctgtgccaatattaaaagccacaaattctagaagcgaattgctcagcgaggcaggggaaagcacaggctttggaatcacgcagacccaagttcaaatcccagtctgcctgtttcagtgctgctgtattgagctgtatttatctgtaactttttgtttgtttgtttgtttttygagacrgagtctcactctgttgcccaggctggaatgcagtggcgcgatctcggctcactgcaacctctgcctcccgggttcaagcaatcytcctgcctcagcctcccgagtagccgggattacaggcacctgccacaatatctgacttattttttatttttattatttttttcrtagagatggttttctccatgttggccaggctggtcttgaactcctaacctcaaaagacccgcccaccttggcctcccaaagtgctgggattacaggtgtgagtcactgcacccagcctatctgtgacatattggtaatataagttcaggagagggagagagaaagaggcagggattgagacagagcaggagaggaggagagaaaatttatatggctcaggcagtctgatcccttctgttcccccacagggagacccacagcagagacatgactcacaggtggcatcrggtccctttgagtctctctggtgggagaatctcaacccacagagtaggattccagtgttcacatgcatttttggtactatgaggcctctgaatgtcaaccctgtcacctgagactctgttgaaaaaccagccgcggccgggcgcggtggctcacgccagtaatcccagcactttgggaggccgaggcaggcagatcacaagatcaggagatcgagaccatcctggctaacacggtgaaaccccrtctctactaaaaatacaaaaaaattagccgggcgtggtggcgggtgcctgtaggcccagctacttgggaggctgaggcaggagaacggcatgaacccaggaggtggaacttgcagtgagccgagatcgcgccactgcactcgagcctgggtgacagagtgagactccatctcaaaaaaaaaaaaaaaaaagaaaaagaaaagaaaaaccagccwcctgttctggtgctgcagggaaacaggcctggccacagccaagggtgcagattttcaggaagcatttttwaaaaaatatatatatatayacacatatatatatatacagagagagagaagccactgaggcccacagaatttgcatcattttattccttgtccaaggtcacaggacaagcagagtcccacccacctgaaaggattcagttctaagacagcctttagggcaaaaagtcacaaagttgatctatctatctatctatctatctatctatctatctatctatctacgtgtttgcaccctaatcactggcagtaaatgcactttttttcttttcttttcttttttttgagacagggtcttgttctgtcacccaggctggagtaggtgtaaaattggagaatccatatttctttccttgttttcagatttaatgctttcctttttccagcaggtctccttcgtccatccatccatcatccatctacccacccacccaccaatccatccatccattcatccaaccatccatccatccatcatccatcyacccacccacccaccaatccatccatccattcatccaaccatccatccatccatcatccatcyacccacccacccaccaatccatccatccattcatccaaccatccatccatccatcatccatctacccacccacccaccaatccatccatccattcatccaaccatccatccatccatcatccatcyacccacccacccaccaatccatccatccattcatccaaccatccatccatccatcatccatccacccatctatctgtccatccactctaccctaccatccatccaccagtccatccatctatccaccaattcatccatccatccacccattcgcccatccatccatccacccacccatccatccatccgtccatccacccattcatccattcatccattcacccatccatccatccacatatcttcatctgtgttgtgtgtctgtgtatccatgtttctaaacctttatctgttccagtgtctgtatccataggcctgtgtccacgtttgtcatgtgtgtgcgtctacaagtctctgtcctcatgaccatgtgtctgtgtccctgtgtcctggcataaatgaccatacctcacygtccctgagtctatgtgtaggcccctgggctccataactgctttcatgcacagtccccaccctcagrgttgacaaggttccagcacccaggaccgcagccccacctatggggagaracagcccttgctgagcagatcccgtccttgccctctcccagggaggacccgtggcgtgtggcgaagatggtcaagtcctrcctgcagcagcacaacawcmcacagyrgragrtggtcgataccactggcctcaaccagtycyacctgtcccaacacctcaacaagggcactcccatgaagacgcagaakyrggccrccctgtacacctggtacgtccgcaagcagygagaggtggcgcagcgtaagtaatgaccctaccccgcatcttccctgggagggcccaggactctcccctaactcataggtsggggctggaagcttcaccatccccattacacagacaggtagatggaaaggaagtcagtgggattcaacctgcatttattacctattctgcgccaggcactctgtgggacgggagtagacttggtcctgaacatccaaagatgaatgaaatgggtccctgctttctttttctttttttagatagagttttgctcttattgcccaggctggagttcagtggtgcgacctcagctcactgtgacctcctcctcccaggttcaagcaattctcctgcctcagcctccggaatagctgggatcacaggtgcccaccaccatgcctggctaattttttgtagttttagtagagacgggggtttcaccatgttggccaggctggtctcgaactcctgacctcaggtgatccacccrcctcagcctcccaaagtgctgggattacaggcgtgagccaccatacccggcctgggtccctgctttctcagagcccatggttaagtgggaaagtgggagaaaagctcattatgatccagcgagtcatgtattagaatgggacaacagcagccacaacaacaacaataatggccactatttatcatgcatttttggggtgcctggtccagtgcagagtattacacaaagcatttcagggtgctgagctgactgtcgactggggagtaacctgttcttcctcaggaaggcagaggtatcaggaagcctcacattgcaaatatgacctttagaatatgacctttagactaggtcttaaagtgggagttgaattttgacccatggagacgcagggaagggtgtttcaggcagaaggaacagcatcagtaaaggctcagaggcaaggtctacggtcaggaaatcctccactgcaaactcaggaagctctgggagccctattactcagggaatggtgggttttcttctccaggcctcataccccaccaaatcccaagggcactgtcaccttccaacctccatctatgtgtgacattttttgacatttcttttattaattatccaggttaatttttttttattatttttttatttttttgagacagagtctcactctgttgcccaggctggagtgcagtggcgtgatctcggctcactgcaagctccgccttccgggttcatgccattctcctgcctcagcctcccgagtagctgggactacaggtgcccgccaccacgcccagctaattttttgtatttttagtagagtcggggtttcaccatggtctcgatctcctgacctcgtgatccgcccgccttggcctcccaaagcgctgggattataggcgtgagccaccgcgcctggccttaattatccaggtttttaaaaaaggaaatagccaggcatggtggtgtgccataatctcagctactgaggaggctgaggtgggaggactgtttgagcccccaggggttcggctccaacctggacaacatggcaaggktcctcctctaaaaaagaaagaaaggaaagatgataggaragggaggaaagataggaaagggaggaaagataggaaagggaggaaagrtaggaaagggaggaaaggtaggaaagggaggaaggaaggaaggaaggaaaagaaaagaaagaaaaagaacgagagaaagaaagaaaggcaatacacatttggttaaaaaaaaagaagaaaaacagagtttataagaaaaattagatgcctttaccctaaagcagccactggaattcccagactcttgtgtatccttccagagagattttctgcrtatagtagcaatagatatgttattttcttgctctttttctgattaatgggaacatactagacacactattttacatgttgtgttttgtctcttggcaataaatcctgtatatcttttcatattggcactgagagattgatggatctcattctttataagggctgctggctgttatttgtttaactggccacctactgaaggacttttagggattttgcaatctgcgaatacaaccaactgcagcaaaaaacatccttctttatataagtgcatgttcacatgtgactgtgtctgtaggataaattcctagaagtggactgctggaacacagagtagctgctttaaaatcttgggtacatattggcatagttccttccaaagaagttatatcaatgtacacttccaccagcagtaaaaatcactgttgaaaaaaaaaatgtatgcaggccgggcgcagtggctcatgcctgtaatcccagcactttgggaggccaaggcaggtggctcacttgagggcaggagtcygagaccagcctggtcaacatggtgaaaccccatcttaactaaaaatacaaaaattagctggacatagtggcgcatgcctgtaatcccagctacttgggaggccaaggcaagggaatcgcttgaacccaggaggcagaggttgcagtgagccaagatcacgccactgcactccagcctgggtgacagagggagactctgtcaaataaatgtatgtatgtatgtatgtatgtatgtatgatgtatgtatgtatgcatgcatgcatgcatgcaatagacaactctagtccttactctatagctacccctcatcccaattattggggtgttcacactctactgtgctgtaatacacacttggaaaaacagtacattttaatactattttaatttgtatgagaagaaacaaagatttattctgaaaatctgttagaactagatttagtttctgagagaaatagtgttctcctaaaaccatcactagacgaaattttacaatattcgataaaatgcattaaaaaatttctaacagttagaaatgtcatcaaggacttcagcctagagctgagaatagagatgcaaactgtggcccaaatagctttccctgggggatttttaacttttaaggagaaattggagaatttgagatgcagagtcaatatatgactgtagtattaggactctttcagtaacaggggacagaaccccarctcaaatggatttaaacagaaaagggaatgaattgactgaagcaatgtgaggagtccagggctgcttcaggcatggctagatcaaggggctcaaatgaggttcacacagcatttcttgactcttttcttttttgttggcttcattctcagacaggctctcctcatataggcaaagatgggttctggaagccctgggctgccatcctaccagcttagcaaccttggaaggaaaagagctcttcttttcagctactttcagttgaatgactctttttatacttgataatgtaaacttttatttattttattttttgagatgaggtcttgccatgttgcccaggctagttttgaacttccgggctcaagtgatccctgcctcagcctcttaagtagctggaatggcaggcacacatcactgtgtctgctataacagaaacttttaaatgaagtctaacataaaaagtgcccaaatccaaagcatacagttcaatgaattttcacaaagtgaacacaccaatacagataaaaaatagaatattaccagctcccagcctggtgtggttgtacccacctgtaatcccagcacatttgggaggcaaaagtgggaggatcacttgagcctaagagttcaagacmagcctgggcaacagaaggagaccccatctctccaaaaaatacgaataaatgagccaggtgtggtgcagcaggtgtgtagtcctagccacttatgcccgctgctgtttcttggcactgagatggtgagggccctgctgctgctgctgcgcccctgattcagaatctaccttcctctcttctcataaagtgctgtcctagcacttgtgtgtcccagtcctttggtggcctgctcagggataagctggtagaccagtttccagtaaagtggtaccagctgatgaaggctggctgggtctcttcctctagctaacatttgcattttaagcctgattttcaagtctggaaagctgaatataattctgaatacactgaggacatatggctcaaatttttgctctactgcgtgactctggaaaaatatgtaagctctctgagcctcagcttcctcatctgtacaatggggatagtaaatgtgccaaatcagaacaaatgctaatgcttacctgcagtcttgtactgagaaggatggtgagatcatatcttgggttggtaggaaagcattcagggattgattagtgatgtttgccttgaacacaggttaagaaagtgatggcatgtgtgctgtgtgtttgtcatcagtagattagatgatttctaagttctagctgtaagctcctctggttcagcrccatggcaatgagaaagaatcaagggcaaggtcaggggaatggacgwgggaaggtgagagtggccagtaccccaytcacggctttctgtgcctgcagagttcacccatgcagggcagggagggctgattgaagagcccacagrtgatgagctaccaaccaagaaggggbrgaggaacyrtttcmagtggggcccagcatcccagcagatcctgttccaggcctrtgagaggcagaagaaccctagcaaggaggagcgagagacgctagtgkaggagtgcaataggtacaacggcgggcgggaaacagtgctggtttggtctgggctgcggcaaggccagggaaggggaaggtgactctaggtcctgtaaaaggctgtccagttgccgagaactcctgatattggcttagcctggcccagaaaattgagaatacttgaacctaagcccattcctcgcagcccccctgcaccctggacaccaagcaaccccttccatggatgctcacccaattcgattctctctacaatcctatggctcttttgctcactttatgaatggagagactgaggtcagacagactgtcaattgcccaaggtcacacagcagacctggcattggaacccagatctgccagcctcaaaccctccggcagagctcagcttctcagaaccctccccttcatgcccaggacagggttcctctgagcctggcctggaggctcatgggtggctatttctgcagggcggaabgcatccagagaggggtgtccccatcacaggcacaggggmtgggcwccaacctcgwcayggaggtgygtgtctacaactggtttgccaacbrgyrcaaagaagaagccttccggcacaagctggccatggacacgtacagcggscsccccccagggccaggcccgggacctgcgctgcccgctcacagctcccctggcctgcctccacctgccctctcccccagtaaggtccacrgtaagtggtatgtggggacaagggacacgtgggaaggtgggagggttggggaggactgtcccagtgacagcagtcacctaaacctctttgcacktcagtttggttccattccattcatgccactccttatcactctacttcactctgttcattcatccattccactctatctcattccattcactctactcctttccactctattcactccatccaccacaattaaccccattccatccactccatccactaccttcgactccactccatccactctactccattcactccactcaactccactccatccactccactccgtccaacttcatcccatccactacattcaactccactccatccactctactccatctactaccttcaactctacyccatccatccactccactccatccattccatccaacttcatcccatctactacattcaactctactccatccactccactccatccattgcatccaacttcatcccatctactacattcaactccactccatccactccactccatccattccctccaacttcatcccatccagtacattcaactccactccatccactgtactccatctactacattcaactctactccatccactcccctccatccattccatccaacttcatcccatctactacattcaactccactccattcattccactccatccattccatccaacttcatcccatccactacattcaactccactccatccactccatacctggctccatccactccactccatctactacattcaactctactccatccactccatactctattccatccacttactccatccactccattcagctccactccatccactccactcactcaactccatctactccactccctctacttcattcaactctgctccatccactccactccacccattccatccactgcactccaaccagctccattagactccactccatccactctacccactcttctctccactcctctccactacataccattttattctatctgtcccatccactcaactccattcactccacatgactccacatttcatccattccactctacttcatccactcactccactctataccattccactccactctattcacatactccaccattccagtctactccattcactccactccaacccactcactccactccataccattccactccactgtgttcacacaactccatccattccactctagccactccattcattccactccacgccacactattcctcaccattccatccactccaccctataccattccactccactctattcctccccacccgtcctctccaccctttaccactccactcgactgtacccattccacttgatcccactcattccactcaattccatctactctactccacaccatccactccacttcatatcattccactcaactcaacctaagttgatttgggttaattcaattcaattcattcatttcagattgtatcaattcaattcatttcaattcaactaaattcagttaaattcagttcagttgtcttctactgagcacctactgcatgtcaggtatagcactaggcagtgggrggaatggagctaataaatgcagtcccagccttcaaggaactgggagcagctgacccagggcttggcaaaaggtagaaacaaaggcagatttgctggctgcataaaggcagacaggcagctggcctaagcaaaccaatggagtttgaagtgctgagggctgtggaggcaggggagggcagggaagtggggtgctgaggcaggacactgcttccctctccaggtgtgcgctatggacagcctgcgaccagtgagactgcagaagtaccctcaagcagcggcggtcccttagtgacagtgtctacacccctccaccaagtgtcccccaygggcctggagcccagccacagcctgctgagtacagaagccaagctggtgagtgtccttgcttgtaaggaaaacccaacctcatctttccttggcagggagattctggagcagtccctagggaggccctgtgkggaccccggccccccggacacagcttggcttcccctcgtaggtctcagcagctgggggccccctcccccctgtcagcaccctgacagcactgcacagcttggagcagacatccccaggcctcaaccagcagccccagaacctcatcatggcctcacttcctggggtcatgaccatcsggcctggtgagcctgcctccctgggtcctacgttcaccaacacaggtgcctscaycctggtcatcggtaagctggtggggatgggtgggcacctgggtgggaggctcatggggcaaccgcagaatccaggagctggaagagccactgggactcattcattcattcattcattcatacaacatgtatttatccagtgcctactctggaccagtcactgtgctacatcagtgatacctgggtgaaccaaacagaccaaaatctcagcaactcaagcagggaggcaggcactaagcataatacatcaattctgtggtacctcagaaggtgaagggtctatgggcaaattacagcagggtaagggrgactgatgttttctaagtttttgttttatgaagaaaaattaagcccagaaagcccttatttgcaggtacaattatgcagaagcccagtacataagatagataaggagctgctaggagaggggagcagagaactgaccccatggcctttgcactgctgtggaaccccagggctccagggaaccgcagtttgacaacttttgaacaagtcaccgcctgcctctcccactagcctagacaaagagctaaaggctcagagagggggaatgacttgccagagccacttaaattagtggcaggtcccagtggagggctgtttcctgaccaccctgccccctcctccaaaccackggctctgggaaggagaggtggtgcccttgggaggtcttgggcaggggtgggatataactggggggcccagctgattccctccccttccactccaggcctggcctccacgcaggcacagagtgtgccggtcatcaacagcatgggcagcagcctgaccaccytgcagcccgtccagttctccyagccgctgcacccctcctaccagcagccgctcatgccacctgtgcagagccatgtgaccyaganccccttcatggccaccatggctcagctgcagagcccccacggtgagcrccctgtgccccacacagcaggagatgatgatagaggttggctgtcaatggatgcaggggaaaggggtgcctggcaggcattgcagtctgcatgtgtctctgggacaagtgtktttccgtgattgagggtgtctgcaggccagtgtgttcccatgtgaatgcacgtatctgtgtgtgtgcacgactgcttgtgtgagcagatccctagtgcgtgtctgggtgtgtatcggttgtgcatgcatttgtgtgcatgcctgtgtttctctgaaactcttagggccatatgaatttctaaaatctattcagattttagaaaggtaatctggggccaggcgtggtggctcatgcctgtaatcccagcactttggaaggccgaggtgggcagatcacttgaggtcaggagttcaagaccagcctggccaacacggtgaaaccccgtctctactaaaagtacaaaaattagccaggcgtggaggcacgtgcctgtagtcccagctacttgggaggctgaggcagaatcgcttgaacctgggaggcggaggttgcagtgagctgagattgtgccactgcactgcactccagcctgggcaacagagtgagtactctgccaaaaaaaaaaaaaagaaaaagaaaagtaatttggtggatatgccagctatcacataacactcccagcagggtttgagacagccccctgtgatcaaagcactgctatttctgcagccaaagataggatttccacaaggcagtttaaacactcataacctcataccaggttcaggctgggtttcgccaccaaatgagctctagtgccaatcttaaggaaatcttttggtttcagacctttttggaatttgggactgggttaagagatttggggcctgtgtatgtctgtgtgtacmtggttgagagtgtatgcgtgtgtgtgtgttacatttttatctgagtcactgtgagaatatgtggtttatgtgcgttttcctagtgtctgtgtgtctcttgtagggtctatgtgtctcctgaggggtgggtggaggtgctgtaggcaaaacatggggttatatttggaaaggtggcctggagatggaagtactgctgtcctctgccttgctctttgacaggggccacctgaacttactacacagcacctgagtttagtacagtagcacctgtgcttagtacatagcacctgtgtttagtatagtagcacctgtgcttagtacatagcgcctgcatttagtacagtagcacctgcgcttagtacgtagcacccgtgcttagtacagtagccctgcacctgcacctcccgttccctttcatacctgctgtctccaggtgacaagaggagctggagttggtttctggcctcctccaggctcccctgcatcaagcgcagctgagcagttccctgtaatggggagagggtctgtccctttatctggagcctccagttttgaaaatcagccctggatctccaactgctgcccagtctggctgttcagcaggccccatgcccccctttccccagtcttgaggcctgggactagggctgtcaggcacgtctgccacgtctgcccctctctcccctgcggccagccctctacagccacaagcccgaggtggcccagtacacccrcacgggcctgctccygcagaytrtgctcatcaccgacaccaccaacctgagcgccctggccagcctcasgcccaccaagcaggtaaggtccaggcctgctggccctccctyggcctgtgacagagcccctcacccccacatcccccgggctcaggaggctgctctgctcccccaggtcttcacctcagacactgaggcctccagtgagtccgggcttcacacgccggcatctcaggccaccaccctccacrtccccagccaggaccctgccrgcatccagcacctgcagccggcccacsrgctcagcgccagccccacaggtgagaggccctggctccaccccctcccttactgtccctgcccccttccatgttggtcccaccccttctgttgctgtccgtcactgtggggctgtgcatgcagcaggcctagggctgctgtgaggaagcactggcaggcgtggaggggtggggtgggcttccatgaagcccaagaggcacaggcgaccccaggaagatggggcccaccttacaagaacatctcagggactggactgaggaaaatgatgaagtaattgttagaggcagtggagagtaacgataaggaccaggtctgtgagccagaagcgactcttgcatgtgtttggtttggcttggctcagggttgaacattctttgaatttgttgccaacatttcaaaatcaggaattttcacatagaaatccagatttctggcatcttttggaaaattggaaaaattcatattcccatataacagtgcaccaggcctcactgcatccactcacatcggctccaatgacccctggcrgtggggcggtcacctgagtttgtaatctatgatgccattgtcaggagtgggcactttggagtcaggtgggtgggctttgcagcctgcctttttgcaagctgccccctttctataaggttcctggacccggccctggcagctgtcatgacagccactgaggccattctgtgtcctggcattcaccccatgaggcgtgtccatgaycacccccattttacagatgagaaagtggacactcaaggaggggagggacttgcctcatctcccacagctaccagatggcagggccaggactcgaacccaggtcccacctcaaagcccattctcttaaccattgccatcagtcagggttctccaggaacacagaaccaayagatttatttgaaggacttggcccgtgtctgcggggggctggcaggcctgaaatctgttgctggcagctcyggggagtgaattctgcagccttgaggcagaattccttctctgggaaaccggtttttgctcttacggccttccactgatgtaggaggcccacccatattttcagggtaatctccttcactcaaagccaactgattgtggcattaaccacatctacaaagcacctgcattcacagcagcgcctagattagtgtttgactcagcctagccaagccaacacgtacaactacctacctcggcatctcaccggggcttctccagtgttcacactaagatgtactcaggccactccatgggcggccgtggaccctggctgggaggctccctttgttaagaaccgagggtagaggtgtgactttggggttcctgttatctgctgtgatccaggaggtgtggccctgcctccccatcctgagtacccctagggacaggcaggtggggtgggtgtgggtgcctggtgggtggcyagcagccttgtttgcctctgcagtgtcctccagcakcctggtgctgtaccagagctcagactccagcaatggccagagccacctgctgccatccaaccacagcrtcatsragaycttcatctccacccagatggcctcttcctcccagtaaccacggcacctgggccctggggcctgtactgcctgcttggggggtgatgagggcagcagccagccctgcctggaggacctgagcctgccgagcaaccgtggcccttcctggacagctgtgcctcgctccccactctgctctgatgcatcagaaagggagggctctgaggcgccccaacccgtggaggctgctcgggktgcacaggagggggtcgtggagagctaggagcaaagcctgttcatggcagatgtaggagggactgtcgctgcttcgtgggatacagtcttcttacttggaactgaagggggcggcctatgacttgggcacccccagcctgggcctatggagagccctgggaccgctacaccactctggcagccacacttctcaggacacaggcctgtgtagctgtgacctgctgagctctgagaggccctrgatcagcgtggccttgttctgtcaccaatgtacccaccgggccactccttcctgccccaactccttccagctagtgacccacatgccatttgtactgaccccatcacctactcacacaggmatttcctgggtggctactctgtgccagagcctggggctctaacgcctgagcccagggaggccgaagctaacagggaaggcaggcagggctctcctggcttcccatccccagcgattccctctcccaggccccatgacctccagctttcctgtatttgttcccaagagcatcatgcctctgaggccagcctggcctcctgcctctactgggaaggctacttcggggctgggaagtcgtccttactcctgtgggagcctcgcaacccgtgccaagtccaggtcctggtggggcagctcctctgtctcgagcgccctgcagaccctgcccttgtttggggcaggagtagctgagctcacaaggcagcaaggcccgagcagctgagcagggccggggaactggccaagctgaggtgcccaggagaagaaagaggtgaccccagggcacaggagctacctgtgtggacaggactaacactcagaagcctgggggcctggctggctgagggcagttcgcagccaccctgaggagtctgaggtcctgagcactgccaggagggacaaaggagcctgtgaacccaggacaagcatggtcccacatccctgggcctgctgctgagaacctggccttcagtgtaccgcgtctaccctgggattcaggaaaaggcctggggtgacccggcaccccctgcagcttgtagccagccggggcgagtggcacgtttatttaacttttagtaaagtcaaggagaaatgcggtggaaacttcttgcttgtccacaaatcattcagatggggtttgggcaggtagcgggaggctggggcaggccagaggcctgcgaagaggagacaggctccagcacccacgctctcacaccccacatctctgcttttcttgctctgctgagactctaatgacaaagccagatttcatcttaacctcaagcttctactttttaaaaaaattttgttttggagacagggtctcactgtcacccaggctggactgcagtggcattatacagctcactgcagccttgaactcctggactaaagggatcctcccacctcagcctcacaagcagcctcacaggcgctcactaccatgcccaactaatttttgtattcttttttttatagagacgaggtttcaccatgttgcctaggctggtctggaactcggctcaagtgatccacctgcctcggcctcccaaagtgctgggattacaggtgtgagccaccatccctggccatgagcttctacttcttttctttttcttttttttttttttttttgagatagggtcttgctccattgcttaggctagagtgcagtggcgcaatctcggctcactgcaacctgcacctcctgggttcaagcgattctcccacctcagcctcctgagtagctgggattacgggcgtgtgtcaacatgctcagctaatttttgtatttttagtagagatggggtctcgccatgttggccaggctggtctcaaactcctggcctcaattgatccacctccttggcctctcaaaatgcttggattacaggcatgagccactgcacccggccacaagcttctacttcttgcagaatgcctttgtcccatgaaacctagtccacgagtgctatgacacttcctgaagtcttgggtggggtgaacgcacaaatcctgggggtgtagagaggaggaggatgtttacttaaaatgtcttaaggttcagcattgacagagaggcaatatccaaatcactctaagttttgttttgggtcctctgacaattgagtttccataatctggtcggctcagagacaccatcatgtgtggtatattcacaaatgcagacaaagaaaattctagaaagccaggggtgaaaaagctctcctttctcagacgattctgtgaagtctatgtgggctaaggagagaagaacaaaagtttctctgggccttggcctcttggggatcccttctctcattttctaaaaactgtttctcacaccaggctaaggaggtggtggggaaggtctcccttcccctgcccacctcagacagttctagggagatggaggtttcaccacttggccactagtctcaaataactggaaggttccttttttcctgaggtcatgaaatgttctggaaccacagcgcccccgccagccctccgtgggagcacagaggggcnnnnnnnnnnnnnnnnnnnnnnnnnnnnnnnnnnnnnnnnnnnnnnnnnnnnnnnnnnnnnnnnnnnnnnnnnnnnnnnnnnnnnnnnnnnnnnnnnnnnnnnnnnnnnnnnnnnnnnnnnnnnnnnnnnnnnnnnnnnnnnnnnnnnnnnnnnnnnnnnnnnnnnnnnnnnnnnnnnnnnnnnnnnnnnnnnnnnnnnnnnnnnnnnnnnnnnnnnnnnnnnnnnnnnnnnnnnnnnnnnnnnnnnnnnnnnnnnnnnnnnnnnnnnnnnnnnnnnnnnnnnnnnnnnnnnnnnnnnnnnnnnnnnnnnnnnnnnnnnnnnnnnnnnnnnnnnnnnnnnnnnnnnnnnnnnnnnnnnnnnnnnnnnnnnnnnnnnnnnnnnnnnnnnnnnnnnnnnnnnnnnnnnnnnnnnnnnnnnnnnnnnnnnnnnnnnnnnnnnnnnnnnnnnnnnnnnnnnnnnnnnnnnnnnnnnnnnnnnnnnnnnnnnnnnnnnnnnnnnnnnnnnnnnnnnnnnnnttttttggcccaactctcgagcaagccttcatcaccatcagggtctcatgggcagtctgggtttgccagcccagtccttgaacttggagagggaggtggggcttggaaatgccttgtccccagggtgggggggacaccttgtccttggagctggctgagccctgtgcccatggctgggttcagtttgcaggtatagctgtagcactctttgctggtgggaatggagaggtctcgctggccttctttgcctttttcttctttttggtcccaagcgacacctggtccccgttgagctcacctgacttctgcttctggactgtggccatgctggtgggggtggtggcagcgacagccgagtcgacactggccaccttcttggctttctttttcaacttccttttcttctttgcctccttctccactgttccagggctgtggatggctgactcctgtaggatgtcggacgccgacacagctgcctcccggcaccgccgccactcctcgtcactgtcctcactgctgcaacgagagggtaccctgggttagctggagtcaggacacagccccagagctgcctctcgctgtcctcccttggtccaggtcaccagaaggtggccgcagagagaggcaggtagtgagttcaggcttgggagtgaggccaacctggcttccaatactggcttctgggcgtagcagccttgtgacctccttaagtgacttaacctctctgactgtatcatctctaaaacggggatcttaacagagtccaggcctcccagggatgtcccaggaggcaactatgatcaagtgaggtgtctggcccaagacaggtgctcaaaagcagtaaacatccaaagctgccgccaagagggctttccctcccgctgagctcatgatttctccagctgcctgacagggccactgccttggcctggtcctgactggagtctgcttggctattccagggaacccaccaagacagaagaggagaaaaaaggaggggacgtgaggagaggtgtgagttctcacctggagctggagggctgtcgctttcggcggggttggggagactcttccttctcacggcctccagggacagatgtgaagaaaaggcggaaacctaagattcaatggggcagagtcaaacaaaaacaaaacaaaacaaaaagaaacataaaaaaataaaaaataaagaaacaaaaaagaaaaaaattttaaaaaggaaaacgaaagaaagaaaagataaagagaaacaaaaaaaaaattttaagaagacacaaaataaaaaaatttaaaaaagaaacaataacaaaaaaacccaaccaagcaaacaaacaaagaaaacaaaggagcagagtcagcacccccagatgccagcccctcctcccaggtgccaggtgctgaagctgccccgcctctgccctcaggagctcctggtccagaggcaaagacccaggaatcagtcgtctaactacaaagtgattctgcatctgccaagggtcatgctgatgcctgatggagccagtggagggcgcgctggagcaggagccagcagccacatcagctcagcaagccctcagaggcttctggaagtcagcacttgagctcctgacctaaggcagccttcaaagtggcaaatgtgttggtacaggacagacgcagatgggcgaggctgtggagggcagcagtaaagtgctcctgctcagggtgacacagacgaggccgcctcaggcaaatgacttcgtttctcagggcctcagtctccttgtctgtacatggggttcaatcataatacctgcctcaccacaggggctgagcagatgaaagaatggtgaggtggcccatgcctgtaaccccagtactttggtagtctgaggcgggaggatagcttgaggccaggagtttaagaccagcctgggcaacatgacagaaccctgtctctaaaaaaaaatacaaaaattagccaggtgtggtggggcacgcctgtagtcccagaactttggaaggctaaggtgggcagatggcttgaggccaggagttcaagaccagcctgggcaacatagcgagatcctgtctctaaaaaacataaataattagccaggggtggtggtgtgtgtctgtggtcccagctactcaggaagctgaggtgggaggactgcttgggtccgggaggttgaggctgcattgagctataattgctccactgcactccagcctaggtggcagagagagttcctatctcaaaaaaagaaaaaaaaaaaagaatataccaaaactgtttcgcccacctccagacacacattaggtgcttaataaatgatagcttctattaagtataaccactcaccatcatcctccaaagcgactttctgtaccttagcttttgctggctcctttgctgcttctgagatggtaatgaagctacagggagacgagacggttgatttaagatgagatttttggataacgacaaaaacaaaattctttttcaagtggaggggatggggtatgtgattgtaaatgcaaaagcgaaagcgtgctggcctagtaagagggctgatggtctggttataacatgctgaccagcctctgccacgcgaactgcagtgcttcatttctttaaagcccactttattccagtaagtgttgaagaagttttaaagacatagtaaaacaagatgaggccaggcatggtggctcacgcctgtaatcctagcactttgggaggccaaggcaggcagatcatgaggccaggagatcgagaccattctggctaacacggtgaaaccccatctctactaaaaatacaaaaaattagccgggcatggtggcgggcgcctgtagtcccagctactcgggaggctgaggcaggagaatggcgtgaacctgggaggcggagcttgcagtgaactgagactgcgccactgcactccagcctgggtgacagagcaagactccatctccaaaaaaagaaaagaatttaacaaaatgaatgcaatttcaaataggacaaagagatataagggcaagaggaacagaaagacctagaagtgtagtcaggaagtcctatacacttgttagagagagggcatacattttgctctgagcttcctagcagcaagcatgaaaagggaaatatgaccaatctagaaaactggttcagaggacagcttctggagcagggcagacctgtttttaaatttttttttttaattaaaagaaattggagataattgtagacatgcagtagcaacaaataatgcagatgttccatagaccctccatccattttctcgcaatggtaacattgtgcctcgctatagtacaacatcacaactaggaaatgcaaattgatccaattcatggacctcattcagacttcagagacctgggttttgaatcccggttttgtcacttattagctatgtcccttaagcaaatgactttatctctctgagtctctgttatccacctgtgcagtgggaacgatgaaggtccctacctcttaaggttgtcacaaggattgaaggggaaaatggatatcaagcacttgtggcacacggcctagccacaagtagctgctcagcaaatggtagctatgatgacgatgcagatgatgactgtcatcaagaaaagcttcagccttcacaggctctctaacataaaaataaaccacatttctctagaggcacaaggccaggaagcatgtgtctggtgagtgcagatggagatgccactgtgcacagcagagaacaaggctctcagcaatgccctcgaggcagacgcagcaatgccctgggtgctttccctaacctcccttcctgtatgccaaaggtgccccccaagccctgttcaggaaaagcaacccggggagagggagtagagatgatgccacccaggcacctgttcttgaccccacacagtggttcaatggtggccatcaggggcatttggcaatgtctggagacatttttggatgtcacaactggtggggtgagtgctactatcatctagtaggtagaggccagggatgttggtaaacatcctataatgggaagaaggatagacccccacgacaaatgctagtcaaagatgtcagtagcgccaaggttgagagacactgacctaacactagggaccaaatgcagtatcatttacatttccttttttttttttgagatgggatctcactctgtcacccaggctggagtgcagtggcacgatctcagctcactgcaacctctgcatcctgggttcaaacgattctcctacctcagcctcccaagtagctgggataacaggtgcacgccaccatgcccagctaatttttgcatttttagtagagatggggtctcaccatgttggccaggctggtctcgaactcctgtcctcaaatgatccacccgcttc

SEQ ID NO: 5676 - DNA, 27246 bp, Homo sapiens
  misc_feature (1)...(27246): n = A,T,C or G, or insertion/deletion polymorphism (see Tables 1-2)
tggcgcacgcctgtaatcacagcactttgaggggctgaggcgggtggatcccttgagcccaacagttcaagaccagcctaggcaacatggtgaaaccccgtctctactaaaaatacaaaacttggccaggtgcggtggctcacatctgtaatcccagcactttgggaggccgaggtgggcagatcacgaggtcaagagatcgaaaccatcctggccaacatggtaaaacctcatctctactaaaaatacaaaaattagctgggtgtggtggcatgtgcctgtagtcccagctactagggaggctgaggcaggagaatcgcttgaacctgggaggcggaggttgcagtgagccaagatcgtgccactgcactctagcctggcaacagagtgagattccatctgaaaaaaaaaaaaaaaaaaaaagaacaaaacttagccagatgtggtggcacgcacctgtggtcccagctactcaggaaactgaggcgggaggatcgcttcagcttgggaggtcaaggcgcagtgagttaagattgcaccactgcactgcagcctgaggtgacagggcaaggccctgtctcaaaaaacaaaacaaacacacacaacattgtgcaaatattttttatcttggctagtcagaaaacttggcaatgccaggcttatatttctttttctttttctttttttgttttccttttgagacagagtctccctttgttgcccaggctggagtgcagtggtgcgatctcagctcactgcaacctccacctcctgtgttcaagagattctcccacttcagccttccgagtagctgggactacaggcatacgccaccacacccggctaatttttgcattttttggtagagataggttttgccatgttggccaggctggtctcaaactcctgacctcaagtgatctgcccgccttggcctcccaaagtgctgggaatacaggcgtgagccactgcacccagccaaggcttatatttcttctggaaagaatcagctagaggcctgaccctcgccagcattttccaggtgctctccagccacctggggctctcaggccctggagtgtagcctctggaggtggtgagaacacagactctggagtctgaccaacctcacttcacatatctgccctgctccttactacctatgtgattggtgttcagtaaattacctaaccctgctcagtttcctcatcaataacatgggggtaacagtagaaccaaccaactaatagagatgctctgagaataaaatgcattaagggtatggaaggtgctcagcatacagcctggaaagtgcttaccactccctaaacatttgctgctgccgctgctgctgctactattgtaaagataaggacagatgaagggaacatttgcacatcagacaaagaagtgtggacttaacacctctccttctccctctcccttccagagggcacgagacatccacttgacagtggagcagaggggttacccagatttcaacctcatcgtgaacccttatgagcccataaggaaggttaaagagaaaatccggaggaccaggggctactctggcctgcagcgtctgtccttccaggttcctggcagtgagaggcagcttctcagcagcaggtgctccttagccaaatatgggatcttctcccacactcacatctatctgctggagaccatcccctccgagatccaggtcttcgtgaagaatcctgatggtgggagctacgcctatgccatcaaccccaacagcttcatcctgggtctgaagcagcagattgaagaccagcaggggcttcctaaaaagcagcagcagctsgaattccaaggccaagtcctgcaggactggttgggtctggggatctatggcatccaagacagtgacactctcatcctctcraagaagaaaggagaggctctgtttccagccagttagttttctctgggagacttctctgtacatttctgccatgtactccagaactcatcctgtcaatcactctgtcccattgtctactgggaaggtcccaggtcttcaccagttttacaatgagttatcccaggccagacgtggtagctcacacctgtaatcccagaactttgggaggccgaggtgggaggagcgcttgagccgaggagttcaagaccagcctgggtatcatagggagaccccgtctctacaaaataaaaaaataattcactgggtgtggttgtgcacatttgtagtctcaggcactcaagaagctgaggcagaagaatcacttgagcccaggaggctgaagctgcagtgagctgtgatcacactgctacactcctgcccaggccacagagcaagaccctgtgtctaaaaactaaaacataaaaataagtaaatccgtttaaaaaaaggattatcccagccctgccagggggaggatgaggaggggtgtgaggactaaatatacaaataaatagtgtggtcacatgacgcacagcaacagaattcggacccacagccttctgcagcaatcaaccccaaaccatcaggacttgggcgataactggcagcatctctaactccccaccctactcccatcctgcttcctatttatgaccaacccaagaaacccaaataagctccccagaccaatcacatggttagccccacttctggtgagtgcacttccagcttccccataccaacagcctcaatcacggcatccctgaagccttcccattttcctgcctgtctttaaatctctgtcaaaagcgagagatgggtggctggttcctttgctatagcaagttgggaataaatcgcctttgttagttctcatttgggggctgtttatttccacagggcctaatgctgtcctaatggttattgcttgatcatttgagcttctcaactctaagaaatgaggactggggaaactgaggcaaaaagagacaaagaatgggagattgaggatgatgcagtgtaaaaaaaaatcacctcaactcctaaaacccatacacaaacagtacataatagtcaggaaactgtaggaaagtaatagcatctttattatcaaaggacgtcatgtgatcaggtttactccaagcaataaaaagtttccttttgcccccctgttttgcctagttttctggtgggctactctcctaccatagcatagaaaatgcacactgcaattggttatcaacagcctctggtcaatttagcaatcataatctgtgtatctcccacctctgtttgccttcagggacagaaaaagtgcctcctttccaggaggtagacaggctgttccagtccccatctttgtgtccttcataatgcccagcacagcccacattgtaggtggtgggaaaattcttgtttaaaataaaaaaaagaatgaaaaatgcaatgtcttagtccatctgggctgctaaaacaaaataccatacactggatggctcatgaacaataaccatttatttcttacagctctggaggctgggaagtccaagtcaagacactggcagatttggtgtctggtgaggacctcttcctgattcacagatggcagcttcrcactaagtcttcacytggtayargaggcaaaggtgtctctaggatcgcttctttttttttttttttttstttttgagatggagtctcgctctgtcacccaggctagagtgcattggcatgatctcagctccctgcaacctctgcctccgaggttcaagcgattctcctgcctcagcctcccgagtagctgggactacaggcacctaccactgtgcccagctaattttttttttatttttagtagagacggggtttcaccatcttggccaggctagtctcgaactcctgaccttgtgatccacctgtcttggcctcccacagtgctgggattacagttgtgagccaccatgcctggcctctggggtctcttttatgaaggcattgatccagttcatgagggctcaggacccattatgtaattgaaagattctccgtggggcctgaaagcttaagagaatgaatgacccctccctcccctccctccttgggcccggtcccaaggcgcaaggccactcgcgccagcagcatgtgtcagcaagatagcagaagcgggaagagagcgggccagaagacacctaccccctgaagaccgagagagacgtcatccgggtacaatgtagcggttacaacagactgagaaacttcctgtttacaggagactacaaaacccctgccccgtcctcatttggtgctgacgccattttaagcctcagcccacctgcacacacactgcctcatgttgtctgttggccacgctcttggggttcgaaccaacacaagaccctttcactaattacttcccagaggtcccacctcctaataccatcaccttgggagtaaggactttttggaaattatcagtatcaaaatggagtcacttatgtcaaaccctaacaaatgcctgtcacaaaaattatctcaagaagttcctaaaatccgcagtattatagataaaccacttgcataagaatatttgcctaacagtgggtgtctccacaataagctaaagccaactcctgcaacaggctcctgtgatcaacggtacttgttttaaagaagcttatgtggactttgtcttttctcgttgccacaacctcttttaatgtgcctatagtccactatagcatgcatatctcaaattgcaattccttgcaattctggaataaacgctttattttggagagtcagtctctctgttatttattttacggtgtcaattttaacatatgaattttggaggaacacattcagaccatatcagtcaccttcctcttctttgaaatagaaaaagctcaaggccagagagtttattttagtaaagttttgacatacctgtcttcaaagataaaacatgaaacagcattccacacacaaaagtaaagtgattttgttcatccttcactgtgaggtattttaaccacagagattctaattttttggtcttggatgggtcctgggagtcagtattgcctggctaatttttgtatttttagtagagatggggtttcaccatgttggtcaggctagtctcgaactcctgacctcatgatctgcccgcctcggcctcacaaagtgttgggattacagatgtgagccaccgtgcccggacaggattctgcatttctcttttttttttttcgagacagagtctcagtctgttgcccaggctggagtgcagtggcacgatcttggctcacctcaacctccacctcccaggttcaagtgattttcctgcctcagcctcctgagtagctgggactacaggtgcgtgccaccatgcccagctaatttttgtatttttagtagagatggggtttcactatgttggccaggctggtctcgaactcctgaccttgtgatctgcctgcctcagccccccaaagtgttgggattacaggcgtgagccaccgtgcccagcctggattctgcatttctaacgagctcccaggtgttaccaatgctgctggctcatggactacactcttaagtagtaaggccctaggctattaaaggaaatacagattcctggattccacctatcagagattctgattctgttagtattttctgtgagacccaaaagtctgcagtttaaccagctctctaaggtgtttcttaggcccaactggactgggaaattactagaataaatgacatggaatcaaaacctgggaactaatcctgggtctgtcattaactccttaggagattcccatcccctctggagatctgtcatcaagaaatgattggagaagttaatctcttaggcccttctagctcttgcctttgagaaccgcccacctccccattcccacctggtatccccaacccagtacagttcatggccaatggcggtccaagtcttggaactacaatccccacaatgcctcgcgcctctcctctcacgtgacgtcatgaaggaggcttgataacggcggtgttctccacaatcctttgcggtggttcaagatggcggcgcccagtggcacwgtgagcgattcggaaagtagtaacagcagtagcgatgcggaggagctggagcggtgccgcgaggcggcaatgccggcttggggcttggagcaacgcccgcacgtggcarggaagccaagagccggtagggtactatgtttggggagactggctgaggggcgtgggatcttcccctggagcctgagaggatggatggtgaggagagagtcactgggactcggcttccttccccgagagacctccagggactgggtgtagtgcagattgaaagcatgggcaggtgcagtagggaggktatttcattattccagtcggggaagctgaggtacccaaatgtcttttgattctgcctccttgggtctatcctcactgccccacactgggaaggctgccgtctcttcgagataactgcaacagccccctcccggtattctcgcacccagcctttccccacctccaacacattctcccaccctggaggttgttgccaagagcagtgcccagcacatcactctgaccgtgactccctagtgccctgggaataaatacagagccccgcaacatcaaggggcctaatcatggatagaacccaagggttcttgaatttggaatgaaaacatgttgcatctttgctttctattcatctctgactgaattttagcatctctttccgtcttgcaagcactaagccacagtagttctggcaatgccgttactttatcccaacagaagtcacagattttcatatctcattacaatctttgcagatacagatatcaatatatcattttattgataaaaagatattggggaaaaaagtcatttacactcatccctgatttaaaatgtgccactctaatttttagacccatctctatatctaagatgtaagaagcacatacatcacaagtttggttgtttactatcatgataattaaatttcggtatcattggttttctttgtaatcctgtatgttgcatttcatgcatttaaaacattgctctgagaagagaaccgggcttcaccaggctgttagagaaggctatggcaaagcaaggttaagaaccgctggatttgtttaaaaggacttacaagccctttggtgatccattgccttcctctcccttccttccctcctgccatactgcacttcctgtaggtagcttccagaccatagtctgcccctctcaccccctagtaccataaccacagttttctctgcaagttctatttacagatctgcctttccatctcattagcggtgggaacttgagcaaagtacttaaatctcactgtacctaaatttcctcatctgtacagtgcgggtagtgatagtacccaccccataaggttgagaagtaactgagataatgcaatctacagtgcttggcacatcttaaaggcccaatacatggtggcaaatatgtggttggtctttccacatggactgctttcctcctcctgcctaattctcgctcttttttttttcaaaactaggactcagtctgttaccgaggctgacacaatcatggctcactgcaacctcgacctccccctactcagatgatcctcccacctcagcctcccaagtagctgagactacagatgtatagtcccagctactttttgtattttttgtagagatggggttttgccatgttgcccaggctggtctcgaactcctgggctcaagtgatcctcccttctcaaccttcaaagtgctgagattacaggtgtgagccactgtgctcrgcttctagttttttttgtttgtttgtttgttttttggggttttttttttttttgcatttttttttttttgagatggagtttcactcttgttgcccaggctgcagtgcaatggcacgatctcagctcactgcaacctctgcctcctgggttcaagtgattctcctgcctcagcctccctagtagctgggattacaggcgcctgccaccacgcccagctaattttttgtatttttagtacagacagggtttcaccrtgttggccaggctggtctcaaactccagacctcaggcaatccacctgcctcggccttccaaagtgctgggattacaggtgtgagccaccgcgcctggtctctttttttctttttgagacgcagtctcgctctgttaccaaggctggagtgcaatggcgcgatcttggctccctgcaacctccgcctcccaagctcaagcaattctcctgcctcagcctcctaagtagctgggattacaggtgcccaccaccaggcccagctaatttttttttatatttttattagagacagggtttcaccgtgttggccaggctggtctcgaacttatgacctcaggtratccgcccaccttggcctcccaaagtgctgagattacaggcatragccaccacacccagcctagattacattcttgagtgcgtctagtaatagccaccaggagttgagaattttctttttgcccctgttctaaacactttgtatttgttgtctgttttcatcttcccagcaatgccacaagagggtgtattagccccattttacagaaaactgattctcataatggtaaaataacttggccaaggttgtccaatttgtgagtggcagaaccaggcgtaaacccaggcctacctgactcccaagtccatgctcttcattgctgctgtgccactctgccatggacaagtgtctattgtggtcaaaactcccaccctttggtccatgactgtggaaatataggtcactattttatttatgtaacctctagagacagctcttaaatccagtgatgaactcgtcactcaaaccactttaattttagggtrgcatctactttgacttatttttctgacaattaattcaaaccaagacactatggcaggatctggggatacagaggtaaaaagaggcagaccacgtattcaagtagcttacaaatccaggaaggggatgggtatggaaacagcgtccacaacactgactccagaaggttggtaatcgtattcccattttatagatgagaaaaacaaaggctcagggagagaaagtgacttgcccggcatcacacagcttggtggcagagccaggactcaactgaacygtctccctctgtaatactgtttctgttccctgacggtacctcaccttcatcacactgtagtcatgatggaagagatgctcttcttccaagtgattatgtgctgaagacgaaagaccaggtctttaaagactgtccatccaggcccccacattacccacctccaggagcatggggcgtgtttagcattctgtgttgtgctctggagtacagtgacacagaccacaaggtactaggacacagatgcaatgtgtatgggtgatgacataaacacagcagtgcccccatggagctgtttcttacaccatggccctccactgggcccggagctaccaagtgtccactttgttcagttggccccttaaatatacaagcacgttttgtcttgttagttaagtcagaaacctcagagctaactttcactcatttctcacgccctgtagtcagtccatcagtgaatcctattgactccatctttttttttttttttttttttttttagacggagtcttgctctgtcaccaggctggagtgcagtggcgtgatcttggctcactgcaacctccgcctcctgggttcgagcgattctcctgcctcagcttctcaagtagctgggactacaggygtgcaccaccacacccagctaatttttgtattttttagtagagatggggtttcaccatgttgaccaggatggtctcgatctcttgacctcgtgatccgcctgcctcagcctcccaaagtgctgggattacaggcgtgagccacsgcgcccggccttgactccatcttaaaagtkcatctatctggagttcacccacttctcaccacatcaattactgcagcagactccgtgttcctgcctttgccccaacagtctcacgctgcacagcagccaaagatgttctgtcaaaacccaggtcagtttatgtcccttctctgctcatttccagagctcctcctcctcaaagtccaggtcctcccattrgcccacgtcagggcccttcatgatctggcccctctgagttctccatctctgctgctcccggtttactgggcaggctctggtcacactgacctccttgctggttctaaacacacaaagcaggctccagtctcagggcctttgcagatgctttccctctgcctggaaggctgtgtcccacatgtccacttggttcactccctctcctctctcaaatctctgttcaaatgttgccttatcagtgaagccctctctgcccacctttatgttaacaatccccagcccaacactccccacctctctcgcctactttgtttccgtttttttccatacacttagcattatccaacttgacattttgtttacgtatgtgtgtttatcatctctctccaccaactagaatgtaagctcctgcagacagtgatagtcgagtaagttgctcagcaatgacaacacctggttaataaaaggcattcagtatctggtttgagggaatgaccaaaaggccgggcatccccaccgttttggcttgaaaaatgtgatccacaaaagagccatcttctctctcttccacggcacttagcacacagccaggcaggcattaaactgtgcagtcaaatcacacttagacctgcctgttcagcacagcgtggtggttaagagggggctcaggagtcagatggcctgggcccccagcccaaccctgtcacttattaggtatttgactctggccaagttattttacatatctttgacgtttcttctgcaaaatgggataattgtaatccctccaatcgggttgttgggaagattcactgagttatatgtgttatatatattttaagttacatatataactattttaagttttatgtatatataactaagttatatatataactattttaagttttatatatataactaagttatatatatattttaagttatataactaagatatatatatatataatgtacttacataaaatatgtaactatattatatacatatataactaaattatatgtaactatttgaagttatgggtatataactattttaagttatatataaatataatatatatgagttacatgtgtatgtatatatatgagttatatgtattttaagctgctgaaaatagtgcctggcacgcatttgttgttgctgtcattgtttcctctataaatgccctaattttcatttttccacaggtgctgcaaatagccagttgtcaacctcccaaccgagcctcaggtactatgcactttgggttcaagtttcacttattcaacaaatactgatcccctgcgtgtgccagatgctaggcttcacgcctggcatttccaggtgaacaagacacacatggtccctgtgctcatggggacagcttctgagcgggcaggaagtgaggtctctttgtgtgtgtcgtaggcataaggtgaatgagcatgaacaagatggcaacgagcttcagaccacccctgaattccgagcccacgtagccaagaagctgggagccctgctggacaggtaaacaaaggtggagtttctcctctcttgcccttgttaatatgaacagcaatggctcacattggctgggagctcacggtgtccaggctggcacggtggcaggcacctggcatatgtcatctccctgcatttataaagaacattatcatgtgggtcctgttgttacctttatcctccaggtgaggaaacaggctgtcagcaaggagacaggtgtgcctgaagtcacatcatcatcrcagctaccatttactgagcaactgtttgtggccaggctctgtgctaagtgcttgatgtccattttctcatttaatccttctgatgaccctgagaggtagggactgttatcattcccactgtacagatgggtaactgaggctcagagaggcaaagtcatttgcccaggggacaccgctattaagtgacaaagccaggattcagaacccaggagggaacagaattgggcctcaaacccaagtgcgtctgactccaagcccacatttttttgttttgttttgttttttgagacagagtctcactctgtcgcccatgctggcgtgcagtggcacgcacaatcttggctcactgcagcctccacctcctggattcaagcgattctcatgcctcagcctcccaagtagctggacttaacgggcacctgccaccataccaggctaatttttgtatttttagtagagacggggtttcaccgtgttgaccaggctgatctcgaactcctgacctcgagtgatccacctgccttggcctcccaaagtgctgggattacaagcgtgagccactgtgccgggccaagcccatgttcttaacccctgcattatcctgcaaccatgagagtaagagaggaacatcgagaagctcattcccgccacaagagggcaaggaaggaccgtgttcctatttcttgggtgccttctgtatgctagacactgtgccaggtctctatcttacattctcagcacaggttgataacccagtcggtaaggattcaggttggcattcctaaagtaggtgtcaaggatacaacctgtttgagtccatatgggctgctataacaaaataacataaactgggtagcttataaacaaaataaatgkatttctcacattttggaggctgagaagtccaagatcaaggcaccagcagattcagtgtctggggagagccctcttcccagtacagatggcgccttcctactgtgtcctcacatagtggcatgggcgaggggtctctctcagaccttttttataggagcagcaatttcattcatcaaggctccaccctcccgacctaatcacctctcaaaggcccccatctcctaatcctaataccttgggttgaggatttctctttttcttttctctttttggagacagagtctccctctggagcacagtggcgtgatctcggctcacaacaacctccagttcctgggttcaagcgattttcatgcctcagcctcctgagtagctggggttacaggtgcgcacccaccacgcttggctaattttttgtattttttgtattttcagtagaaatgggttttcattatgttggccaggctggtctcgaactcctgacttcaagtgatccaccggctcggcctcccagagtgctgggattgcaggtgtaaggcaccatgcccagctggggtgaggatttcaccataagaatttggggaggacacaaacatttggattctagcactagcccaaagcgtggctttagaaaaaaggaggtccaacagcaaagaagcgtgagaaacactgcaatctacatacctccacgtgtccttgcagactgcaagccagagtagtatattcaaggctctgagaattcctgtagtgaagagacctgtgtaactgtttarcccagcattttccaaacttgtttggccacagtgcctttgtttcatggaaaaccagtcaacaacctgcggaacaggtctggggatacactggtctagatctgttcctgactggcagagccctggcagggttttgaaagggagatgaggcaggatttggggccattgtcattccattcaaagtagatatcaaaaaggacaaatgagccttcccaaagtgtgaaccagctattcttctgagacagaatgatgggccagagccccgcagcctgaatcccacagggttcccctcaattggagaawgtagaggaggtgtttaggaaggcagctgcakwtcagcctgtgggagcagttttcctttgtgactctctggcttcaggctgaacagggcctgcttggcattgcactgagtcacagagatgtttctgcagtagaaatgccagtcagccatggttagaatattccctgcagcattttcatgtttctccaaagaaatctaaatgataccttaggccaggcgtggcagctcatgcctctgatcccagcactttgggaggctgaagcgggtggatcatttgaggacaggagttcgagaccagcctggccaacatggtgagaccccatctctactaaaaatgcaaaaattagctgggcatggtggcgtgcacctgttatcccagctacttgggaggctgaggtaggagaatcgtttgaacccaggatgcagaggttgcagtgagctgagatcgtgccactgcactccagcctgggtgacagagtgagatcccatctcaaaaaaaaaaaaggaaatgtaaatgatactgcatttggtccctagtgttaggtcagtgtctctcaaccttggcgctactgacatctttgactagcatttgtcgtgggggtctatccttcttcccattataggatgtttaccaacrtccctggcctctacctactagatgatagtagcactcaccccaccagttgtgacatccaaaaatgtctccagacattgccaaatgcccctgatggccaccattgaaccactgtgtggggtcaagaacaggtgcctgggtggcatcatctctactccctctccccgggttgcttttcctgaacagggcttggggggcacctttggcatacaggaagggaggttagggaaagcacccagggcattgctgcrtctgcctcgagggcattgctgagagccttgttctctgctgtgcacagtggcatctccatctgcactcaccagacacatgcttcctggccttgtgcctctagagaaatgtggtttatttttatgttagagagcytgtgaaggctgaagcttytcttgatgacagtcatcatctgcatcgtcatcatagctaccatttgctgagcagctacttgtggctaggccgtgtgccacaagtgcttgatatccattttccccttcaatccttgtgacaaccttaagaggtagggaccttcatcgttcccactgcacaggtggataacagagactcagagagataaagtcatttgcttaagggacatagctaataagtgacaaaaccgggattcaaaacccaggtctctgaagtctgaatgaggtccatgaattggatcaatttgcatttcctagttgtgatgttgtactatagcgaggcacaatgttaccattgcgagaaaatggatggagggtctatggaacatctgcattatttgttgctactgcatgtctacaattatctccaatttcttttaattaaaaaaaaaaatttaaaaacaggtctgccctgctccagaagctgtcctctgaaccagttttctagattggtcatatttcccttttcatgcttgctgctaggaagctcagagcaaaatgtatgccctctctctaacaagtgtataggacttcctgactacacttctaggtctttctgttcctcttgcccttatatctctttgtcctatttgaaattgcattcattttgttaaattcttttctttttttggagatggagtcttgctctgtcacccaggctggagtgcagtggcgcagtctcagttcactgcaagctccgcctcccaggttcacgccattctcctgcctcagcctcccgagtagctgggactacaggcgcccgccaccatgcccggctaattttttgtatttttagtagagatggggtttcaccgtgttagccagaatggtctcgatctcctggcctcatgatctgcctgccttggcctcccaaagtgctaggattacaggcgtgagccaccatgcctggcctcatcttgttttactatgtctttaaaacttcttcaacacttactggaataaagtgggctttaaagaaatgaagcactgcagttcgcgtggcagaggctggtcagcatgttataaccagaccatcagccctcttactaggccagcacgctttcgcttttgcatttacaatcacataccccatcccctccacttgaaaaagaattttgtttttgtcgttatccaaaaatctcatcttaaatcaaccgtctcgtctccctgtagcttcattaccatctcagaagcagcaaaggagccagcaaaagctaaggtacagaaagtcgctttggaggatgatggtgagtggttatacttaatagaagctatcatttattaagcacctaatgtgtgtctggaggtgggcgaaacagttttggtatattcttttttttttttytttttttgagataggaactctctctgccacctaggctggagtgcagtggagcaattatagctcaatgcagcctcaacctcccggacccaagcagtcctcccacctcagcttcctgagtagctgggaccacagacacacaccaccacccctggctaattatttatgttttttagagacaggatctcgctatgttgcccaggctggtcttgaactcctggcctcaagccatctgcccaccttagccttccaaagttctgggactacaggcgtgcmccaccacacctggctaatttttgtatttttttttagagacagggttctgtcatgttgcccaggctggtcttaaactcctggcctcaagctatcctcccgcctcagactaccaaagtactggggttacaggcatgggccacctcaccattctttcatctgctcagcccctgtggtgaggcaggtattatgattgaaccccatgtacagacaaggagactgaggccctgagaaacgaagtcatttgcctgaggcggcctcgtctgtgtcaccctgagcaggagcactttactgctgccctccacagcctcgcccatctgcgtctgtcctgtaccaacacatttgccactttgaaggctgccttaggtcaggagctcaagtgctgacttccagaagcctctgagggcttgctgagctgatgtggctgctggctcctgctccagcgcgccctccactggctccatcaggcatcagcatgacccttggcagatgcagaatcactttgtagttagacgactgattcctgggtctttgcctctggaccaggagctcctgagggcagaggcggggcagcttcagcacctggcacctgggaggaggggctggcatctgggggtgctgactctgctcctttgttttytttgtttgtttgcttggttgggtttttttgttattgtttcttttttaaatttttttattttgtgtcttcttaaaattttttttttgtttctctttatcttttctttctttcgttttcctttttaaaatttttttcttttttgtttctttattttttatttttttatgtttctttttgttttgttttgtttttgtttgactctgccccattgaatcttaggtttccgccttttcttcacatctgtccctggaggccgtgagaaggaagagtctccccaaccccsccgaaagcgacagccctccagctccaggtgagaactcacacctctcctcacgtcccctccttttttctcctcttctgtcttggtgggttccctggaatagccaagcagactccagtcaggaccaggccaaggcagtggccctgtcaggcagctggagaaatcrtgagctcagcgggagggaaagccctcttggcggcagctttggatgtttactgcttttgagcacctgtcttgggccagacacctcacttgatcatagttgcctcctgggacatccctgggaggcctggactctgttaagatccccgttttagagatgatacagtcagagaggttaagtcacttaaggaggtcacaaggctgctacgcccagaagccagtattggaagccaggttggcctcactcccaagcctgaactcactacctgcctctctctgcggccacctyctggtgacctggaccaagggaggacagcgagaggcagctctggggctgtgtcctgactccagctaacccagggtaccctctcgttgcagcagtgaggacagtgacgaggagtggcggcggtgccgggaggcagctgtgtcggcgtccgacatcctacaggagtcagccatycacagccctggaacwgtggagaaggaggcaaagaagaaaaggaagttgaaaaagaaagccaagaaggtggccagtgtcgactcggctgtcgctgccaccacccccaccagcatggccacagtccagaagcagaagtcaggtgagctcaayggggaccaggtgtcgcttgggaccaaaaagaagaaaaaggcaaagaaggccagcgagacctctccattcccaccagcaaagagtgctacagctatacctgcaaactgaacccagccatgggcacagggctcagccagctccaaggacaaggtgtcccccccaccctggggacaaggcatttccaagccccmcctccctctccaagttcaaggactgggctggcaaacccagactgcccatgagaccctgatggtgatgaaggcttgctcgagagttgggccaaaaaannnnnnnnnnnnnnnnnnnnnnnnnnnnnnnnnnnnnnnnnnnnnnnnnnnnnnnnnnnnnnnnnnnnnnnnnnnnnnnnnnnnnnnnnnnnnnnnnnnnnnnnnnnnnnnnnnnnnnnnnnnnnnnnnnnnnnnnnnnnnnnnnnnnnnnnnnnnnnnnnnnnnnnnnnnnnnnnnnnnnnnnnnnnnnnnnnnnnnnnnnnnnnnnnnnnnnnnnnnnnnnnnnnnnnnnnnnnnnnnnnnnnnnnnnnnnnnnnnnnnnnnnnnnnnnnnnnnnnnnnnnnnnnnnnnnnnnnnnnnnnnnnnnnnnnnnnnnnnnnnnnnnnnnnnnnnnnnnnnnnnnnnnnnnnnnnnnnnnnnnnnnnnnnnnnnnnnnnnnnnnnnnnnnnnnnnnnnnnnnnnnnnnnnnnnnnnnnnnnnnnnnnnnnnnnnnnnnnnnnnnnnnnnnnnnnnnnnnnnnnnnnnnnnnnnnnnnnnnnnnnnnnnnnnnnnnnnnnnnnnnnnnnnnnnnnnnnngcccctctgtgctcccacggagggctggcgggggcgctgtggttccagaacatttcatgacctcaggaaaaaaggaaccttccagttatttgagactagtggccaagtggtgaaacctccatctccctagaactgtctgaggtgggcaggggaagggagaccttccccaccacctccttagcctggtgtgagaaacagtttttagaaaatgagagaagggatccccaagaggccaaggcccagagaaacttttgttcttctctccttagcccacawagacttmacagaatcgtctgagaaaggrgagctttttcacccctggctttctagaattttctttgtctgcatttgtgaatataccacacatgatggtgtctctgagccgaccagattatggaaactcaattgtcagaggacccaaaacaaaacttagagtgatttggatattgcctctctgtcaatgctgaaccttaagacattttaagtaaacatcctcctcctctctacacccccaggatttgtgcgttcaccccacccaagacttcaggaagtgtcatagcactcgtggactaggtttcatgggacaaaggcattctgcaagaagtagaagcttgtggccgggtgcagtggctcatgcctgtaatccaagcattttgagaggccaaggaggtggatcaattgaggccaggagtttgagaccagcctggccaacatggcgagaccccatctctactaaaaatacaaaaattagctgagcatgttgacacacgcccgtaatcccagctactcaggaggctgaggtgggagaatcgcttgaacccaggaggtgcaggttgcagtgagccgagattgcgccactgcactctagcctaagcaatggagcaagaccctatctcaaaaaaaaaaaaaaaaaagaaaaagaaaagaagtagaagctcatggccagggatggtggctcacacctgtaatcccagcactttgggaggccgaggcaggtggatcacttgagccragttccagaccagcctaggcaacatggtgaaacctcgtctctataaaaaaaagaatacaaaaattagttgggcatggtagtgagcgcctgtgaggctgcttgtgaggctgaggtgggaggatccctttagtccaggagttcaaggctgcagtgagctgtataatgccactgcagtccagcctgggtgacagtgagaccctgtctccaaaacaaaatttttttaaaaagtagaagcttgaggttaagatgaaatctggctttgtcattagagtctcagcagagcaagaaaagcagagatgtggggtgtgagagcgtgggtgctggagcctgtctcctcttcgcaggcctctggcctgccccagcctcccgctacctgcccaaaccccatctgaatgatttgtggacaagcaagaagtttccaccgcatttctccttgactttactaaaagttaaataaacgtgccactcgccccggctggctacaagctgcagggggtgccgggtcaccccaggccttttcctgaatcccagggtagacgcggtacactgaaggccaggttctcagcagcaggcccagggatgtgggaccatgcttgtcctgggttcacaggctcctttgtccctcctggcagtgctcaggacctcagactcctcagggtggctgcgaactgccctcagccagccaggcccccaggcttctgagtgttagtcctgtccacacaggtagctcctgtgccctggggtcacctctttcttctcctgggcacctcagcttggccagttccccggccctgctcagctgctcgggccttgctgccttgtgagctcagctactcctgccccaaacaagggcagggtctgcagggcgctcgagacagaggagctgccccaccaggacctggacttggcacgggttgcgaggctcccacaggagtaaggacgacttcccagccccgaagtagccttcccagtagaggcaggaggccaggctggcctcagaggcatgatgctcttgggaacaaatacaggaaagctggaggtcatggggcctgggagagggaatcgctggggatgggaagccaggagagccctgcctgccttccctgttagcttcggcctccctgggctcaggcgttagagccccaggctctggcacagagtagccacccaggaaatkcctgtgtgagtaggtgatggggtcagtacaaatggcatgtgggtcactagctggaaggagttggggcaggaaggagtggcccggtgggtacattggtgacagaacaaggccacgctgatccagggcctctcagagctcagcaggtcacagctacacaggcctgtgtcctgagaagtgtggctgccagagtggtgtagcggtcccagggctctccataggcccaggctgggggtgcccaagtcataggccgcccccttcagttccaagtaagaagactgtatcccacgaagcagcgacagtccctcctacatctgccatgaacaggctttgctcctagctctccacgaccccctcctgtgcaccccgagcagcctccacgggttggggcgcctcagagccctccctttctgatgcatcagagcagagtggggagcgaggcacagctgtccaggaagggccacggttgctcggcaggctcaggtcctccaggcagggctggctgctgccctcatcaccccccaagcaggcagtacaggccccagggcccaggtgccgtggttactgggaggaagaggccatctgggtggagatgaagrtctysatgaygctgtggttggatggcagcaggtggctctggccattgctggagtctgagctctggtacagcaccaggmtgctggaggacactgcagaggcaaacaaggctgctrgccacccaccaggcacccacacccaccccacctgcctgtccctaggggtactcaggatggggaggcagggccacacctcctggatcacagcagataacaggaaccccaaagtcacacctctaccctcggttcttaacaaagggagcctcccagccagggtccacggccgcccatggagtggcctgagtacatcttagtgtgaacactggagaagccccggtgagatgccgaggtaggtagttgtacgtgttggcttggctaggctgagtcaaacactaatctaggcgctgctgtgaatgcaggtgctttgtagatgtggttaatgccacaatcagttggctttgagtgaaggagattaccctgaaaatatgggtgggcctcctacatcagtggaaggccgtaagagcaaaaaccggtttcccagagaaggaattctgcctcaaggctgcagaattcactccccggagctgccagcaacagatttcaggcctgccagccccccgcagacacgggccaagtccttcaaataaatctgttggttctgtgttcctggagaaccctgactgatggcaatggttaagagaatgggctttgaggtgggacctgggttcgagtcctggccctgccatctggtagctgtgggagatgaggcaagtccctcccctccttgagtgtccactttctcatctgtaaaatgggggtgrtcatggacacgcctcatggggtgaatgccaggacacagaatggcctcagtggctgtcatgacagctgccagggccgggtccaggaaccttatagaaagggggcagcttgcaaaaaggcaggctgcaaagcccacccacctgactccaaagtgcccactcctgacaatggcatcatagattacaaactcaggtgaccgccccacygccaggggtcattggagccgatgtgagtggatgcagtgaggcctggtgcactgttatatgggaatatgaatttttccaattttccaaaagatgccagaaatctggatttctatgtgaaaattcctgattttgaaatgttggcaacaaattcaaagaatgttcaaccctgagccaagccaaaccaaacacatgcaagagtcgcttctggctcacagacctggtccttatcgttactctccactgcctctaacaattacttcatcattttcctcagtccagtccctgagatgttcttgtaaggtgggccccatcttcctggggtcgcctgtgcctcttgggcttcatggaagcccaccccacccctccacgcctgccagtgcttcctcacagcagccctaggcctgctgcatgcacagccccacagtgacggacagcaacagaaggggtgggaccaacatggaagggggcagggacagtaagggagggggtggagccagggcctctcacctgtggggctggcgctgagcysgtgggccggctgcaggtgctggatgcyggcagggtcctggctggggaygtggagggtggtggcctgagatgccggcgtgtgaagcccggactcactggaggcctcagtgtctgaggtgaagacctgggggagcagagcagcctcctgagcccgggggatgtgggggtgaggggctctgtcacaggccgagggagggccagcaggcctggaccttacctgcttggtgggcgtgaggctggccagggcgctcaggttggtggtgtcggtgatgagcatagtctgcgggagcaggcccgtgtgggtgtactgggccacctcgggcttgtggctgtagagggctggccgcaggggagagaggggcagacgtggcagacgtgcctgacagccctagtcccaggcctcaagactggggaaaggggggcatggggcctgctgaacagccagactgggcagcagttggagatccagggctgattttcaaaactggaggctccagataaagggacagaccctctccccattacagggaactgctcagctgcgcttgatgcaggggagcctggaggaggccagaaaccaactccagctcctcttgtcacctggagacagcaggtatgaaagggaacgggaggtgcaggtgcagggctactgtactaagcacgggtgctacgtactaagcgcaggtgctactgtactaaatgcaggcgctatgtactaagcacaggtgctactatactaaacacaggtgctatgtactaagcacaggtgctactgtactaaactcaggtgctgtgtagtaagttcaggtggcccctgtcaaagagcaaggcagaggacagcagtacttccatctccaggccacctttccaaatataaccccatgttttgcctacagcacctccacccacccctcaggagacacatagaccctacaagagacacacagacactaggaaaacgcacataaaccacatattctcacagtgactcagataaaaatgtaacacacacacacgcatacactctcaaccaggtacacacagacatacacaggccccaaatctcttaacccagtcccaaattccaaaaaggtctgaaaccaaaagatttccttaagattggcactagagctcatttggtggcgaaacccagcctgaacctggtatgaggttatgagtgtttaaactgccttgtggaaatcctatctttggctgcagaaatagcagtgctttgatcacagggggctgtctcaaaccctgctgggagtgttatgtgatagctggcatatccaccaaattacttttctttttcttttttttttttttggcagagtactcactctgttgcccaggctggagtgcagtgcagtggcacaatctcagctcactgcaacctccgcctcccaggttcaagcgattctgcctcagcctcccaagtagctgggactacaggcacgtgcctccacgcctggctaatttttgtacttttagtagagacggggtttcaccgtgttggccaggctggtcttgaactcctgacctcaagtgatctgcccacctcggccttccaaagtgctgggattacaggcatgagccaccacgcctggccccagattacctttctaaaatctgaatagattttagaaattcatatggccctaagagtttcagagaaacacaggcatgcacacaaatgcatgcacaaccgatacacacccagacacgcactagggatctgctcacacaagcagtcgtgcacacacacagatacgtgcattcacatgggaacacactggcctgcagacaccctcaatcacggaaaaacacttgtcccagagacacatgcagactgcaatgcctgccaggcacccctttcccctgcatccattgacagccaacctctatcatcatctcctgctgtgtggggcacagggcgctcaccgtgggggctctgcagctgagccatggtggccatgaaggggntctrggtcacatggctctgcacaggtggcatgagcggctgctggtaggaggggtgcagcggctrggagaactggacgggctgcarggtggtcaggctgctgcccatgctgttgatgaccggcacactctgtgcctgcgtggaggccaggcctggagtggaaggggagggaatcagctgggccccccagttatatcccacccctgcccaagacctcccaagggcaccacctctccttcccagagcccgtggtttggaggagggggcagggtggtcaggaaacagccctccactgggacctgccactaatttaagtggctctggcaagtcattccccctctctgagcctttagctctttgtctaggctagtgggagaggcaggcggtgacttgttcaaaagttgtcaaactgcggttccctggagccctggggttccacagcagtgcaaaggccatggggtcagttctctgctcccctctcctagcagctccttatctatcttatgtactgggcttctgcataattgtacctgcaaataagggctttctgggcttaatttttcttcataaaacaaaaacttagaaaacatcagtcycccttaccctgctgtaatttgcccatagacccttcaccttctgaggtaccacagaattgatgtattatgcttagtgcctgcctccctgcttgagttgctgagattttggtctgtttggttcacccaggtatcactgatgtagcacagtgactggtccagagtaggcactggataaatacatgttgtatgaatgaatgaatgaatgaatgagtcccagtggctcttccagctcctggattctgcggttgccccatgagcctcccacccaggtgcccacccatccccaccagcttaccgatgaccaggrtgsaggcacctgtgttggtgaacgtaggacccagggaggcaggctcaccaggccsgatggtcatgaccccaggaagtgaggccatgatgaggttctggggctgctggttgaggcctggggatgtctgctccaagctgtgcagtgctgtcagggtgctgacaggggggagggggcccccagctgctgagacctacgaggggaagccaagctgtgtccggggggccggggtccccacagggcctccctagggactgctccagaatctccctgccaaggaaagatgaggttgggttttccttacaagcaaggacactcaccagcttggcttctgtactcagcaggctgtggctgggctccaggcccrtgggggacacttggtggaggggtgtagacactgtcactaagggaccgccgctgcttgagggtacttctgcagtctcactggtcgcaggctgtccatagcgcacacctggagagggaagcagtgtcctgcctcagcaccccacttccctgccctcccctgcctccacagccctcagcacttcaaactccattggtttgcttaggccagctgcctgtctgcctttatgcagccagcaaatctgcctttgtttctaccttttgccaagccctgggtcagctgctcccagttccttgaaggctgggactgcatttattagctccattccccccactgcctagtgctatacctgacatgcagtaggtgctcagtagaagacaactgaactgaatttaactgaatttagttgaattgaaatgaattgaattgatacaatctgaaatgaatgaattgaattgaattaacccaaatcaacttaggttgagttgagtggaatgatatgaagtggagtggatggtgtggagtagagtagatggaattgagtggaatgagtgggatcaagtggaatgggtacagtcgagtggagtggtaaagggtggagaggacgggtggggaggaa

SEQ ID NO: 5677 - DNA, 48265 bp, Homo sapiens
  misc_feature (1)...(48265): n = A,T,C or G, or insertion/deletion polymorphism (see Tables 1-2)
ctggccaacatggtgaaaccctgtctctactaaaaatacaaaaattagcctggcgtggttgtgtgtgcctgtaaccccagctactcgggaggctgcggagaattgcttgaaaccgggcggcagagttcgcagtaagccaagactgtgccattgcacttcagcctgggcagagtgagactccctctcaaaaaaaaaaaaaaaagagccaataagataatttttacctaaatatcagtaaggcacaatggagaggatttcccactttggtattttagtctttatttctacctgagcaaataaccacatttcatctagtgtacggcagatacatgcctgtatccattagtattgcattacgaagaaggcaatgaaactcagcactgatgagccatgagggcgatggcccctaatagggcaggtccgggttggccagccacgtggatacccgaccagaagtatgtgccatgtccaaggtggacgccaccatcgtccattcacccagctactcccaagggccttacttgaccctgtttccaaccacaggaccaatcacagccactggtggaaggataaatacagacacacacacttctcactcctgcccctgaggaaccggctctggaggaaagcccatcactgtggagttggagaaacctggggtgttaccagccacagtggggaggtattcatacctcctgcaccttgggcatgtcagtattttcaaccatagcctgggaggcatctacgcctcctagggttattagaaagtagcacacgtaaaaggctgcacacataatatgtgctccataaatatttgttccctatctatattcaaatatacataaaacattcagacatgcagtcgcataggcaaacacctgtgaatgcataagggcccatgtgcacagacacatgttttgatcatcatacgtgtaggaaccctctacccccagtggagtgtctagggagttagtgggtaaaagtagatgaagccctgcccccgacctctccagatttcccacctgagcacagaaccctgccagtaaagaggcttctccacaggaaatggcaaggcccttggggggtggtgactcagccctgactcagccatgtggcctcctgggctccaaagggccaccttgacttgaggttgagaatgctgtaggcacagcagagtcttaatctcccagccaggaaagaaggggactctgggggccagggcagggcatgtgcagcagggccaggccctgggcagtaggaaaggaagagagagacagagggatggcaggcagggaagtccccggatgtttggggcctactcaccacgccctcatagagatcattgcctattaatccccagaaagcctctgcactttccctccttcacttccagcatccctctcgccccacacctgtccctgaagtcccagtcaaatcagtaccctgggcctttcttactcattccctctctccctccctcagccctgctcctgctcagcccacttcttggccaaattattacagtagctgccttcccccacaacccagtctgtcctggcaaagtcaacttcatgtggcagccagaatgttctgacagccccctttgtcccacaagcaccacccctaacatacaatgcaaagtgggtttagcctgtttaaatgtgagagcaaccagaacatgaggccacatcctggcctcctctaagtcatccccgggttgggactcagcccaggattggtacatagtaggctgtcaatgaatgcttgagcctggcagattctgagccaggggaatcgcctggactaggcctgcatctgggccataggagaaggaaatctgataaatccattcaatcttcagcactcctccctccctccctcttcagtaatttgcattttcaattcaagtcagatagacccctgagtctcagtccaatagctgagatttggtacacttcgttgaacagatattagaaggtttgggatacaatgaatgtagattggggaatagtgagagatttctctccagccctttcatttcacacatggagaaaccgaggcctggaacggaaggtaacttgcccaaggtgagaaggcagaagagagcttgcattcaacggaggggcacaccattgcaattccttgttatttttccagcagctgcctgtgtgcttcacgtctctgtgctgatctgcccgagaggtgatggtgtccattggtgtgctctggggctctgggagagtgagatgagggctggggagagggcaggtagagraagacttgtgggaacacagcaagcgctaaataaacagaagccgcctttgtgggatattgacattgtcattgttccagctgggaaaacttcacctgaaccaggacccaatttttctgcctctcttctccagctcctttctttccctgttgtccagatacacctcctccagggagcttccatgaccccccagcagaactcaccatttgcatgttgttacggtcacctgcagaggcagatggatcccatccaaggtttggtttgaatgaagactgacgacaccacccaaacaccaagagagtatgaaaaggtttattatttacataattgaggtctccagggggagcagggscagtctttcaagcaggtcccagatgtgttgggagagccaggaaggagactggcctgggtttttattgtggttgaggggtgagggttccctcaggaaggggcttgtgaatattccccctcaaacaccaaaggagggtgcacccagactttcttatcagcttgtccaggtgtagggcacagagaagagggaagggtgaggcttaaaatctgtcagcaaacatcaacaaatggacttagactcctcattacacatattattcctgtgtccttgtttctctgtctgtctgtgtgtttctaggtgggtctcttccccatgggggagggttgacagataaagagttgacatgataaagtcaactgagggatgagatgatcctacagacgacggtgccactgaaaccaaagaaccctgagatttctctttctccatctctccagctgagatccttctagtctccatgtctccctccactcccactccatctccccagactggtctgacactcccccacattctttagctcaggccctccccctaccagtcgcccctgctctgctccacattccctctggacactcccctggagtggaaaaaccatccctcatccctttccggctcccagtcccaggatcggacatgctggtcattcctgtttgggatgtccaaagagataaggcctggcatggggccaatctgtcatcgcaggactctcaaagctgtttcaggcaggatcctcacccacatggcgtttccaccctaagcccctgcccttcttaccctggctggctcctcttctccaggaacatggcagaggactcaggagccaggcagagagcaaagatcactgttcaacttccatccaggtcagcttcctgttccttgaccccacatgtcttctaatccctgcaggccctgggccacaaagcagaccatgagagaggctgggtggctctggaagtcagaggtcaggaacaaatcctgttctaagggccgttagagacaagtgtcttctccccaaacaccacagagaaagctgttatcacagctgcttttgtttaggcatgtctagctgtctgacaaccatctgcctggagtttgtcttcttaaagacacggttgtggtcagcggcttcagtcctagctctgcctcccataaaattcagatcttggacaggcaggtaacctcctgaggctctgttttctcctaagtcaaatgaatatcataatccccacctcacagggaggccaggaggataaaatgagcctgcttgtgaaatgatttgtaaactgtaaagctaggccaggaccctttcccaggctctgaatctaattttgtactcataattcttatgagtacaaaataattttattcttaaagagcaccccagattgcacaagcttcaggacccaccaaacttggacacgcccaaagtagtgtataaatgttcattattagcataagtagttaagggctccagggtcagataacacaggatgaaaatcctagttgtgtgacctctgccaaattgcctaacctccctgagcctcatttttctcgttttaaaacagagataacacttcaaagattgttgtgaggatttaacatttgtgaagcatttagcatagttcctgctgcgtatgtgcttaatacatggtgttttgttcttattattttaagaatagatggagaaaagaatgctcggggaggccaggcagggtggctcacgcctgtaatcccagcactttgggaggcggcggggtggatcacgaggtcaggagttcgagaccagcctgaccaacacggcgaaaccccgtctctactaaaaatacaaaaattagccgggcatggtggtgggcgcctgtaatcccagctactcaggaggctgaggcaggagaatcgcttgaaccccggaggcagaggttgcagtgagcggagatcgcgccactgcactccagcctgggagacagagcgagactccgtcgtctcaaaaacaaaacaaaacaaaacaaaaaaacaatgttccggggaaaatgggtctctgagctgcaataagagaaatgtgagttagatccaagaaagtacatagtaacctcttttttttttttgagacgacgtctcactctgtcacccaggctggagtgcagtggcgcgatctcggctcactgcaacctgcgcctcccgggttcaagcgattctcctgccccagcctcccaaatagctggaactacaggcgcccgccaccacgaccggctaatttttgtatttttttagtagagacagggtttccccacattggccaggctggtctcgaactcctgacttcgtgatccgccctccccgggttcccaaagtgctgggattacaggcgtgaaccactgcgcctggccagagtaacctcttgaagttccctttcgatttgattccttggtggaggagacctttagtctccgcccacttactgccacctggccctacccaccaaacacctgatgggtgctgacgtccgagcccagtctccaaacactctgttcgagcttgggtgggaagagggagcctctgggattctgctgggctgggccctgaaggcaggagtggacgagaaatggatacggtctaggctcagcttcccggctrcgcagtgcgttctgtgaaggacggactcatttctacattgacagtcttagcctttgataccagaagtcgcagcacttagggggaaaaatgctttttggtaattataattagcgacatttggttgttaccactgctaaatatgtctgtctttgctgaggagccaatctcagctcggatcagggtgagtggataggagaaataaatctcggcaaagacagcgaggggcctgagtgcgaggaagaactcccagagaccgccagccacctcttggggactcacagcgctgcggaggcgagtccagcattctagccagccgcgcacggacgtcggttcccagatgcgccaatgccaggtctctccagcccggctggccttttcagcagcagcagcagcagccgcaggaaagcggccagacaaatcccacccccggccccgcccgtcacatccatcttgctccccaggcgacgctttctcggagaagcgaggggcggggaggggaaatctaagcctttgggggttgccgacaggtgtttgggggagaaggcggagctggggtagggaggatgaggagggaggggcggtgctgcccctttaagaggaggcggccgagccgggatctttttctctttccccggaaggaaagcgcagcccgggctgggctcgcaaggtggggaggtgcgggactgggcgtggggaggcggggcgcgcgccgggggacccctccctcctgtcctccttgcggtcgaccggtgcgcttgccagatccgccgcgaagccgggatcgaaggcgacagcgcggccaagggggcgcggccgggacaagctgggggccggttgcccggggcagggacggcggcgacccggccgctggggaggcaggaagatagacccacggatcttaggaagggatccgagagcgcagctgtgaaactggctggggctgggggcacgaaaccgatcagcgctacggagcgcagcggccggcgggttccagtgtcctccggcggcgcggggagcaggtgaacaggtcctcacgcccagctccgcgccctcacgcgctctcgccgggaccccgcttccgctggcagccatgggccccggccccagccgcgcgccccgcgccccacgcctgatgctctgtgcgctcgccttgatggtggcggccggcggctgcgtcgtctccgccttcaacctggatacccgattcctggtagtgaaggaggccgggaacccgggcagcctcttcggctactcggtcgccctccatcggcagacagagcggcagcagcgctacctgtaagtgaagctggagggtgtggggtgggagcgagagagtgtgcgagcgcgggatgcgggtccggagctgagtcggagcccagggcagctggcccttgggagccaggattaaggggcggccctctggctgctgggggttggcgggaagtggaggattgggtgtggggtcgggcagtaatcattggcaagtgctgacggggccagaacctgtctggacgccacccctccgccctttagatctctcatgagagcggaagtggggtcccggtggctgagtcctctcccattctgtgaaccgagtacccagcactagcctgttctctccagggctgggagctggggtaaactgcaagataaacacccagcggactccccccttcccgtacgcttgggggaaaaatgagcatatacatttaagcacctcgctggtagtctgcggccacgccagccacaccctctgcagagccagactggatggccttctcaaccgctggcttggcggatggagggtgaggcgatgggtgagtctgggcgtttggagctgtccatacgctccctctgacgccttgaggataggggcggtgaaagagagaggaggacttgtcccaactctggctgggtctcctcctgcccacccgcaagcagtggcactctccccgcagacatcttccctgcattccacagattcgtgttggatcttcaaccctgagtgtgtttgttttggtttgaagagggaaacagtgtttttctctttcttctgttctccttccccaacagctgcaaggaggaggggaagagctatgcacagtggaggaaggaggaggaggttgcacccagcctcctgggtccccctcactccaccagacgccctcatgcccaggagcatgtccaggcttcagaggtctctctgccgtggcctcagagcgcgcggaggttggcggttgggggaggtgaagctgtccaaagagggacggtgtttaggacaggttaagcaggtaccatccaccactttgggctgggcgatctgccaggcatctgcccccacctagcctctgcccccacctggcctctgaccccactgaacaagaagacgtggtcacatccagggtacactggaaaatctccctgctctggctggggcctgcagagcttgaggaagyttagaatgtccaaagtccaaactctgcccccgccttggttctgccctcctgacccagcctacctacctggacttaacctcaactccatcttgctcttgcagaggctagggctaccacacccttcccagcctggccccagcagctgccacctggccttagccaaccctctatcttttggagatcctgagccaccatgagcacaagtttctacatcagctctttctgccctaactgagaaaaagattttcagactttcaatgccaaatctgcatgatataagataacataggtaaagagatcagactggaaagaaagagtcaataatgattccgcaacccttttgcctggtgaccttgagcaagatatttcccctccctgggccaggtttcccccaaaasgggttggacctggatctagtgctctttcccactgctgctggcctgtgagaagcaacttgatatggtagagggagaagaggcttggaggtcccatggccagtgtcctgtctcagatctgttaccaatacctgaacctgaatttccgcacatgttggagggaggggaacagcatgccttctgctgggatgttagtggggctgtaacgagataaagtgcgtaaaatcctctgcacatgtgcctttctccaaggagcacctgaaggctcttgcgctgaggccagaacctggatgcatcctcattacccatgggccccgcccagggtggctgagcaaaggggttctacttttctgtctgggaagctggagctggcattcagcctgccaagagcccagaaggttctaaagctaatgaacctctgaggggcagttctctcccttgagtatcctcagtctttcctaagggtggttctgtgtcttggcccttctcttcatctcactaaattcgacccctcggccatttgggagagccagctgggcttagctgcagccagctgtgtagccagatgcaaacagctgcctgagtgcacaactcagaggaactaactagtaagacgagctgcagcctcatattctgttagcctgaaagtctctttggaaaagtgggatggttcgtggtcttggacaggctcttaaactggggttcgtagaaggttttcaagagatgcagggactccctgaaagtgtacccaaaatcgtagtatttgtccactgccctgggggtgggaggaggggagagcacagctttcttgttctccattcataaggcctcagaaatggttagaaacccaggggtgggaccctctttgctgccccatcaccttcatctctggactggggttcctggtccacaacatagggggctagccccaacccagggcccagtctcctagtctgtggaaatgaggggtaaggagcaggcagaggaccaaagtgctctgggcttcttggcaagatgcatgaggggttccttggagggacagggactgttctctgggaggtggttactgacaccctctctgctccagcacctgcactgacattccctcctgggaatccaggcattctggtctggcctgaccctgtgggcctatggggatactgccggtccttctctctctttcacttttgcttggaaatgagggtatctgggaagcccagggcagggtggctcctagaaatgaggtcatgcctgaggtacgcaggagccaggctcacctgccatgctctcctaacatcatgtttccctgggcaaagcaggtgcctggcagccttcaaggttcgtgccagcagaaatgggcacagcagctgtggctggaggcagaaggcctgctcgtgtagtatctttttcctctggctctacccagtgaccagtctaggccaagaggctttcaactgggcaggagtaggggaagcctgatcttgtagaaaaagcagcagcgaagggggcttggtcagaagtaaacaaagaaggaagaagatcccctttgcagtaagaggaattgaggttagatgacacttagaatgccctcgggggtcaaatayaggaaaaatactgaagagccaaggaaagggagcagaactgagaaaaatggccttgttctttttttatctgaggcttagccagggctctttttcctgtcctttctcattctctctctccctccagcttgttgctctggttctagggctgagtcaccagtggggagagggggctgggtgggcagcaagggaagggtcaggaaggatggggagggctgcagtttcagctgccacagggccggcctctggggagatggctaattcgggcagcaaggctggcatagagctsggatccaggcatcccagagctgcccccaccccttctctggggctcagaggtggagcaggcaccctccccacctgcctcccggccggggataggaggggaacacaggaggctaggtacccaaggagtgaggccctgccatgttggcctgagtgctagatcctttggccccctctggaatcctcccatggagccaccaagtgcctccctgaggtgacagaatctgggaaggtgaatcttacaggctgcttctctgagcattaccccaccccagtgcccccaggggccttctcctctttgaggtgagccaacctggtaccctgaattctcctgggtactgtgccgcgcccttctttgattcttctgctttctccttggctgttccattagctctgaactgccccaaggggagtgatagggcaggggtaaggaagggctttttcggaacttggagctcaaggggctccgcagaggccaagaggggctgtttggctggagccaatgggagggtgaggaggcagctgttggaaagcccttgagtagtcacttcacccatcccactccatctggggggctgggggtctctgctccccccagtccagcctgactccaggagaggggcagtcccatctcctatcttccttgctctaagagctccatctaggcatccctccacctactctccctccttctggctgcagctgaggggatgggttcagtactgctctggaaggggtcagcttttggattttgtgatctggaccagacctaaaagcaggtggctggcagaattgctcatttgtgtactaatttgcatttcatttgcatacagtaaggtccctctcaccttcaggattctccaaccccctccgcacacacctgggtgtgtgtggctggaggaagctggaaccaccctctgcacacccgccttcccccatccatgtgcaggcctctggctgtagacccattggatcctgggctgggagccagagggccttaaagggcctctgagtgggccaagtggaagctaaaaatactctgggggggtgaagcgggggctcactctggaatctctgaggagggaggggcctgggatgtagggctgggattagggcactggccctgccctgccctctatcagtaggcataaggctggttccaggcaacaggcaggagggtattggtggtaaggggaagtatttcaatctgattgacatgcgtgcccagctctgcctgctcagtaccttgggaagttcagaggagggagtcccttagccccttcctggctgagttgagggggctgggagggcatggagacccttttgctcagctgcctcctgtatgacaacatgggcagggcagcagcagcaacaagggggcaacacttccattacaggcgtgcccaaggcccggcctcccactgaggcccggaccccttagtgtcactgtagaaaattcccaacctccacctccagccagatctgagcccccgctgtagagtgactctagctgccagcgctcccaccctgaccccagtgatcacctggtatcctcaagccatggaagtcttcctatgtctccctgctgatctctctaaaccaccaaaggagtctcttcttttccctctgctccaggttccctaacatgccagggcagaaattcctgggtccagccaggcacggtggctcacgcttgtaatcccagtaacttgggaggccgaggcgggtggatcacctgaggtcaggagttcgacatcagcctggccaatatggcgaaaccccatctctagtacaaatacaaaaattagctgggcgtggtggtgcatgcctgtaatcccagctacttgggaggctgagtcaggagaatcacttgcacccgggaggcggaggtggcagtgagccgaggttgtgccactgcactccagcctgggtgacagagcaagaccctgtctcaaaaaaaaaaaaaaaaagaaagaaaaaaagaaattcctgggtccctggagggagggctggaggcatgctagrccagtcctgatgccacaacaaatcrgaacaacaatgctcacattagctatggcttcatatcagaacacctttttgtagaatagacctatttgttcctctagcaaccctggaggtcagcaggagaggggctgcccccattttacagatggggcactcagggctcagagaaggaaaggaaattgccccttcaggcagaacaaaccctagacccaggtccgtgggttctcaggctgagatgctcctttcccgcaggctgtgggtcccttctctcatctgtcaggcacgccagagagcggatgtccatgggtggtcaggcagtggactcatcgaggccttcccagcccagagagaagtgactctccaggcctggctgccaccctggccccctgccagcctccctggccaggaagcttcaccccttctcccaggaacacttccccagggtgaggtctgagctgttgtcttgaagtataggcaaggtcccacccccttcccagcacccgcaggcagtacattcctgactcccagtgggtggagataccccaggccctggcatgcccaggccctgcactgccctgccctgcccagcccactccctgtagcccacactcacaggtcccaggcagaagctacaggcgtggctgttgcttggcacttccagactggcaggaggcccagagcccaagttctgagctgggagctgtagagtgatagagttgctggggccaaatggtggggcacctgggaggtgcctgccacccgagaaggccagggccatcaggattgagcaggggctcctggcagaacatttagaggctgcagggaggtgatgtggggagaaaatctgctaaaactgagttctcaaactggggtgcaccagattccaccagatggtgtgttgtgggcagaggaatctacctttttaacaaagatccccggggtttctgatggcccaaggcttgtcctctaagatggcatttcagggccaacccctgcctctttctgctccagccacccctctggtatgggacrggttgccagggtcctaagcatccttgcaggaacttgctgtctgcatccccaaagatggattctgggcaggctgggagcaaggcaagagccctttccctccccacctgctgcccacccactgggaactctgctctggggccacattgtccaaagtgtcaggtacttatcccaacccctacctgtgtgcctgtcttaaggtaactggggaaggatgttggacatcacccaggtcgcttaggggcccaggtctccaagatctgagtctccacatggcttcaggaggaaaaacccagcgttctgacaacccagtcccctaagttctcccctctgaacccccagaatttgaactctctgccaggattcctcatcttgctctcttctggtctaccttcatctcaaaggccaaagcattccttccaaaactgagatctggccatgtcatgcccctgcctaaaatccctctgtggttcccctaaggaccttcccagcctgcctttgtgtgcctccccagaggctcctggactccagctatgctgagggccttgcaggtctctgattcaccctgctggctcttgcttcctggccctgcacatgtgtgcctttgcccaagtgctcttcctccccttcttcacctggagaaccctggtgattgtcctcagactcagattaggtcacctcttctgctggcctccatcactgccccctcagccctgagcctgggctactgtgctccctgcttcccactcccggggcacttccttctagtgtcttttttccttgcctgccttaccctacactgggcacttctggagggcaggagctggggrtctcctggcaccaagaatctgtaaatgtatgttgaataaataacaagttgttccaagtggggcttggggagtctgaacccggacccacytccgtccctatccccaggctcctggctggtgccccccgggagctcgctgtgcccgatggctacaccaaccggactggtgctgtgtacctgtgcccactcactgcccacaaggatgactgtgagcggatgaacatcacartgaaaagtgaggggaaggggctggggaggggtgctgggtcagaggtctggcaggggggtaccgcagagagaatggcctggaggagatagaaggcttgttcacacggcttctagtcgcttcttgtccagctgggaagagggtgccctagaggagagtggggctggatgggattggtagagctcagaataatgacgagctggagaaggggagttgggagggctgccctgtgggtggagggcccaagcgggacccactcctgccctctggagactttgggcactgaagtatgggtgaggtgcwctgattcatgatccttccggtgcccacagatgaccctggccatcacattattgaggacatgtggcttggagtgactgtggccagccagggcccygcaggcagagttctggtaagtgggtgctcagtgttggctcctccacctctacycggctctcccctcatctccagagctgggaggaaagaagagggcagcagggrggtccacggcgcgtgtgtgctggggcctgcacacatgtcccttcctgtggctgtgtgtccctcgctctctgcactcctggggarggggtgagtatcctgtgctctcccaaacccccgcacggcctgagttctctgactcatccacttcctccgcatgcctacactgggtgctcagccttcgtgggaacaagccgagggagccgagggaactgcaaggaggagaaagggcagagagggccccaggcagctcagcgctggctggcgctccttcctgggaggctgactgccggaagaggcccagccctgctgaccccggctcacccagctctggtctgggggctaatcaaatgtgtcacctcctgcccacattctatagtggcagcccctgagttctccatttctgggtcccagatagacatttccccccgcatttttttctctctctstctcttgttgttgttgttatattccaaaaaggattttgattttattgcttcacacacagaagagttctggttaaggcttgccttgctcctggtgctcatatgatgccaccaggatgtgatttatctcaagcacttaactctgtgttcttcgtgttgcctccattctttgataggcattcttttcgtrgtgccaagatgaatgcaacagcttcagctttatcttctttgaccttcaagttctatagtcccagtagatatctgactacaactcattagctctgactatttcaggtactcctctctgaaacaattactgtgaccaagagaatgcaatacttatactttcttcagacatgaattatcagtatccagataggcacataaactcagtcttagaatgtgttgctttgatgtcaggtttttctcttgccttgatagttccacatggctggggaagcctcacaatcayggtggaaggcaaggaggagcaagtcccatcttacgctgatggcagcaggcaaagagagaatgaggctgtctctctctctctctctctctcttttcttttctttctcttctttcttctttctttcaagatagaagactcccagctgggtgtggtggttcacgcctgtaatcccagcactttgggaggccgaggccggtggatcatgaggtcagaagttcgagaccagcctggccaatatggtgaaaccctgtctctactaaaaatataaaaaataagccgggtgcagtggtgcccgtctgttgtcccagttacttgggaggctgaggcaggagaatcgcttgaacctgggaggtggaggttgcagtgagccaagatcacaccactgcattccagcctgggtgacagagcgagactccatctcaaaaaaaaaaaaaaaaaaaaaagactccatctctcaaccaggctggagtatagtggtgccatctcagctcactgcagccttgacttcccagactcaagcgaccctccagccttagcctcccaagctaatttttaaagtttttatagagacagggtctgactgtgttgcccaggctggtctcaaactcctgggctcaagtgatcctcctgccttggcctcccaaactgctagtgctaggatttcaggcgtgagccaccgtatgtggccccatttttctttttctttcttttttttttttttctcttagagatgaggtctggctctgtcacccaggctggagtgggtgacatgatcatagctcactgtagccttgaactcctgggctcaagtgatcctcctgcctcggcctcccaagtagttgggattataggcaagagcaacaatgcctggcttttttctcattttaaaatttgatgtggccaggctcggtggctcattcctttgggatgaggcaggaggatcgtttgagcctaggagtttgtgatcaacctgggcaacacggcaaaattccatctctaccaaaaatatataaattagcccggcatggtggtatgcgcctgtaatcccagctgcctgggaggctgaggtgggaggatcacttgaaccccggagagaaaggttggagtgagctgagatcatgccactgcactccagcctgggtgacagagtcagatcctgtctcaaaaaggaaaaaattgatgtaatgtttacatacagtgaaatgtacagatttcaaacttcaatgaatttttacaaaygtatgtacctgtataaccaaagatatatcttaaaatcactccagaaggtgcccttgtaaccccttctaatcatttgccaccccataagccaccactgctgggatttctgtcacctttgaacactgttttaagctccaggttggcatcagttcactgaaatgcctttttgataaccctgttatggatggctgtggtctaggagcccatttaaagtgattctgcaccctggatcctttagcagttatttactcactgttcattcaacagatatttggtgagcccctactgtgtaccaaacactgtgctattcctagaagcttagcagtgactaagacaggctcaggtaacatgctggtggagctcacagctagaagggaccacagaaagcaagtaaacaagaaccagggcctacttctggactttgcctgtctccaggctgttttaagtcaccctattctggcccatcagtttgcccaataaatatatactgagcagctaaagtgcacccagagaggctgcgcatagattctcccctccgtgaagcagcacagcatgtgcttaagagctcagattttggaaggagacagccttggtttgaatattctctgcctctctctagatatgagatcttatgcaggttactgagctctccatgcctcagtttatctaaaatgggggaaataatcattcctacaccatagggtcactagcaggcttaacacttaatatgtgaggagttcagaattgtgcctggcatataggaagcactcatgaagtgttagctgctgctattattattaccgtcattgtaattattattttaataatggtcctttcattaagaggacagggtcatctggagatggcagagcagcaagtyccttaatctctctgttactaaccccttctagaccaagagcctgaaccccacagtctctcatccttccctgctttccctttgctgagatctctaagccactctcagatccacactttacagctttccaaaaagtgttcctgaccctcagagcagatttctgaattctggaaaggagatgcaggtttaagtatcactgggagaaggagaagccaggagatctcctttgactcctgtttggcaaagccagaggcttacagggtaaaagagacagctgacccgggtccctgtgcctgactaaggctgcctgtgtttggggggtccccaggtctgtgcccaccgctacacccaggtgctgtggtcagggtcagaagaccagcggcgcatggtgggcaagtgctacgtgcgaggcaatgacctagagctggactccagtgatgactggcagacctaccacaacgagatgtgcaatagcaacacagactacctggagacgggcatgtgccagctgggcaccagcggtggcttcacccagaacactgtgtacttcggcgcccccggtgcctacaactggaaaggtggggaccatggggccatgggggaagaaaggaagagcagagaccacccacccctagttagccacggggacagctggcctagaccatccacactagaaacaggacctcatgccagtatcagcaaccaccatgacttctactgttttaaagcacttactatgtgccaggggccttacgcatattatgtcaatcaatcttttttgttgtttttttgacatagggtctcactatgtcacccaggctggagtgcagtggcacattcatggctcactgcagcctcgacctccccaggctcaggtgatcctccaacctcagcttcttgagtagctatgaccgcaggcatgtgccactacacctggctaatttctgtattttttgtagagatggagtttcaccatgttgctcaggctagtcttgaactcctgggcttaagcaatccaccctcctcggcctcccaaagtgctgggattatgggcatgagccaccatgcccagcctcaatcagtcttttttatttatttatttatttatttatttatttatttatttrtttwtttttttgagacagagtctcactctgtcacccaggctggagtgcagtggtgcaatctcggctcactgcaagctccacctccagggttcacgccattctcctgcctcagcctcttgagtagctgggactacaggtgcccgccaccaygcccggctaatttttttgtatttttagtagagacgggctttcaccgtgttagccaggatggtctcaatctcctgacctcgtgatccgctcacctcggtctcccaaagtactgggattacaggcgtgagccaccgcgcccagcctaatcattcttaaaatactcttatgaggcaagtattattatatccattttacaaaaacaaaaactaagacttagagaagtaaattgcccaaggccaacaaagttatgaaacctggattggaatacaggtccatctgacttcagtttaaccatttacaaactaattctaaaaataaaacatgctcctggtacaaccactacatagtacagtaggcaatgtcctataataatagttatcgccaggtgcagtggctcatgcctgtaatcccaacactttggaaaactgaggtgggaggatcacttgagcccaggagttcaagactaacgtgggcaacgtagggagaccttgtctctacaaaaaatttaaaaattagccaggtgtggtggcacacacctatggtcccagctactcaggaggctgaggtgggaggatcgcttgggcccaggaggttgaggctgcagtgagctgcgattgtgccactgtcctccagcctgagcagcagagcaagaccttatctcaaaaaactaaataaatatcgctactttctctctttctcktatcaaaagtcatgggcactttttcatgttgatatatataggaccatcattttagaggatgaagggtattttcttgtaaaagaccatgcttgtaaaagaccacactacacatggtctcacagggggtgtctgacagcttatactccctccatctctttgcctccctccatcacacaggttgtagcaatagggaccccttttcccttactgaacctttattgttgtagaatcagcaggcagaggagccttgaatctcctcttgaccaacatgtagccccaggcatagtcacagctctgggctcaccgaaggctgaggcctctgccccctcttctggtcctgcctcccaccccctggtcatgtagcaccttggcaaagtcacagatactctccagcagcagccctgggtgcagggtccagctaggcagcccgagtttggggtcaggaccagaaagagataatggtgtggagtctgacctcagtgtctagagagtggggaaagccatctagcatctaatatccaggagcctgagtgattaagttctagccatggctctacaaccagctccccatgggactatgagcaagtcaacttccctcctgagcctcacttatctgcaaaatgggggtcataatttaacctcaaataattgttataataggccaggcacagtggctgacacctgtaatcccagcactttgggaggccaaggcagatggatcacttgaggccaggagtttgagaccagcctggccaacatggtgaaaccttgtctctactgaaaatacaaaaattagccgggcatggtggcgcatgcctgtaatcccagctactcgggaggctgaggcaggagaatcgcttgaacccaggargcggaggttgcagtgaggcaagatcacaccattgcactccagcctgggcaacaagagcaagactgtctcaaaaaaaaaaaaaaaaaaaaaaaaggaaaaaagaattgttaaagaggatgtgttttataaatggcaaaatgctcaccaataaaaggggttattactatccttgttgggtgggggtgggggtgggctggacatggtagaggaaaccagaaaccggtggtgacttatactccctactctccctccctcaatccctgtgaaggaaacagctacatgattcagcgyaaggagtgggacttatctgagtatagttacaaggacccagaggaccaaggaaacctctatattggtgagtacagtagtggtagcccatcaagtggtagrggggaagggggcttagtccctggtggaaaggtgaggccagagtgcagttgtgactaatggcatttagttaaactagcacacacrgattggccrgcacctgtatgccaggccctgttccaagctcccmagatgcaaagttcttgacttcaggatgctcacagtccagtgtccaggcagaactgggccatggctgctggccatctggagtctactttcttgccctacttggaatagtgggatagaacatcatggtggggggcaagagagggaatagggagatgggtccagagtagaaagagacgaagttgactgggaccttggttgaacatcttccctctatcccagggtacacgatgcaggtaggcagcttcatcctgcaccccaaaaacatcaccattgtgacaggtgccccacggcaccgacatatgggcgcggtgttcttgctgagccaggaggcaggcggagacctgcggaggaggcaggtgctggagggctcgcaggtgggcgcctattttggcagcgycattgccctggcagacctgaacaatgatgggtgagaatctagggacatcctctggggccagggagagcgawgggcgggggaaggcttacctaagccaggtgaggggagtggaggatttgcagttgtgcggctgtctgcatgttgtttgcagaggtttgcagtcaggctttatgggagtctgagcacctgcacatggcatttgtgggacccctgcgtttgcttgtttctgcttgggatttgtatgctccagtggatgtggattgtttgggtttgatttgtgcctgcatggcgtctccatgacatatgtcttctatttggtgggtcatattggcatctccatgtccttcccatgcacatgtccttcccacccatgacctgtggccggaagagccatttgcagagccctgtgccctggcacagtcacacctgtcaaacaagaactatgctgcatattggaggctgacctcacactcccatttccctcctctcctgtgtaggtggcaggacctcctggtgggcgccccctactacttygagaggaaagaggaagtagggggtgccatctatgtcttcatgaaccaggcgggaacctccttccctgctcacccctcactccttcttcatggccccagtggctctgcctttggtttwtctgtggccagcattggtgacatcaaccaggatggatttcagggtatgagccagcactcctcccccagcacccctcctccagcacccctcctcccagcacccctactgactgagcaccagctgcacatcaggcttgacagggcccacagatgagacaggatggggccggacctggggagctcgmagcagtactagagagaggatgtgcagatgtgcagaggaagcacagaggcaagctcagtgggcctcctggaggagcttgcatgccactgtgcagccaaggctgggctgagagtgcacagtagagaactgatggggcacaacatgggtgtggaaactggcctggtgtgcccaaatctagcgggtgtagagtgttcacatcagagaggaggctggagggggagtggggtggggtggggtgaggatggatgctttgaaagccaggcagagtatcttagggatttatatttgggtaatggtgatggtggggtcatggggcatccagagaaagttttagggcagggatgtgatataataactttgtaccctgaaggatgattctggaaggggtatggaatgagtgattgcagggatggagcaaggccaggggagttaagatcaagaatgtaatatctcaggtgggagatgataaggaatgggacaaggtgggagccctggatataggggtcctcataagtgttctgcaggacttggggaccaatcggacctggggtatcagggacaggggcagacccagggctggagtcagtgccatgggggcacctggcttatctgaaagtcacttctctgataatctcagtttcccaggacatagctgagaaccaagaggaaggcaaaggagcctctgaagacccaaaataggtgccagaaagttcagtcaccagaggccaagtgtgcactgtggaaatcatttggtttcggcctgggacctgcttctgctccctttacaggccttactaacaagcttggcttgctgattccctaggccttatctgatccaaagctgcaaactggaaagagttcagtttaagaagataaccaaatacttgggggttatttgtggagataatgattagaatgtaaaaagccttgacactttcagtgaagttcactgtagtgttgtggttaaaatcccagcccctgctgtgagacagccctgggctcaaattttctcttttctacactcattagttgtacaactctgggtttttggagtgtctcctcatctataaagtggggggataatagtacccaccccacagcactctcgtgaaaattaaatgaatagctgggtgtgttggtgtgtgcctgtcccagctacttgggaggctgaggtgggaggatcccttcagtccaggaggttgaggctgcagtgagctatgactgtgccactgcactccagcctgggtcacagagcgagacactgtctataaacacacacacacacacacacacacacacacacacacacacgcacacacgcacacacactgaatgcttgacaactgtctggtagagtcacttgtcatctcctgaacctactttcccacccgtgataggaggaagctgggctccagatggtcccagtgttcatcctgagctgcagagctctgctctgtccctgatgctctgagccctgcccatcaatcaggccaagatcagttctgtgctgggctgtatggcctggagcaaagagttagggagacgtggggcccagagtacctgggtgaccctgtcttgccttttcttctgcagatattgctgtgggagctccgtttgaaggcttgggcaaagtgtacatctatcacagtagctctaaggggctcctyagacagccccagcaggtacagagagacggggatgggtctgctgcccccaccagccgagatgggccttccttgctttccttcacccaacccttccctgtagccccctgggccctgctccccagagcctgcccccaccactttcccctgcccccaggtaatccatggagagaagctgggactgcctgggttggccaccttcggctattccctcagtgggcagatggatgtggatgagaacttctacccagaccttctagygggaagcctgtcagaccacattgtgctgctgcggtragccaggaggccagtgaataagggtctttctcttcttcatctttgtctgcacagattcccatctgtgtccatgtttgcgctagctccttggaagcctgggccccaactstggcctggggcaggcaggaggcactgatatctgtctggctctgttgtctctgcagggcccggcccgtcatcaacatcgtccacaagaccttgrtgcccaggccagctgtgctggaccctgcactttgcacggccacctcttggtgagattgytctgcccacctactcctcatttatttatagggaggctaggaggggctgcagctcccaaacccctcccytggcctcctgacatcccacctttagaaatttgattmttggggccagcatttgccctctctacccaacctcattaaaaagcaaaattccttgtaagaggtaatggatgaagtcgggggcagtakagtatagtggttcaaggtgggagctctggacggcctggttcaaatcccagctatgccagtgcaggggtggggatgggctctggaaagggggacgcatttaagtggatggatatggaggagagtctcctcaggtgaattattaatccctcttaggctcagatttcttgcttgtagaacagaattgataataactgattcacagggttgttgtgataattaaatgagaaaatatacagaaagtccttagcacagcactgtgtataccctaagtgctcaaaaaatgttagttgctaagaaagtgacagtaatgatggcgatgaccccaaggtctttaagtgaatgaggattttggatcagaagacaaaggcagacagagcagggaaatggggtggttggtgcaaggagacctggactggggattggccgacctaggttcaagactgggctgggccaccaactgactgaggacttcagacaagtccttctgggccctaggcctcagtttccccattagtgacctctaaccctgttctctttggctttaaggggagtggaagggaaggggtcagggacaccacagacctgctttgtggactccccagttttgtccctgcctctctccagaagggcctcggtttccttttgcccagtacagaggcgagagctagggcctggacgtgtgtgtcccactgtgaccygccctcctgtacatycctccaacagtgtgcaagtggagctgtgctttgcttacaaccagagtgccgggaaccccaactacaggcgaaacatcagtgagtgctggggtgcagcgtaaaaggggtacgctcccctgtccccttgctgaccaccctgtctacctgtagccctggcctacactctggaggctgacagggaccgccggccgccccggctccgctttgccggcagtgagtccgctgtcttccacggcttcttctccatgcccgagatgcgctgccagaagctggagctgctcctgatggtgagggaggagcaagggtcaggatgagggctcccaggtccctggaggaggtggccagtgtccccctagatcaagggtgagggacgggggtctccccagagacagaggttggggacatcggtttggaaggctattggtgtgtaggagtacagtgtacagcacccacacatgaggagtgatggagacccttggggtggggatggggccaaagggcttattacctccaaggaaagtgaggagtgtgggagctcttggctcagcccacctctgggaaaaggggtccctgagtagggagcaaggtcagtccctctctgggacatcagggtggaaggggagagctcaacctggagaccctgtggatggggaggtgaagggacttttgaggaggagaagccctgtctctcctcttggagggtcaggatagtaggaagtcgcaatttggcgaccggactggagggagttcagcctaactgtcaggttttcagggtggggggcgggtccagctcttctctggggttcagggtggtgtgaggattcagctggggcagggagcagtgcagggccgggctcagctcaccctctctccccaggacaacctccgtgacaaactccgccccatcatcatctccatgaactactctttacctttgcggatgcccgatcgcccccggctggggctgcggtccctggacgcctacccgatcctcaaccaggcacaggctctggagaaccacactgaggtgagtggggctggcgcctggactggaagaccaggggccagaagggcggtggggcgagagggcactggggggggtggtgcggccytcacacctccggccaccccccaggtccagttccagaaggagtgcgggcctgacaacaagtgtgagagcaacttgcagatgcgggcagccttcgtgtcagagcagcagcagaagctgagcaggtggctgtgggccgccggccgcgttaatcggccaagggtgggacggggcctcattaactggcagggtgggggcggggcctcatggcaaggcgagcccagggacagggctttagcgggaacaggtgggatggtcagaaacggggctttctcctccaggtgcgactagaggayggggcctggctgtcccaagatgggcttttctcacctaggagaccccaggggcggggcctagttgatccgggagkgccctgggggcggggctcttggctgagtcctgggctcctgctctcaggctccagtacagcagagacgtccggaaattgctcctgagcatcaacgtgacgaacacccggacctcggagcgctccggggaggacgcccacgaggcgctgctcaccctggtggtgcctcccgcyctgctgctgtcctcagtgcgccccgtgagtgcccgccggccggctcagagcccaagcagggctccccgcgtctttgcatccccatatccatgtcctgtgcaggtgttgtcgtctgccacgtgcccacctcctctggtctgggccttcttgggggcmttagcgtctctgctgcttggagaatccggctctcaagctctagggcttctgaccttgcaccacagaggagggaggacaagccctactttgacccgaccctgaccttattcgccttctttcctcagcccggggcctgccaagctaatgagaccatcttttgcgagctggggaaccccttcaaacggaaccagagggtgagcaccggccacatcctcccagtcctcctgggtccctggctgcacctctgatgagctccttgtccttccagcctctgcctgcctgctttctgggctccctcgaagtggagagccacagtgcgggaggagagactcagtagagggtgagaagaggcccagaaactaagacaaatggggctgctagggagctgtgcacaaagctagagcaggtggaggggaggaaaccagtttgaccaagcaccaactgtgtgccagcccctgagcccaacactgtgcttctttgatatgatataattctcacagccttctgaggaggtagatgctcttttacagaagaggaaacacacacttagaaagtttcagttacctgctcaaggttatgtagctcaaaagtagcagagatgtgacctgatggagagaaagggggaaagggaggcagaggtggggtggggaggtagagacccctcacccagaataggaggaggaggagaaggccagaaagccaactagaatagtgtgcatcccctccttccccatgacatcacccccgccaggccccatatgccactctctgcctccctgacccttgtggcagatggagctgctcatcrcctttgaggtcatcggggtgaccctgcacacaagggaccttcaggtgcagctgcagctctccacgtgagtgacctcgaaaagccagtctgggtcagggctgaggtatcttggatcaccttcctaacccctgcatttcctcccaaggtcgagtcaccaggacaacctgtggcccatgatcctcactctgctggtggactatacactccagacctcgcttagcatgtgggtaccgctctccaccacccccaccccagcctgctgtgcctaagctagggttccctatccccaagctatctcccaaactcctctgacccctctcttggcccagtgtcctcaggcctccaytttccctggatcatccttttcttaacaacracaatcactatcrttaccrttactattccccctgtaaagcaggcagaaatggaggaatcagcaaccccggggctaaggtgttgtccctaccattttataagagctcaytgtgctaaggattttatatacatcatctcaatgacttctcacagcagccctgtgatacaacagctatgattaagtccattttacagatgaggagactgaggctcagagaggataaatagcttgcttgagtccataaagcttgtaaatgcagagctgaggtttctattgaggtgactgatgtcagaggggctatagttagccagctttggtgcccacccccctctgccagggccctggtctcttgtccccygtgactccagcatccttcttaccccwagggtaaatcaccggctacaaagcttctttggggggacagtgatgggtgagtctggcatgaaaactgtggaggatgtaggaagccccctcaagtatgaattccaggtaaggggctcgccagagtcctgggctggggacttctaggaaggattatttttattttctctggggtctgaaggtgggagggttgggggttggtaagatggaggtggttttccaggagataatgactatgacacatcttgtgcccacaggtgggcccaatgggggaggggctggtgggcctggggaccctggtcctaggtctggagtggccctacgaagtcagcaatggcaagtggctgctgtatcccacggagatcaccgtccatrgcaatgggtcctggccctgccgaccacctggagaccttatcaaccctctcaacctcactctttctgtaaggacactatcagggatatttcatttgcatgctacagggcagaaaggccagtgtcttcccctccctcccctcatacccctttggcaagctgtctctcctaccctttcctttcctgcaaccctgctcccaattcttcctctgccctgccagcaaatctcctatttcctctccaggaccctggggacaggccatcatccccacagcgcaggcggcgacagctggatccagggggaggccagggccccccacctgtcactctggctgctgccaaaaaagccaagtctgagactgtgctggtgagtggccagggcgaggttggaggggattgcatccaccccatcacagggtgcctgggcaccaggggcacacaaagcaagggagacctcagtgtgatgaggtgatgaggcccctgctcttgggagcctccagacagagcagggagcctcatctcctgccctcagagggttctccactctgatgggggaggattgaagacaagggaccaaaggaggaggcactggctctgctccaaggaaccccagcctgttgggggcgatagagctgctcagagctttggccggcaggaggcggtgtcgggcagggcaatggtgggtggtgcgtgtgccctctgcaggaaaggagaggagagcgggcctggcaagccggttgaagcctagctgggtggagagtgggaggtggtgtcccaggggcagggagctggctgggaagcaggtgtaggcggttgggccctgtttacacaagcaggggccagattccatgttatccatgtgcctggcattatatgagcttggcccaaagagtgtgtctgaaatgcatagctgtgaggttgggggacgtgtgcatgagtgaaaggawgtcagacccctttgggtcacccaggggtgagacaaagcctggaaggggcgggaggtaaggagcaaggcatgaagaatctggagactcagactatgtcacgtcttgcrttccctgcccgcctcagacctgtgccacagggcgtgcccactgtgtgtggctagagtgccccatccctgatgcccccgttgtcaccaacgtgactgtgaaggcacgagtgtggaacagcaccttcatcgaggtcagtgcctgggtctgaaggtctctcctaccatccaccctgagggggagaacaacagggagagggcgagtccagggtcatagcatgggkgtgtgtgtgtgtgtgtgtgtgtgtgtgtgtgtgtgtgtgwgatttgcgtgtctttgcatggatrtgtatgtgtttgtccccagccaaaatgrcctttctcgtgtccattattctgttatgtgtccattactgtcccacctccatgcctttccccagggtgttccttaaccctggaatgctcatttcccctcttttatctctgcgtgtaaacccctatttygttttcaaggtccctgtcagatgcttcaccatcagtgagctcttttctggcttttccagctgaaaatgacctctcttccaatggccacccacctaactttctcagaagccacacatgccatttatcacgctcgactctgggttgcaatgcctcacgtgcccactttctcatgccatctagaccaaactttttctgtacatgactagattagaaatcttttcaacttggcgggccatagagtttctgttgcaactactcagtactgccattgcaccacacaaacagccatagacaaatgaatgggtgtggccgtgcgccaaaaatacttcatttacaacagcaggtgccagtccagatttagcccacaggcctgacctagactgtgaccttcattgtttcggttgtccccagcatccagcacaggacctgacgcagaaatgaatgaacaaataaatgaatgatgcgcatttgtgtgtggaggggaggcctggctgacagatcctttggggtgctgtttaaggatgctacttggtgggagggtgatggggtgggaaagcttagggtcggaggtaggctcagagaagtgtcaagtgttccccttgacccaccccactcccaatccaggattacagagactttgaccgagtccgggtaaatggctgggctaccctattcctccgaaccagcatccccaccatcaacatggagaacaagaccacgtgggtgagtgcgcatgttcactaggacagcagtctccagccagagcttgagagtacagggcatcttttaagagsacactgacgcacttcagccatatggttctcaatcttggccacacggtaagagtatctggaggagttctggtgtctggactgcacccagagcaattaaccccgggtccctgggagtggattccgggattgctgtgtttaaaggtcccccaagtgatgctaatgtgcagccagggctgagaaccactgcattagcttccttgatctgcacaacgcctccatgaagagtagggctgggactgcctctctattttrtggctgagaggctgaggcctagagagacttgagtggcctccccaaagtggcacagcttgtcaggggctggaacgtgggtctcctgattatctcacccattgtcacrtccactatggacctgtgagcttcccgccacgggcaatatgtatgtatagagagaaaggcaggatatcaaggcagaatggagggaggttcagccatgagaacctggtgagtattgacagatgatgtcatcatctacgtggcagaaaagagaagcaatggaaaagctattattttattttattttgcttcagagatggtgtcactctgttgccccagctggaatgcagtgtagtcctgaactcctgggctcaagaaatcctcccacctcagcctcctgagtagctgagactacagccatgtaccacgatgcccagctaatttatttctttattcatgtatttatgtatttatttatttatttattttttgagatggagcctcactctgtggccaggctggaatgcagtggcgtgatcactgcragctctgcctccctggttcatgccattctcctgccttggcctcccaagtagctgggactacaggcgcccaccaccacgcccggctaatttttgtatttttagtacagacagggtttcaccttgttagccaggatggtctcaatttcctgaccttgtgatccacctgcctcggcctcccaaagtgctgggattacaggcatgagccactgtgcctggcctaattttttatttttagtagacatgaggtctcactgtgctgcccagcctggtcttgaactcctggtctcaagtagtcctcccacctcagcctcccaaaacactgggattacaggtattagctaccacacctggcccaaaaagttattagacccaataagataattcaggaagtccaagaggtcaaaacaagatcaaaatacccaaaccccctaggtttcctacatgctagcaataaccaatcaaaaggatagttgaaaagatcccattcaaattcatcagaaaagtgatagagcatctgggaataaatataacaaatatgcagcaaaaacttgagaaatgattagaaaaaagtcaatattgtattatcaagttgtcagatcttccacccaaattattccagtctcagtaggattcaggaaacttgaaaaagaagttcccaatcttgaatctgagttgcatctagaagaataaatataaaattgctaataatttgttgtgaaaaggatataagtgaagatacgtgggagatacttatagggagatgaatgcagggttggttatgtacattattgtacatttcctaagatcaattaatgtagtatagaagaggtagaagaagggccagaaagatcagtggaacaaaatagaactttatggtacagatggcatttttaatctgtggagaaaggtagattattaagtagtgttgggagaacacatttggaaaataaagacaaacctctacttcacaacataaacaaaaatacagttagattaactatctacatgtagcaattaaaacctaacatgccaggatacaatatacagaacactttaatagtaacctttaattatgggaagagtgagttataaacccagaagtcacaggaaaattttgataaattagactctatgaaaatttaaatctgtatacagcaaaagagatagtaaagaaactaaaagaggctgggcacggtggctcacacttgtaatcccagcactttggagactgaggcaggcaggttgcttgagcccaggagttccacattagcctgggcaacatggtgagaccttatctctacaaataaaaacaaaaattagctgggtgtggtggtgcacacctgtagtcccagctacttgggaggctgaggcaggagaatcgcttgagctcaggaggttgaggctgcagtgagtcgtgatcatgccactgtattccagcctgggtgacagagtgacatcttgcctcaaaaaaaaaaaaaaaaagaaactaaatgggcaaatgatatactgctttttaaaaatgtttacagcatatatgacaaaatattgatatgtattttttaatatataaaggatatcaattggcagcgtacatagggtgaaatacaaatgttcatcttgctcataaagaaatataaatcatagcaacaagatttttcttgcctatcagattgggaaatattaaaaaaaataatgctggccaggcgctgtggctcacacctgtaatcccagcactttaggaggccaaggcgggtggatcatttgagttcagttcgagactagcctgggcaacatggtgaaaccccatctgtattaaaaatacaaaaattaactgggcgtggtggtgcatgcctgtaattctagctactcaggaggctgaggcagaagaatcgcttgaacctaagagagaaatgtagtgagccaagatcactccactgcactccagcctggacgacagagtgagactctgtctcaaaaaaaaaaaaaaaaaaaaaaaaaagaataatgctgtctaatgctgatgaggtggagagaaatgctattgatttggatgataaattggtagattcttttaggagacgaagttttcagtatctattaaaatttaaagtgcccatttccttagatccagtacmtgagaatatattgtaaggagctaataggacaagtatacaaagataaatatatggggatattttagataattatttataatggcagaaagttggaaacaatctaaatgtctttcagtaggagattggttcaataaattatggtacatttccttcaatgactgtgcagtcctcagaagagattaggctgatctttaccaattgacgtgaaaagatgatgatattaagtgaaaaaaaaacaggttgctggctgggcatggtggcttatgcctataatcctaacactttgggaggccaaggtaggaggatcgcttgagcctaggagtttgaggctatcctgggtaacaaagtgagacccatctctacaaaaaaaatcaagaaattatctggatgtggtggcacatggtcccagctacactggaggctgaggcaggagaatcacttgagcccaggaggtggagtctccagtgattcatgtttgtgttattgcactccagcctgagcaacacagtgagaccctgtcttaaaaagaaaagaaagagaccgggcgtggtggctcacgcctgtaatcccagcactttgggaggccgaggcgggcagatcacctgaggtcaggagttcgagaccagcctggccaacatggtgaaaccccggctctactaaaaatgctggggtggtggcgggcgcctgtaatcccagctactcaggaggctgaggtaggagaattgcttggacccaggacacagaggttgcagtgagccaagatcgcaccactgcactccagcctgggcgacagagtgagactgtcttaaaaaaaaaaaagaaagaaaagggaggaaggaagagagggaggaagggaggttgctgaagggtgtatgtgacatgatcccatttatgtagatcatattaatattccatatttaaaactatggaaagagattcaccagagattacagagatcgtaatttctagatattaaaattactgggaaccagctgggcatggtggctcacgcctgtaatcccagcactttgggacgtcgaggcaggtggaccacttgaggtcaggagttcaagaccagcctggccaacatggtgaaacccgtctctagtaaaaatacaaaaatgagctggttgtggtggtgggcacctgtaatctcagaaactcaggaggctgaggcaggagaattgcttgagcccaggaggcagaggttgcagtgagccaagattgtgcccctgcactccagcctgggcaacagaatggaactctgtctcaaaaaaatatatatattatagatttataatatatattagattatacattatagatttataatatatattagattatacattatagatttataatrtatattagattatacattatagatttataatgtataytagattatacattatagatttataatgtatattagattatacawtatagatttataatgtatattagattatacattatagatttataatgtatattagattatacacatatagatttataatatatattagattatacatattatagatttataatatatattagattatacatattatagatttataatatatattagattatgtatattatagatttataatatatattagattatgtatattatagatttataatatatattagattatgtatattatagatttataatatatattagattatgtatattatagatttataatatatattagattatgtatgttatagatttataatatatattagattatgtatgttatagatttataatagattatgtatgttatagatttataatatatattagattatgtatattataggtttataatatatattagattatgtatattataggtttataatatatattagattatgtatattataggtttataatatatattagattatgtatattataggtttataatatatattagattatgtatattataggtttataatatatatattagattatgtatattataggttttattatatatattagattatatgtttataatatatattaggattatgtatattagatgtttataatatatattaggattatggtatattatatggtttataatatatattagattatggtatattannnnnnnnnnnnnnnnnnnnnnnnnnnnnnnnnnnnnnnnnnnnnnnnnnnnnnnnnnnnnnnnnnnnnnnnnnnnnnnnnnnnnnnnnnnnnnnnnnnnnnnnnnnnnnnnnnnnnnnnnnnnnnnnnnnnnnnnnnnnnnnnnnnnnnnnnnnnnnnnnnnnnnnnnnnnnnnnnnnnnnnnnnnnnnnnnnnnnnnnnnnnnnnnnnnnnnnnnnnnnnnnnnnnnnnnnnnnnnnnnnnnnnnnnnnnnnnnnnnnnnnnnnnnnnnnnnnnnnnnnnnnnnnnnnnnnnnnnnnnnnnnnnnnnnnnnnnnnnnnnnnnnnnnnnnnnnnnnnnnnnnnnnnnnnnnnnnnnnnnnnnnnnnnnnnnnnnnnnnnnnnnnnnnnnnnnnnnnnnnnnnnnnnnnnnnnnnnnnnnnnnnnnnnnnnnnnnnnnnnnnnnnnnnnnnnnnnnnnnnnnnnnnnnnnnnnnnnnnnnnnnnnnnnnnnnnnnnnnnnnnnnnnnnnnnnnnnnnnnnnnnnnnnnnnnnnnnnnnnnnnnnnnnnnnnnnnnnnnnnnnnnnnnnnnnnnnnnnnnnnnnnnnnnnnnnnnnnnnnnnnnnnnnnnnnnnnnnnnnnnnnnnnnnnnnnnnnnnnnnnnnnnnnnnnnnnnnnnnnnnnnnnnnnnnnnnnnnnnnnnnnnnnnnnnnnnnnnnnnnnnnnnnnnnnnnnnnnnnnnnnnnnnnnnnnnnnnnnnnnnnnnnnnnnnnnnnnnnnnnnnnnnnnnnnnnnnnnnnnnnnnnnnnnnnnnnnnnnnnnnnnnnnnnnnnnnnnnnnnnnnnnnnnnnnnnnnnnnnnnnnnnnnnnnnnnnnnnnnnnnnnnnnnnnnnnnnnnnnnnnnnnnnnnnnnnnnnnnnnnnnnnnnnnnnnnnnnnnnnnnnnnnnnnnnnnnnnnnnnnnnnnnnnnnnnnnnnnnnnnnnnnnnnnnnnnnnnnnnnnnnnnnnnnnnnnnnnnnnnnnnnnnnnnnnnnnnnnnnnnnnnnnnnnnnnnnnnnnnnnnnnnnnnnnnnnnnnnnnnnnnnnnnnnnnnnnnnnnnnnnnnnnnnnnnnnnnnnnnnnnnnnnnnnnnnnnnnnnnnnnnnnnnnnnnnnnnnnnnnnnnnnnnnnnnnnnnnnnnnnnnnnnnnnnnnnnnnnnnnnnnnnnnnnnnnnnnnnnnnnnnnnnnnnnnnnnnnnnnnnnnnnnnnnnnnnnnnnnnnnnnnnnnnnnnnnnnnnnnnnnnnnnnnnnnnnnnnnnnnnnnnnnntattatatatattagattatatatattatacatgtataatatatatattagattatatatattatacatgtataatatatatattagattatatatattatacatgtataatatatattagattatatatattatacatgtataatatatatattagattatatatattatacatgtataatatatattagattatatattatacatgtataatatatatattagattatatatattatacatgtataatatatatattagattatatatattatacatgtataatatatatattagattatatatattatacatgtataatatatatattagattatatatataactgggaacctttagttttctttatatcatctgtatttttaaaaaaatcatcaaaataattttaaaagaagtgaaaatcatgtatagtcagaacaaacacggctgggcacagtggctcacacctgtaatcccagcactttgggaggccaaggcaggtggatcacctgagttcaggagtttgagaccagcctggccaacatggtgaaaccctgtctctactaaaaatacaaaaattaattgggcacggtggtacacgcctgaaattccagctacttgggaggctgcagcaggagaattgcttgaacctgggaggcagtggttgcagtgagccgagattgtgccactgcactccaccctcagcaacagagcaaaactccatctcaaaaaaaaaaaaaaaaaaaacctcatatacacacacatccgtatttatctccattgtaggggaagaaaaagaatgggactatcagccgggcatggtggctcacgcctgtaatcccagcactttgggaggccgaggtgggcggatcacctgaggtcgggagttcgagaccagcctgaccaacatggtgaaacctcatctccactaaaaatacaaaattagccaggcgtgatggtgcgtgcctgtaatcccagctactcgggaggctgaggcaggagaatcgcttgaacctgggaggcagagctggtggtgrgccaagattccaccattgcactccagcctgggcaacagagcaagactctgtctccaaaaaataaaataaaataaaataaaataaaaagaatgggaatatatgctatgaattctttgtggggtttttttggtgaatatttatggagtgtttgctgtgtagcaggtgttgctctaagcagttttcttatatcaaacacacttaattctccccagcaacctatgagagaggtaatattcccattttacagatgaacaacagagaggttaagtaacttgccaaggccaaacagctcgtgaatagcaaacctgggctagaacccaggtaatgtggctccagaacccctgcttttggtcgttctgctattctatgaggtagtcattatgatccccctcatcagaaagcagaaagcatgagattcagaggggtgcaattacttgtccaaggtcacacagctcatcagggaaggagctggtacccaggcccagatgtgtgggtcacacacccagactccaggccacctcccagatctgaggccgctcctctggagtcaagtctgtgcctgggagaagcaggaaggaccactggacctgctgtcagtggggcaggcacaggctttttccagtcccaggctgccccctactggcagcaggacaaacagcaggtgcctgggcccagctaggataggaagggtgaggatgggccyaagcaggctgacacagggctgagtcctcctcyccccgctccagttctctgtggacattgactcggagctggtggaggagctgccggccgaaatcgagctgtggctggtgctggtggccgtgggtgcagggctgctgctgcwggggctgatcatcmtcctgmtgtggaaggttagtagcccagcccactcctgctccgggacctccaccagcacactcaccagcccttcctccaacccacgtctccccatcctggtcctcccttccatctcacccccacccttcctccctgtcctctccaccttctmccaccagcttacagkctcacccctggcctgggttagtggggggagctgyaagctggaaagggggacccaggagctctggcttctgaccacaccaccaagctgggactgarccccagcccccaggctccccagccctaaagccctggtccacgagtgctgctggtgaggatagcccagcgcccccctgatggcccgtccccacctcctcccctccgcagtgcggcttcttcaagcgagcccgcactcgcgccctgtatgaagctaagaggcagaaggcggagatgaagagccagccgtcagagacagagaggctgaccgacgactactgagggggcagccccccgcccccggcccacctgggtaacacggcctccgggcccccttccccgagccccacagctggccgggcctctgactctgtcctatctgctcctcttcccttatgggcctgctctgacctcattctgtccccaccaccaccccaaagatcaggtcactctgactgtccctccagccccctgggtgtctggctttcatcagcctccccctaagccccttggtgacttgggaccccatgagggaggcataaatcctctctgtgatgaccttgctttctggggattggaacaaggtcaagggcaaggccaggccccatctctgtaaaccacagccatgtccagaataattctacactcccatttccacccctagggaaggaggggagcagtagagaccctcctcctgggaactagcctgtttcctcctgagcamcccttccaggataacaaatggacccattcccaacattgtggtcagggtagactgcccagtcttcctggccattccatccactgtctctgcagctgccctcggtctccatctgcctcttcctctgctctctgccttcctcaactccttcttcctctggggcctggggtggagaaactcatcctccgtatctcagtgcagagagatgggatgcgtttcggtcaagagttctggctttgaggagttctgggtgggagagggagaggcctggcactccttcctggtggctcaaactctggatgctaatgttctttctcttctccctccaactccagtgtgacttctttaagcggacccgctattatcagatcatgcccaagtaccacgcagtgcggatccgggaggaggagcgctacccacctccagggagcaccctgcccaccaagaagcactgggtgaccagctggcagactcgggaccaatactactgacgtcctccctgatcccaccccctcctcccccagtgtcccctttcttcctatttatcataagttatgcctctgacagtccacaggggccaccacctttggctggtagcagcaggctcaggcacatacacctcgtcaagagcatgcacatgctgtctggccctggggatcttcccacaggagggccagcgctgtggaccttacaacgccgagtgcactgcattcctgtgccctagatgcacgtggggcccactgctcgtggactgtgctggtgcatcacggatggtgcatgggctcgccgtgtctcagcctctgccagcgccaaaacaagccaaagagcctcccaccagagcygggaggaaaaggcccctgcaatgtggtgacacctccccctttcacactggatccatcttgagccacagtcactggattgactttgctgtcaaaactactgacagggagcagcccccgggycgctrgytggtggrcccccaatgacacccatgccagagaggtggggatcctgcctaaggttgtctacgggggcacttggaggacctggcgtgctcagacccaacagcaaaggaactagaaagaaggacccagaacggcttgctttcctgcatctctgtgaagcctctctccttggccacagactgaactcgcagggartgcagcaggaaggaacaaagacaggcaaacggcaacgtagcctgggctcactgtgctggggcayggcgggatcctccacagagaggaggggaccaattctggacagacagatgttgggaggatacagaggagatgccacttctcactcaccactaccagccagcctcagaaggccccagagagaccctgcaagaccacggagggagcgacacttgaatgtagaataggcagggggccctgccccaccccatccagccagaccccacgctgaccatgygtcaggggcctagaggtggagttyttagctatccttggctttcwgwgccagcctggctctgccccctcccccatgggctgtgtcctaaggcccatttgagaagctgaggctagttccagaaaacctctcctgacccctgcctgttggcaggcccactccccagccccagccccttccatggtactgtagcaggggaattccctccccctccttgtgccttctttgtatataggcttctcacggcgaccaataaacagctcccagtttgtatgcagctgcatctgcttccacccactccccagcctttaccaaccccaggtcaatggatgatgatatcatccagccaacacctaggtaggatgaagccaggtctggggacttgcgggtttgagggtaaagattgatggaggtggccaggtgcagtggctcacacctgtaatcccagcactttgggaggccaaggcatgcagatcacctgaggtcaggagttcaagaccagcctggccaacatggtgaaaccctgtgtctactaaaaatacaaaagttagctgggcgcagtggcgcatgcctataatcccagctacttgggaggctgaagtaggagaatcacttgaacccaggaggcagaggttgcagtgagccgagatcgtgccattgcactccagcctgaacgacagagcaagactctgtctcaaagaaaaataaaaagattgatggaggtgacactggcccctgctctcaggaatcctctcatctaagggtcagtcatagagatccagaacagaagatgaggggtaagccttgggagacctggatgaaacccagaacgccttcttggaggacagcgtgctgaccctggggagggacgagcaggcagaggtggcagtgtgcagggtcgggaagaggtaaaagctactcagctgtaggaacaggcagtcctggcaggctgtggagggaggctgggtgcaagggtggagagaggagagcccttagtcgggctgaattcaggtaagagcctgctttcctgccttggtttccccacaaccaccaccagrcgccaataagagatcagaaggtaaaccactgatccaaggctgcagagactgaactgtcacaaggtccagcctccaggagctgagagctctggtctttcagaagctccttgggagtgtttgagcgcctggcttacatggcaacagcacgtggatcaagccttcgctttgcttcctgccatgtcctgggttcccaaagcagcttcctcctttgccctcggtttgtcccctccacacaggcctggggaatggagtaaggctgttccccctgtgacctggaatgtggcctaggtccttctgttaattttccttaaggctgtgaactttggcaagacttcactggaggctggaaattgctacccagagaagcgcagaggtagaagccaggtcagatatgctcagagctcacagacccaggctgttctgggagacccacctgatgcctgggtgcctcccagcctccttgtggtggcagctgcctgccccacctccctccaccagcgctcagctcacaacagggttctgggcccaatgtccgcccctttccctctcctcactttctgtgccgggatttgccccttcccagggtgactgacaatggaatgtccactttcccaaggaaaaccctagcccctacccggagctgccaagctctcagaacccagtgaatggagaccacactttattttctagaatctgggatccagttctttgggcataacatgtgtgggttgtcaaagctcggcccagtcttgtccttacagccacttcctgcttaagacaggggtgttgacacatccctctggccagtttcacagaccccctagtctcctgtgagccactgcttgaggaagaccccccmcacacacacacacactcttgaggataggtcattttcagaactagcgtgagctacatattatgaaagaaacataactggcagagatatagcaatgcccactgtaaaagaaccctctgcaatgccaagtttcttgagctccttggagagtccccccccaccaacccacactgtacatatagtgggagatttgggaatcggtgggggtgcagtttacctcggcatcacctaaccaaacttgactatgatgtaccacatcacaccactgctgttagcaccctgcagcaggctctgcagaaagagttcttatccaagcacagagcccacattatggaagtccagcctaaggtgagggtcatgggaaatctctttccctctcctacacctagccttagaggccacggccttttccttgttactttaattttgacaataacagcaatagctaccatttattgctaggcacagaaataagcctttttttttttttttttttttttttttgagaccgggtctcagtcagttacccagattggagtgccgtggcacaatcatggctctggctcactgcagccttgacctctggggctcaaggaatcttcctacttcagcytcccaagtagrtgggactataggtacatgccaccacactcagctaattttatattttttgtagggayaagatcttgctatgctgcccaggctggtctcgaactcctgggctcaagcaatcctcctacctcagcctcccaaagtgagggccaggtttttttgtacataatattctatatattattctgtgcacttgaaaactgcactcaccagcatratcaatcacgtcctaattgctagcccagtggatgtttggtggttctctggaatatctctgtggtgtgctcctctgcttgccctgtcttctttttcaccctgtcctccctactaggtgctgagtactgcctgatgctagagatagggcagtgaataagacagatacaacccctgccctgccctcacggagcttaaagtctagcgggaaaacagatcagttggcaaacaattttcactcaattgataagagctaccatcagctccttttaacccctccttcctggatttgtccaggtagctttcagccaatccctttcctcgacgaggtacctgtttcacatgtcctgatctttccttgtcctctcttaaggggtcttgtggattcccagtctggatgacagtgacccagactgcgaatatttgctaagaccaggagatctaaggagcccttgaagggagcctataacccagcttggcaggatcaaggaaggcttccaggaggaagggatgactaagcagctgagacctgaagaatgggcaggtgaaggtgggaagaaagaatgatccagacagaagagatgcatttgcagtggcttagagattagaggctggttcaaggcagcagacaggtatggctgggagctgcatgggggaatgtagagagaggagtctggagaattaagcaaaagtcaatcgacttgtgacaactggaaaggctccagtaagaagaagagagccattgatggcctagcacagtgcctcatacctgtaatccctgcactttgggaggttgaggcgggcagatcacttgaggtcaggaattcaagaccagcctggccaacatggtgaaaccctgtctctactaaaattacaaaaattagccaggcatggtagtacatgcctgttatcccagctacttggaaagctgagacaggagaatcgcttgaacctgggaggagaagtttgcagtgagccaaggttgtgccactgcactccagcttggacgacagagggagactcaatctcaaaaaaaaaaaaaaaaaaaaaaaatagcccattgaaaggctgtgagcaaggaagtaataaggtcagatttgcagttgagaatgatccctgagtctcggttttcttatctatgaaatgaggctaagaataataaaatagagaattaaatgagataatgcctgtaaacagtgcctggcatatagcttattattcatccagctaagaggcccttccatatgtgaagctttgctctgtgaggtctgtattacaatcacattcagttatagctaattatttacttatgtagctatctctgaaacttagaaatgaaatcatcgaggaaaaaggccatttcttgatcctgtctgtgttccctgttcccagcataaagcctaacacgtattaggctaatgtcaccgagcaaagaaagcatcaaagtggcgggtcgggccctaaacccacgatgggagataccacattcggccacaagagggcgcgtcacattttctccaagagaagctgggccgctgatgaaggacgggctccgggcctcccagagacacttcacctcctgggatcttgctctaaggaagcccggtgcgaaggaggtggctttctcaggtggtcgcgctagatgtccaaggctttatgttcggtcagatgagctgtataataaaatgaaagtgttaactggcatggacgatagctgctgcctccaccgccactagtagtgatggtttttactctggatgtttttcagttggaaaagcaaactccgccttttcctgagccgcttggatctttgtggaagcgggtgggctgcatatatacaggacggattcgtataggcttgcaccctggttccgaattttgcaaatattcgcagtctgggtcactgtcatccggactgggaatccccaagacccgttaagggaggataggtaacgatcatgacaggtgaaacaggtacctttgagttggagaaaagggattggttgaaagctacctagacaactctggaaaggaagggttaaaaggagcctgcaggtgaaggagatgcgagggggtagcaagggaaaggcaggcgtggaagaggaagcgaaagggctggcggggctctgggaaggaaggggttaacccgggcttcgccccgcggaggaaagggaggagtgaacacaggggaggtgggaactcggcgcggcctccccaaaacaacaggccgccccggcaaagcgtgggttaagggggcgggcccgggggaagccacgtgccggggcggaaggctattggttcgcccggagttgtttgtgagtggccattggcgacgtcgaggcgccatgacgagccgattggctgggcgttggaatgcccgccagggcaagggtagggaggaggcggccgaaccgcgtcgctgggccgaaaggtgcgcgagcgctgcccgcgcggggaccacaaccaaagtcgcggccgccgcagccatgcgctgggtgtgggcgctgctgaagaatgcgtccctggcaggggcgcccaagtacatagagcacttcagcaagttctccccgtccccgctgtccatgaagcagtttctggacttcggtacggagtgggcgggaggcggctggcagcggaggccggcggggcgctgggaggggcagccgggggctagggggacggaggagaagaaaggccccgagtgacagagaagggttgtttggaaaggtacaggcaggaaagagttaatggggaagcaggaaccggccggggcctctcgacggggctgctgatgggaatggggggcatttacaaggacggtcccgaggtttcttcgtgggcctcatgaagggtcttgaagagtaaggggcagtgaagctgtgatgttactgcaggaagggagtagggtggtatccagacgcgaaagggttaatgggagttgtcctcatgactggaggagtaggggcccctcctcccaccagaggaaaccgggggtctgctggtgggagtgaggaggcagggtttagaggtgcagccatctgtagagagacctggactgggcatgaagggtcagacacccctgggcagagggtgagattaagccaggggcagttggggaagggggctctttcagaagatgccattgggagacagtgccctgactggtagacatccacccacagaaggagctggaccctagctgccccagtgggcaaggacacttgaagatcaaatctgttccggcctggcagcctctccccagctgggcaggggccccaggcaccgtgatgtggagtcaagccgcctatacctcccttggctgccccagggctgctaggtcaggatcgcccactaccagcaacctgggggtggccctggggcaggagggaggctgtgccaacgtggcagctgaaatgggcattgtgtgggccctgtctgtctatgtggtatttccatggtgccagctggggactgggggtggggggcagtctctcaagagttgagttgatagtgcctagcttgggttgcagctgcgtct

SEQ ID NO: 5678 - DNA, 179041 bp, Homo sapiens
  misc_feature (1)...(179041): n = A,T,C or G, or insertion/deletion polymorphism (see Tables 1-2)
aaaaccaaatgaaaaaattaaaaatggaaagtaaaattgaaaaagagaaactaggataatgtggagaatcatttcaaaaatggaaagctggccaggagcggtggctcacgcctgtaattccagcactttgggaggccaaggcgggcagatcacgaggtcaggagtttgagaccagcctggccaacatggtgaaacgtcatctctactaaaaatacaaaatcagccaggcatggtggtgcatgcctgtaatcccagctactcaggaggctgaggcaggagaatcgcttgaaccttaggcggaggttgcagtgagccaagatcgcgccactgcactccagcctgggcaacaagagcaaaactccatctcaaaaaaaaaaaagaaagaaaaaagaaaaatggaaagctgatacagtatgagaaataatgtgttcaggttaaaaaatgcaatgactaccatgtacctatcatgacaaagcagcttagagaagttttattaattgtgcctactctctcagactctatcactacgtgatcctgacttagcctagcattcttaacaaaacaaacacacaagcaacaaaatgataagcgagcctaatttagcatggctcatttctcaaaaaacctttagttgttcctagtgatcgttaagttcttaaaatttccattcattttgcatttaattatctttcctagagttttacttagaaatgatgtataattgactaatttatagttactaggcatatgtgaaaatagatctagtaagctaatcactatgaaggcaaatttgttcaatacagaataatttttttattagtgtgataagtgaagatttttagcaccttgttctcttatcattcacttggaaattattttacattccttccagtttttacatgccacatacaatcaatgattaagctttattgattcctggcccctccttttcatctgtactgtcattgctctagctgaggccatcttcaactgtcacctcagtactgcatgagtcttgtctcctctgagctatcccgcggtttaggaggataaatggtgtctaaggcaaagtgatgtgtttgttctccctctgtaaacatatccactgttactctagaatttgcattcatttctttagggcactcttcgctatgccccggtgcctgtcctctatttttcttccagaatgatctttctgacccaaatatctggtattactctcttgcttcaataatttctcatcatctgaagcagaagtagcaactgccaaagctctcaggtgccaggcaggtagcagaagtgacaacggaacaaagcagatcagatggggactattgcagagtggtgacattagagcctgtcaaatgcgggaaaatgtggccagaacttccagttcttcaaaagagactggaaatccagattttatgtgaaacggtttagcttttaaatgtcaacaaataattcatcacgttttaaagcacggcataagccaaacaagccacttgtgtagtctgtgaacaatcaacctgtgaactctgacctgataggataagatccagactccttagaatggcataaaagattcttcatgatctattttctgcctactttaccaactatatttcttgcctattcttcctgcaaaaaaaaaaaaagtatacttcatcaattctgagttgctctccacttttagaaaaaaagtgtagcattattttcctttgtgcatttgcttctgtttctgcacatggagcgtcttccctaactcacattgcatcacttccaaacacctcattcaattctcccttgattagtcgcctagcttaagtgtcacctcctcctggaagccatctctttccctaccactctcctcccttgccatttggaatccatgtctcctgggtaggtccctaaagcattaagtagatcctagtcattaattgaaataaagactataagagaagcaagtgtatgtggggggatattaagttccatttcatgtatgttaggcttgaagatttcatgtcagtaggcagtcgtgtaaataggtatgggacttaggtgcaatattttgccttgaggtggggatctgagaaaaattaaatagaaaaaagagctaaagatgaaatcctgtgaaataagatgtacgcaaagaaaaagggggcttataataggagtctgaaaaaattagagagttaggaaaacccagaagaaagtagtgtcatggaagacaaggcgaaaatttccagagggaggaaatattcaccgtggtcaaataatgtaaagcaccctttggatttagcaaagatatcagtgctaatcctgataaaactggttttaaggaaggtggttgttgaaccaaacttgagtggactgaggaatgaatagaaaacgtggatatatgtagaaagctgaaactggatcccttccttacaacttacacaaaaattaattcaagatggagtaaagacttaaatgttagacctaaaaccataaaaaccctagaagaaaacttaggcaataccatgcaggacatagacatgggcaaggacttcatgactaaaatagcaaaagcaatggcaacaaaagcaaaaatagacaaatgggatctaattaaactaaagagcttctgcccagcaaaagaaactgccatcagagtgaacagacaacctacagaatgggagaaaatttttgcaatctactcatctgacaaagggctaatatccagaatctacaaagaacttaaacaaatttacaagaaaaaaacaaccccatcaaaaagtgggcaaaggatatgaacatacacttctcaaaagaagacattcatgcagccaacagacacatgaaaaaatgcttatcatcactggtcattagagaaatgcaaatcatgaccacagtgagataccatcttacgccagttagaatggtcatcattaaaaagtcaggaaacaggccgggcgcggtggctcatgcctgtaatcccagcactttgggaggccaaggcaggcggatcacgaggtcaggagatcaagaccatcctggctaacacggtgaaaccccgcctatactaaaaatacgaaaaaaaaaaaaaaattagccaggcgtggtgcccggtgcctgtagtcccagctacttgggaggctgaggcaggagaatgacgtgaacccgggaggtggagtctgcagtgaccggagatggtgccattgcactccagcctgggcgacagagtaagactccatctcaaaaaaaaaaaaaaaaaaaaagtcaggaaacaacagatgctgcagaggatgtggagaataggaacgcttttacactgttggtgggagtgtaaattagttcagccattgcggaagacagtgtggtgattcctcaaggatctagaactagaaatagcatttgacccagcgatcccattactgggtatacacccaaaggattataaatcatgctactataaagacacatgcacacgtatgtttattgtggcactattcacaatagcaaagacttagaaccaacccaaatgtccatcagtgatagactggattaagaaaatgtggcatatatacaccatggaatactatgcagccataaaaaaggatgcagggacatggatgaagctggaaaccatcattctcagcaaactatcacaaggacagaaaaccaaacaccacatgttctcactcataggtgggaattgaacaataagaacacttggacacagggcagggaacatcacacactggggcctgttgggggttgggggactgggggagggatagcattaggagaaatacctaatgtaaatgctgagttgatgggtgcagcaaaccaacatggcacatgtatacctatgtaacaaacctgcacgttgtgcacgtgtaccctagaacttaaaagtataataaaaaaaaagaaagaaaacatggatatggaagccatgaatataaatgactctttatcaggagtacttttttgtgaattggagaacaaacattagagttgtatataaggtcaatggaatattttttgtgtgagctatttattggtttaattttagtatttctcaacaggggagttattagcattttgggaagggtacttagttgttgtttggaaaattcccacacatcacaagttatttattactcacttcctcactaaacgacagtagtgttccacaatcattttgataatcaaaaacacctcacccacatgtccaaatatctctggagtaatggcattgactctattagagaatcacaacacagtctccccacaatccattctttttctccctcaatatttcattgcaaaaaatatcaaacagcaaagctgaaaaaatagtaacagacacttggatacctgttacctaagttcagaaattaaaatcttgccaaacttgcactgtctacttacatgcatttgtatttatttattttttatttcatgaaatcatttgaaaggaagttgtcaacatcatatttaacatactcatctccttaaattaaggatacattcctacataatcacattattacatcttagaacagaaataacaaaaattccttaatatcatctaaaacacaatccatattcaatttttccaataatcaattacatacaacttttttccaaaccggaacttaatcaaagtttacaagcttaattagtcattatgattttcagtatcttttaatctagaacatttttatttaaaattttttataacactgactttttaaaagaaaccaggccagtgccctagagattatcctacatttcaggtttgtttgattaagtatgtgtggtatcatttaatatgttcttctatctcccatgtttctagtaaagtgatatttgatctaaaacacctggttaaactcaggctaaaatttaggtaatgcttaggcacataatggaggttgctctactattaatgctgctatgcttgatcatggaattgaatctttggccagtatatattgttgattgcagggaatgagtgtttacattgttatagttttagcactagtacatacagagtaccaatagggtactcataaataccggcttaatgaatggtgaataaatgaatgatttaaactgatgttaagtgatagctaacaaaactgagagctgggttttgacacatattttctagaatccttggttctagatctagctgaggaaacaaattgagtgtttatacactcaattactgttatagtttttttttttttttttttttgagacgtctcactctgtcgccaggctggagtgcagtggcacaatctcggctcactgcaacctccacctcccaggttcaagcgattctcctgcctctgcctcccaagtagctgggacaccaggcacatgccaccacgcccagctaatttttgtatttttagtagagacggggtttcaccattgttggccaggttggtctcgatctctttacttcgcgatccacctgcctcagcctcccaaagtgctgggattacaggcatgagccaccacggccagccactgttgtagttttaaatcatatattttataaggagcacataattttctgttcacttgagtggaccccttccaaggccctgaagttaattatttgtaattttaaattctttttcttgaagaagaatctctaaactgtaataatatcaggttccagaaaacctggatacaccctcagctcagatctttcctggttaaatccgtctcttctcttcccccacccttcactgctagtaacttcagaaattgtttttcgctctctttagcccaatttttttcttcactacatttagcggtatctgaatttattcatttaaaatgtattcattttctgtccctctttactagaatgtaagctcattgatggcaggtacttcatttgtttcatttgctcctgtgaccccagaacccagaataatgattcacaaagaataggtgccaatcaatacattttcaatgactgacctcggatccaccaaactgctacatttcagccatgtttgtggcacagctatgtttggctactgggagtcccaggcttatgttccagcctccatgaagcagccattcattttgagatcctgtcacattctggctacttccagagatctgtgagcaaatccctgctgttcaagagaccaacagacttctctctcattcttttgagccttggtgtcacttattattctcagtgaaatccttctttcccatggaagcacccaaagatggcttgggtgaacccctctgcttggttccaccctaagtaaaaataacattccatggagttatggtgaaaatttttgtaaagtgaaaataaaggcaaatttagaaaacagtgctatttttattgatttataatgctatgcaaatagaacttaaataagtttctagcaacctcatatactaattccaatcagatcactagccctaaattcttattaaatagaaattggtgggtggacatttcaagtaggagggaaaatgttttgaaagcaacttctgctttcttccttgccacaaacctgtcctgaggcaaggaagcagagttgctatcagcttaaataagggaaggaaaaggcaaatacaagaacacaaataaaatctcaaatttttttctctctcacatacattattcatttaatctttaagacaaccacatgaagttgatattcccacctgtcaaaattgagcacggtcagcatgttttggttctcatgaataccttgtttttgcactctggtctgtgaaggaattttaaagcttttcctaggatttgatttgaaggacaattgaatggatccctcaactaaatattagtgatccaagatagaactcatgcacctaaacttgccttccagatattgatcttgtaatttattcttctaatttcagtgccatggagaatgactcttatttctgaaattccttcagcacacagatattttcatacaaattggccttcctgccaatgccttgccttgayaccttgagttgggggtgccactaaggcctatcctataaccttcacttaattaatcgtaattattattacacatactaattaaagtcagtcagtttcctaaagtgtaggacatgtagactggtggtacatgaggtaatgttataaggtagatgtaacattaaaacaacagtgaagcacttagcacaatattcttttttcactaccttttaatctttccgattatgctaaactgaaaaatcttaggttgatgctcacatgtccaacccttaccaatatcccttttttaacaaattgagagcacagcttgggctcagacccttgacagacaacctaactaatgttttgttttcattgtatttgctttaacagtcttctttatgtcaagtggaaacgtttttcacttaccaaagcaacataatgttgctttaaaataaatttgtcttaaaaaggttaaagaaaacattaagcaaatactagtatttgcggttcttgaatttggcaataaaactgataaagtttgggaaacattaattcatatgaaaggggcatgtgatgttctgtcacatgatacaggttgggagtcatgtgcaatggaggtgagttatctctttagcagtataactgcactttggattgttgccagacactcatctgagtcctagttttggggaacaaaagaagctttatgagcatattagccagtacttgtactgtgatagggttagtttcttgaaatggagtcagatgtggcagaaaatttaccctaaagtaaattagaaactcaccttgtaatccagaggcaaggcaaagattagatgctatgatctagaaatcaggattgatctagcaatggagtctgaagcaagttagggtggttccatgttggttctggtcaactccctgggtaggactaaataaattatgatgtgaatggattgtaaacttttcttcaagttctttttttttttctttttgagacagagtcttgctctgtcacccaggctggaatgcagtggcacaatcttggctcactgcaacctccgccttctggttcaagtaattctcatgtattctcgggttcagcctcccgagtagctgagattacaggcacgtgccaccacgcccagctaatttttgtatttttagtagagacgggggttttgccatgttggccaggctggtctcgaactactaacctcaggtgatctgcccacgtgggcctcccaaagccctgggattacaggcatgagccaccgtgcccagccttttcttcaggttcttaaataaaacattggaaagaaattattatgcaatggaagagagtttggcccaggtgtagaatacaggagacagaaacaaggtccttgttgactgttctattctcaagtgtataaatgtaaattagtatctcaggtttaaattagggataaagagaacatagatatatcaaagtatttattaatatcttatgtacatttttaacaaagagattataatagcagaaacaaatctaagctgtgcatgtcagcatttcaaatatgtttataatttaaattaagttgatcataattagcaagcaaattaatggtaaggaatgtcagtagtgtgattaaactttgaaaaagatatacacagatctcattctgacaatcttgtgcatgtaataaataaaacccccagccaggtacagtggctcaagcctgtaatcccaacactttaagaagccaaggcagaggatcacttgagcccaggagtttgagaccagcctggacaacataggtagaccccatctttacaaaacttaaaaaataaattagctaagcctggtggtgcacgcgcctgtagtctcagctacttgggaggctgagatcatgcctctgcactgcagcctgagcgatagagtgagaccctgtctcagaaacaaaaacctccaatatgattgatttggtgcagccaaaaatatatttttatatatacatatatgcaaattagtaagtatagttttatttgtacttctattttaaggcttaatttgctttaaaggagctaaaatgtatcctcacatcccaatctgtttagaagccattaggaagtgaaaatatttgcattttttccatttgttctgcttagacaaatatgtaataaaagcatgtgtgtgtgtgtgtgtgtcttttttttttttttttggtaaagatagggtctagctctgtcgctcaggttgtagtgcagatagctcactgcagcctcgaactcctgggcagagttcgcctcagcctctcaaagtgataggattacaggtgtgagccactgtgctgggactgtgtgtgtcaataaaaaattttgcttgttctagaattaacccaaggtcttcagtaccattaattcactaacaacaatttaaaaaaaatcctccctaaagacaaagtaggtggcagtttcagagtactttcaatattaacatagagcatcttgacccttagagccacgaaagaagaaaaactaaattcagtgaaatttgcacatgatagcagccctccttggttgttttttccctgacagcttctgggaactgaatgaacttaattatgttttattaataaactattattaattttgcatcctgaaataagtgcttgaatcaggaatagcatacttcccactaaattccttttgcctgaatgaaatcttcagattcccatctatactgcaagggcactttaagagctaccacataggccataacgttcttggaaaacaggatatgctgtcagttgcctaggtagagacaggagctgacaaggcaatcctcaagttcctttcttttattctgagagctgtattctgtggatagggattttgtattttagtgctaacaatgtttttcagtacctaacaccatgagtattcaaaggtctgatgttatctttaatgtatgtaatgaacatacaatggtatatcttatgaatattacattcattttctattcctacaacgttttcagaggaaatatttttaccctgacctggattctatcgctatcctaataactgtggttcagaaaattgtctcacaggcagacagtttcctaatcacgttttactcaattattttatttctcaatatgataggctgtgaagtagtccactggaaaaggcatcatgctgagagtaagaaaagcttatttgttcactgctctatctccagcacctagaacaatgcctgacccagaacaggtgcatagtatttgctgagtgaattctaatcctacttctgggtaaaattaagtaaattaattagttcttgagggactctgtctagatgacccctaaacttccatggtaaggttttgtggtttttatcttggcttttctaaatgctctaaaaatagtagtggatggtaacaatgcagtgttcagtaaaatcaattggtggagattgtagatagatggctcataagacatcagtattacaaatcctatgtgtgtgcgcgtgtggtcatacaaggcaaagttaaagtcttttttttatgacgatgataaattagtcttgtttgggcgastgaactcaagaggtggttcaaataaatrtcatatttttcattgtatcttcagtgcctagtacagttactggctcatagtaggtattcaataaatagtggttgaattaattgccttccttaacgttccgtttaaatgctagacgcagctaggtctttacccctccttagaaagagatggagctgtaaccagaaatcccttaaaaggtaaggaccagtaatcaggctgagctaagctcaygggtagtacgagacaggcttaaagcactgaaggaagaaagaagagaacccaagcgtgagagaaagcaaaacaaaacaagtaaagagaggaagaaaaacatttctaaagtgggggttggcaggaagccacagcaattacagcaggtcaacccttgtcaataggtggtcacctcaagaacttaccattaaaaccctcggccacacagaccccacttttaaaaggttattaattctgacatgcccaagttcatctgagttccttagaaagatcaaccagcagcacctacttcacgacctatcctccattccattcaaataacgcggccaataggaaaatcctccgccctgagccaacgactcggcgtagctgagacagcmcgggaggcagatctgccctgtagagccttgcggttccactgctggcctccggattcccgggagcccccagcccgacaggacaaccttccttccccgcttcctcctttccaggtctgtcccagcccccgctgcctgggccacacccgcttccctctggtggcccagccaccaccgccgcagttcgcgggagcgctcttcctggggcgggcacaggcccagggcgcatgcgcactggtcgaagggcgcctcccagtccggatctcgcgaagttacgttagattggccgccggtgacgggtggccgtgctgggggcgggagggcttctgtggtaggaagggaggtccgctcggccgggtgcgccgccccagtgctctgtgggatactggaagtctcgagygtcggctccgggttcccagccctcctctggcccgcactcatagaaacattcacacaccccctgcctcccctctcttccctctccgcctcccccttccccccctcgcgataagaagacccggcggcaggagaggggatgaagatggcggacgcgaagcagaagcggaacgagcagctgaaacgctggatcggctccgagacggacctcgagcctccggtggtgaagcgccagaagaccaaggtgaagttcgacgatggcgccgtcttcctggctgcttgctccagcggcgacacggacgaggtcctcaagctgctgcaccgcggcgccgacatcaattacgccaatgtggacggactcactgccctgcaccaggtctgtgcgccccgccgccggctctcctgaccgtgagggttctcgtcggcctcctgctcgggcctgccctcagttctccacctcttgaggctgggggcggcgggagactccctgctgcggggtgagggggcggtttccccagagggcgggagggagagctggtggaagggagggcgctgggcttgaggccccccttcagaacagttgctggtggagttgggaaccgggtgatttccggggcataggggaaaaggaactgtggtcgtttggggccccagggccattcgtggataagtctgggatttggggtcgagacaaggaggggtgtagtggggttgtgcctgggccccggtgtcagtggtatattcggaggggtggatgctgaaggaagaaaactaacaaggggcattacggacggttaggcagatgaacatctttgacttgtaggtgggcattggatttgttgcactttttaggacttgattacaaatgatgataataatagtaatctagagccctaagccgagtgccctgaacgaacgatttcctgttttctcatttattactcttggtcactggggaggggaaaacagggtgtaattagctgatctgcaccggctgaaaggaaggggatggaagtgggtagagtaaggaagccctctaaagggcttgcccacctccggaccggaacgtgttgagtctgatactcgaagtttgccgcagtgtcagagatccttgagccccaggtcctcgggtgtgcactggtgttagaaagagaagaataaataggggacactcttttcaaagccggttaccaagctctggtttttcttttggggttgggaaaaaagaaagctggtcacaaacttttctcaaaatggatgctttgtgcatattaaagttttatagtagtctgattgggatctctcaatgttagccaaataaggagaaactattggcaatccagagataatgttgccttgcctttaacaggccaaaagcaacacaaccacgtagagttatgcataaaaagcaatttttaagtgacggtaataggtgacaaaacataggctttttctattttcttagcgggcaacttggaataactgtaatagaaaatgactttgcagcratagcttccccttaacaatgaaaagacttgtaagctatctcaaagttgccttggttgtgtgtggaagatgcatagccttattttgaataatgttgtagtaaaaacttgtttgggaggttgaaactcaaggctttatatttcatgaatattaacttgatgccttttaaaaaaaaggtgtgtagtgacatttttccttgtcctgcttactgtttaagggagtgatgaccattttaaattttgtgtaatggaattctcttatcagacttggagtatagcctttgtttacaaagttgactggatatattgaaatgattgacacattgcaggacaaatatggaattaaaaatgtggcacccagtaaaaatatagcagggtgtctagcgctttctcaatttcattaatttagattctctaatgcatagcaaactttttatttgggtgaagtttatttaaggcatatcataactcgtaaaattttaaaaccatggtgttgagaatgaaggaaacttttggcattaaaaatgatartgtaattatataagatgaatcttcaaatttctttcaagtgtactttacacgttttagtgtgaaacagattttgaaagacgattattactgtaggaggtcaggataattggataatggttcgcatcaatatgttttattcaaattgtcaaatagaaatttaaagttactattgttgtggaggaacccagttgtattggcttagaggaagacgaaaagttttgatatttacattattgtgatactggtttagggaggaagagaaaatacatttaactgccttcttaagatctttttttctcctctcaatattcacacgttacaagaattgtcagacttaccaatgtcttcctgattaactgaattcagtggtcagtttggtgttgtgtagatatatctttattgggtattttgttttagttgacaaacagaagtttctaaatttactccatttgcgtaatatctttctgtcactttttgtcactgtgagtgtgggtttgacccgataatctccaaccgcctccccttttccataacatttttccwtatctgcaaatgccttaaatcggtgaagccaaagtctttaaaatatcaagcattaaaaatttgtgttatgttttcttcactctcatttcttatttatcaactcttgtacttttttcccattgttactatgaaaacagggagttcactttgggcaaatttaggacaacagttagtgaaagacaataaataaaattaaaaaccacacacacacaagaaaatkttaagcctttragaaatctcttgaacttagcttgttttccatacttaattgtaaaaactaaaatcactgatttaatagtccttgaatagttctttaaaactttaacctctcaaaagatcgtagaatacctaaaatgtataacggggttaattgttgattgttttttgaatattcatttactttytggttttgatcaagtgttctaaatttcattgtcaagagaaaagttttaggaacatcacaacccacaaatatgcttttgaaaatcgaatattttgcttttactttaaagagcttatatttaaaggtttattaatttgttgaatgtgctacctcattagaagttataaaagatatccagtcttcagctgttctttttgtatagaaatgtgtcctctgtatagaagaaaaagcagcgtttcttgtcaaatttcctatcttagtctccagagtagcctttctcccccacccactctacccaggacctgacccccaaagctacaaaacagcacaaagttaaccatagatacaaatttctggtttttctagaaccgaggtctagagtagaatttcattattaccaatggggcaataatcagcttctgattttatagctacctggtagagttttacagtatgtgattatatctctattttagcatattttgtaaagatttaaggagattaataaagttatatatagaatgccttattgctgattctyactgatactggtgtgcataaaatacagggctgagatttttctccagcagttttgagtttagcctgttgattttagccttaaaatcttttctttttcctctgtgccagtgacttccaagtcagtttacagttccctcatttctgcaaagctccaagcctcatttccattttttggggttatgtattgatttgaaatgaaatattaaatgtattgtaattttatatttaataatgtcttttaagtagtaatatagtaaatacaagttcaccccctttgccatagaatggcaactactgtattcacgttaacctttgtgatttcttcaaaggatttcttattgttcaaatatagattttcatagttgcaattcagtattataattttacgtttatccgttaacattagagatacttatctttagactttaccagcatcctttttaactaattattttaaaagtattattaatttggtkgtaagacaattttacatcgtcaggaatttctttaaattcaacctaaaacaggtctatctttcttcatcaagtctactcttctcattgatgttcctgtttctgttaatgatgtattaatctttagaatcaagttaaacattttagttattgtttactcattccccttgtctatgcataatccagtctgtcttctagctcagtcttttctttacaattaccttggcatcagttcttttctttgccactttttactggcaacctagttcatacctttattattttattttattttatttttttgagatggagttttgctcttgttgcccaggctggagtgcaatggcgctatcttggctcactgaaacctccacctcccggattcgagcgattctcctggctcagcttcccaagtagctgggattacagacgtgtgccaccatgcccagctaattttgtatttttagtagagatgcggtttctctatgttgatcagactggtctcgaactcctgacctcaggtgatccacctgcctcggcctcccaaagtgctgggattacaggcgtgagccaccgcacctagccttatttttatccctagagtatagtaatagcttaattgtttttcctgcctctattctctcccttatttaatctagcatgcatattgctgtcatattaatctttgaacagtatcattttgatggtgttattcctctctctaaatttggatatagtacattttatcatttagcttatggttgatacatctccattgtgttgtatcctttatagaaattggttaacttgcttacgtttcaactagatctttacattttttatttccatgcctttagccatgccttttatcctctctccctcgtttgccaattaaaattctagtcattgttcaagattcacattctcttttctggggtgttcactgtaccttatattctgcctctcctgcaataaaaacactttttactgaatagtgtttgtgtttgtcttcccttgtagcctctgaggacctaatcttccacaatttttgtatttccagagcctagcacatagtagatgctcactaaaggtttattgaatttttatctttttacctcatcaataggaagttttagagttatttttatgttgtgagatatatttttgaaaccttcgcatcagatacttagcgtattgttcttgcacataatggaatttgtgtgattatgaaacaaattaaaaactttgttgtagatttcaatatattttaatatcttgagattttaaaaaaatctttttttttttttgagatggagtctcattctgtcacccaggctggagtgcagtggtgtaatcttggcttactgcaaactccgccgcccaggttcaagtgattctcctgccacagcctcccaagtagctgggattacgggtgcgtggcaccatgcctggctaattttttttgtatttttggtagagatggggtttcaccatgttggccaggctcatttcgaactcctgacctcaagtgatccgcccgtcttggcctcccaaagtgctaggattacaggtgtgagccactgtggccggcctaaaaaattcttaatatcgacctcctttctattaaattttaaagcagtctagatattggttaagtggtagaaaaatattatatccagttgagtcactaattaattactcactttgtaagagtctgagctagatcctctagagcgggggttcacaaacgctgggccgtggacaggtcgatccacgacctgtgaggaacaaggccacacagcaggaggtgagcgacacactggcaagctagcattactgcctgaaatccacctcttgtcagatcagcagcggcattagattcccataggagtgcggaccctattgtgaactgcgcttctgaggtatctaggttgtgtgctctttatgagcatctaattcctgatgatgatgtgaggtagaacagtttcatccggccccactccccaacccacatctgtggaaaaattgtcattcacaaaactagttcctgatgccaaggttgggtaccacttctagaggaatacaaagtagaattagttccatgttctatgctattagaattttaaaatagtttttcttttactttccaaaacagacagacttacagataggtttaatatgaaatccttttgcttttaaaatacaaatttgatctacttctaagggagccattttaagcatctttgtaaaatatgtgatcctctcgtcagtaaarggaatacttttgtgtagtcttcttaagatgtgaagtgtaaaagagactggaagcaattaattttgagttgcttgttagcaaatagtttgattactatgtaaaatctgaattaagagtttatagtttgtaactgtttaccctttttttgatggagaatgttaagatcttggaagaacctactggataacttttaaagagcattaaaatttgtgtctaaaagaatgtgcagtgtaaaatatttctctgcatagttttctttttagaaaagctgtaacactttatgctcatgcctttcaaaagtttttattgaaatcatcctaaatccatttttaaaaacctacctaaacaaacaaataaaaccctcccaaccccaaactggcccctcacttcctacaaataagtgggcaaccctagccatatatggggtgtgctggtagggcaccagtgcccacactgctgctgttctaatgctttttctgtagttgctgcctctgtgcttcctggcaacacttytgtggtctgactttgaggtgtcataaccaagaccatctttcatgtgcctcagctacagtatgattgcaagctgtgactgagcattttctatagccaggtagaaacactggatggaatagaggaagtgtttttcatcatccatttgttattaccacatttaaaaattacagttcacataagaaaagtgttttaaaaatcttattagatgatttttaaaagaaaactatttaaaaaccttttaatagggggaggcataaaacgttgttttgttactaccataacatgttacttcttgacactatatgaagttgctattttcattgcctctgcctgcaaaaaattgccatcttttactccacccttcttttgaaagtttgtggggctccacaataaggttgagaagatgatgaggtattggcattttggtatacctctttgaaaggttgaagaactccaacaattataagtttattctcagttggagtcagatatgtagtagccatgacttaatcagtgttttattgaggagcagtgcttttccaaacaatagtttaattttcacaacatgctttttcacttgctcaaagttaacaagaaaataaatggcagagctggaattcttatgcaggtctgtttgatgccgaaactcaaactttaccctatgccaggtatcttctttgaagtctgaagaagaaaatattcttaaatcttttcatcattatggtggtgtttagtaattggaggtttctctgtaaattagctgaaaatcaagtgaaacacacatataatttttttcttcatccacatttgttttagctagcccatacttttaagacctttctatggtaattgaagtgcagtagtactgtatctaaattaatctcagaattcgaaattgtcctaaattttaggaagtgccaagattatttttgacttaccattatgtgcagaatatatcagcagcaacaagaaacactccttttttcaggacatagaatttaatttttaactacctttatttttctttaccctaatagcaatttatatcgtttcagttgttgggtgtgtgtgtgggtgtggtgtgtgtatgtgtgttttgagacagggtgacagactctgtcaccatggctggagtgcagtggcatgaacatagttcactgtagccttcctgggctcaagtgatcctcccacctcagcctcccgatcagctgggaatacaggcatgtgccaccacttccagctaatttttttttttctttgacagagtctccccgtgttgcccaagctagtctcaaacttctgggcccaagtgatcctcccacctcagcctcccaaagtgctgggattacaggcgtgagccactgcacttagcctgttttagttttttttaatcatttacagtaaattttttatacatacgtacatgtacatatttgattctttttagagacaaattgtaggaaacttcataccatggatactgggggtgggggggaagaagtcccttatatacccttaaggtagggactttgattctttttttctttaaatctccttttgtatcggcattttgttttagtaggtacacaataaatatttaatgattaaaaaaaattggacacaatgtaaactaatattttgaagagcagaattcatagaatattaaataattgggtaagtgtaacacactgacaaacttttaaaatgtcctaataaaaaagcttatatcaaccacttacttttataatacttacaatgtaaaggtagccattattacaatcaaaacatttattaggtggctgggtatggtggctcaygcctgtagtcctagcactttgggaggcctaggcaggcggatcacctgagctcaggaatttgagatcaacctggccaacatggcaaaaccccatctctactaaaaatacaaaataaaaattagccaggcatggtggcgcatgcctgtaatcccagctactcaggaggctgaggcacgagaatcgcctgaacccaagaggcagaggttggagtgaactgagatcatgcctcttcactccagcctgggcgacagagcgagattctgtcttaaagaaaaaaattattgggatgttagatttatttttgaaatgagatctattactgattatcaatagacgcttcagtttatgtaacttagtttaaaaattctttaaacaaatccttgagtgttcatttagaaaagtaatctctaggctggatgcagtggctcacacctgtaatcccagcactttgagaagccaaggcaagagacttgatcccagaagttcaagaccagcctgggcaatatagggagacggtgtctctaccaataaagagaaaagaaaagaaagaaaaagaaaagaaatctctagcatggtaatattagaaataatgcatattttctgttattttactgatastttttttttccaaataacatttttactatggctccctctatgtcagtattttctgaccttattagtgttttggttgtttatctttgcattgttatgctggctaaccataaaaagacacgcttgagttctgtgttactgccctaagtgtgcttgctgctcaactcaaatgctctttcatgggaggagacattccacattgtcatgtgttgtataggcatttctgaaatgacattcagtagaaaccatggaaagaagtgaaagcattcctcagctgtcacttttttagtagtctatttaaatgttatgtatattaagtgagatattctgcagagagagcttcacttaataaaaagctttactttaacttgatgatttaactcacatttgagctgaaattactattttcttagtttaacatgacctctaacaataaaatcataagattgtacaaagctcatgtcattttcttgaatactgcatagtgcagaggagaatacattttgtgagatgtcacttggcaccctcttaaagattaataaccatgtgggaaagtatattttcatggactgttacacacacacacacacacacgtacacgtatgcactcaacctttacttgtaataaacatcccaaattatatatattttattagccttcaaaattgttttagatggttataaacttatttgaatatttatattcttgcatggaacacttctagagcttttctgttggagtttcagctccagaacatttttttaaaatatcctcagtgttgagagtttttttttctttcaggagagtttttaaattttgaaaatgatatcattcgaagatgcatctggtgaataaaggtggatcatgtagtcatcatggttaataaatatccgtgattacatgatattttctaaaaagcttattcttaactggaatatgatcataaatgtcaccttggatttaagttaactctttacgttgtgtggatttgagtatgcttcagaatttgtaaacctaaagtactgttcatttgtgttctagattttgatgaaacaagtcaatgttatagtttgtgaacatagtcttttttgtatatgtttgtgttttctgcaaaagatttcggtgctgcctggcacagtagctcatgcctgtaatcccagcactttgggaggccgaggtgggaggattgcttgagcccaggagttcaaaactggcttgggcaacaaagtgagaccttgtctctacaaaaaatttaaaaattagctgagcatggcgacacgcatctgtggtcccagctactcaggaggctgaggcaggaggattgcttgagcccaggaggttggggttgcagtgagctgtgatcacgccactgcattctagcctgaacgacagagtgagaccaggtctcacattttaaaaaaaggttgtgatgctgctggctctagatcatgacactatgtcattaagaactattgtttttctcaaagatattttaatttctacagtttttcttaaaaggtttggacagatgacatattcagcaatttctgtattccttccaagtacatggaatctacttaagaactctgtagcatattcaagattttttcttttaaaatgcctattgctgtttaactctttgaaccatcattttttacagttaaaatgcctttatattgttgatcttctcagtgttttccattattttttgatatacatgaaaatttaataagtaattattaagtcttcagtgtcttgcttttatatgggtcatccccatctccttttttttaaattttattttattttttgagacggagtcttgctctgtctcccaggctagagtgcaatggcacaatctcggctcactgcaaacgccgcctcccaggttcaagtgattctcctgcctcagcctcccgagtagctgggattacaggcgtccaccaccacgcccggctaatttttcttatttttagtagagactgggtttcaccatgttggccagaccggtctcaaactcctgacctcaggtgatccactcgcctcagcctcccaaagtgctgcgattacaggcgtgagccaccgtgcctggcctctcctttttatttttaaacatggcttacttttgtatgtttaatgttgtatgtgaattttatcccaaataaaaatagttgtaaaagtttaagaataattatttaattaaaacactaaagacaaatgtaaaaaataaaatgttatccaaaatttcgggactggactttgctccatttaaaagtttaacatccttttaaatatctctrtacaagtatgtaattttctataaatggggtcatacctaattttctggtttataaccagttttgaaacattatgtattttaagaaacatttctgtgttaaagaatattcatatacattttcccttttaatgagtgtatcgtattccattgtgtgtgcatgtgcatatacatcttggaatttattttcctagtcctttcctgatgaacatttagtatattttccactttttatcatatggtgaatattatgtacatcttatttatttatttatttatttttttgagacgaagtctccctcagcagctcaggctggagtgcaggggcgtgatctcggctgactgcaactaccgtctcctgggttcaagcgattgtcccatctcagcctcccgagtagctgggattacaggcacccgccatcatgcccggctaatttttgtattttagtaaagatggggtttcaccatgttggccaggctggtcttgaactcctgacctcaggtgatctacccacctcgggctcccaaagtgctaggattacaggtgtgagccatcgcacctggcctataccatgtacatytttactcgctcatcacattgtattccttaggattgttccttagaaatcttatctgcaatcttatgttttgctcaaaataacatgccatttaaatgattgtttatacaaaatactttttaaaaaattttttacttttaagttctggtatacatgtgcagaacgtgcaggtgtgttacatgggtatacttatgctatggtagtttgctgcacttaccgactcatatctaggttttaagccctgcatgcattaggtatttgtcctaatgctctccctacccttgcccctgagcccccgacaggccccagtgtgtgatggtcctccctgtgtccatgtgttctcattgttcaacttccacttatgagtgagaacctgaggtgtttggttttctgttcctgtattagtttgctgagaatgatggcttccagcttcatccatgtccctgcaaaggacatgaactcattcttttttatgactgtattccatggtgtgtatgtgctacattttctttatccagttcatcattgatggggatttgggttagttctaagtctgcaaaaggcatttttaataaagtttctagtatattgaaaatggaaaactaaccgtgaaagtactcatgttgacacatctgttaaattgatgcgataatgttatccccyatatgtcacccacaggcagatttttgttttatttattgttttttttgttttgttttgagatggggtcttgctctgttacccaggctgggagtgcagtggtgtgaacacagctcactgcagyttcgactgcctggccttagtgattctcccacctcagccttttgagtagctgagactacaggcgtgtgcccaccacaactggctgacttttaaaatcattattattagtagtagagacaaggttttgctgtgttgcccaggctggtttcaaactcctgggctcaagcaatcctcctgccttggcatcccaaagtgcttggattacagccatgcactaccatgcctggctgaggaaaattgttttattgctttattactctgtgtgtgtgtgtttgtgagaataaaattagttgtatttcactcagagaagcaattggggaagacaaggtaaaaagtgttcttccttttttctttatgtaaggtttagttctaatgtttgaaaattttgaagttattaaaatattaaacaatatctgtattcatttatatgatgctgttattcatttaaattagtgaataactcattcatgcaagaaacatagagagatcaccatttatcatatgtccagcacagtactaatctctaaaaacagtggtccctggctacatgtagtatacaatctagttgaggtggcagcatgagccgatgattacaatgtaaataagtggtagagtagagatacaaggtgaaattaaaggctttattaggcgggcttaacccagagtatcaatggaagacatccctgagaaagctctgtaagttataggtaacttatcagcagatgttttgagccttttatgaccctattcactactggtttgtcttctgaatgtacctgtttagtgtacctttttgtcagtttctttcttgaagatgaatgttgccaaggttctcatatgtctattattcttttttgtgttatttatgtagtttcaactttctttttatatgatctgtcctccttcttacatgatccatatcttattttttatatcagtcttccatttactaagctagaatctcagggtctttttctgttttctcctcacttgcatacagtacatctcctctaccatgcacacacctaaaaaaaaatcatcttttgtatattcatttaacatatattaaaggtctcttctgtgccagacactactaagtgctgagaagacacatttttgagcaaaaatataccaacartaccctcatagagtcracagtaaaatgaaattagccatttgggaaatgcaaatcaaacccacaatgagatactagttcacacctactaggatggctttaataaaaaagagaacaagtaatgactaggatgttgtattagtcctgttttcttttgcttataacggaataccagaaactggattatttaaaaagatttacttattacagctatggcggctaagaagtccaaggttgtagggtcaactctggtgagagccttcttgcctgttggggactctgtagagtcctgaggcagcacagggtatcacatggtgagggggccgagtgtgataacgtgctcaaggtctttcttcctcttcttagaaagccacaagttccactcccatgataacccattaattcattaaccctttaatccatgagtggattaatccatttatgagagaagagccctcctgatgcagtcacctcccaaagtccccagctatcaacagtgccacattagggatcaggtttcagcatgagttttgggagggatatttaaatcacagcagatatggagaaattggaaccctcatgcactgctggtggtaatagtaagatggtatagccactttcaaaacagtctggcattttctcaaaaggttaaacagagttaccgtatgacccagcagttctactcttaggtgtatactcaagagaattgaacatgtgtccacacagaaatgtgtatagtaatgttcatggcagcattattgatgatagccaaagatgaaaacacaaatgtcttatcagctgatgaataaagtgatatgttttgtccctggaatcagcggaatattattcagtagcaaaaaggggatgctgataattgctacaaagatgaatcttaaacatgctaagtgaaagaagccagtcacaaaagaccacatggtgtatgattccatttatatgaaatgtccagaataggcaaatctgtgtatgaagcaagaaggcagataaatggttgccagaaactagaggtgttgaggggagttggtgaataactgctaatgggtacaactttttagggtgacaaaaatgtaaaattgtgctgacagttgcacaactctgtgaatctgtttatttgtacactttaaatgggttattttatggtatgtgaatggtatctcaaacatttaaaaaagtgaacgtatatatttatcagtgtttactactaaaaattgaggcactgacagagccagagtaattatcttctatcagtcccccagcctcagcctaggcttggtattagtcactataattatgatggtgaacagaacagccagacattgcccctgccctaacacagcttgtagtctactggagtgtatagataatacacagacaattataaatttacatcagttatgtgtaatgatatgtaatggtaatacagtatggaagcttatgaaggcatatttcacctagattgggggaggggagaagactttttttttttttttgagatggagtctcactctgttgcccaggctgcagtgcagtggcgtgatttcagctcactgcaacttccacctcccaggttcaagcaattctcttgcctcagcctcctgagtagctgagattacaggcatgcaccaccatgcctggctaatttttgtatttttagtagagatggggtttcaccatgttggtcaggctggtcttgaactcctgacctcgtgatccgcccgcctcagcttcccaaagtgctgggattacaggtgtgagccaccgcgcccggctgagaagactttctggataaagttgatgtttgagctgctcagcgatgagtaaatgttagccaaggttgttagggagggaagattatgggaaactatttcagagagagggaaaatagcatgtgtaaagatctggaagtgcacagaagtgctgaaggatttttttttttaagacaagagtcttgctctgtctggagtacagtggcgtgatctcagctcactgccacctctgcctccccggttcaagtgattctcccacctcagcctcctgagtagctgggattacaggcgcatgccaccacgcctagctaatttttgtatttttagtagagacggggtttcgccgtgttggccaggctggtctcaaactcctgacctcaagtaatctgcccgccttggcctcccaaagtgctgggattacaggcgtgagccactgcacctggccagttgaaggattttaatcaggttaaatggacaaccaatttttcttttttaagaaaaatcacttttggctgcagtgtggacaaggcactgaaaagagaggacaaagctgaaggtagagagacatttgaggaagttgggtagtctgagagagatgactatgagatgaactagcttagcggcaggagggttggaaaatagtagatggacttaaaatatatttatgaaatagaattggtaggaattggaggtggattggcttgagggattatttaaagatgtgcatgcacctgttttctggcttggacaactagatgatgaaggtgcttttcacagcatgcagtaaatattgtgtgcttactgtataggtcagcagcagagtattgatattgcagaatgatactggaggagacagtcaagtaaacaagaaatgaaaatcaagtgtaaaatgtacactataggctatctgtacaggatgttgtgcacacatggaggaggggtggcctaactataactaatacatggagatcatgcttggagtgtggttttttccttggatttagtctgttctcttacttgcctctgattccctggaaatgtgaaaaccaagtagaaaacaatttatgaacatacagaaaaaacgcaggatacagattcgtgattatgtttttttttttttaaggtttcagtgaactgcctaaaaatatatgcaaaattttgtttttctgtacttttcagttcagaagaattagtaaagaatttctaagtaaagccaaatttacttttatgatattatgtatgtggcagaggtgtatggggaggagtggatcacagaactgttggagaggaataaaggagtggtagtagtaacgatctacaagtcttttattgactgaaatagtatgctatgaaaataaagtcacaggttaagataggtgagagtacattttctcagagcatgttggatttttctaattgtatagtgaaagaattttaacaatctctaacttctctcagtttctaaatttactaaatggtatttttcagggaaaataaaggtaaaatattagttacaactaagaaacctaacacctttatacactttttatgtctaatagatttaatgttttttcttttttgctcaaaatattacaggacttgctttgagtatttgattgagggttttttgcatgttttaatatttttaaaagttgcagttaatgaggaaagtagtagtgtacagaaaggttgggttattttgactttgagtaagcatcagcagatttgtttcagcttaaatgaaataggacataattgttatatattaaactctttttttttttttttttttttgagacagagtctcgctccgtcaccaggctggagtgcagtggcacgatctcggctcactgcaacctccgcttcccaggttcaagcaattctcctgcctcagcctcccgagtagctgggattataggcacgtgccaccacgcccagctrttttttctatttttagtagagatggggtttcaccatgttggtcaggctggtctcgatctcgtgacctcgtgatccacccgcctcggcctcccaaagtgctgggattacaggcatgagccactgtgcccggcctaaactcttaactctgtataacatggcatctttttcccttttcaacccatccttgacatttagagccagtctttatatgtgggaatactatataagtttttctcgctttaaaaacactcaaatgtaaaaaatgttaattgcaggacagtatgtatggtatgagccctttggggggttatttacatagggaaaaaatctggtaaagtacctcaactgttaacagtggttgtctctgggagggaaatacagattttgaattatgttacttttggatcttttacaacaagcagaaaaaaaaaaagaaaaatctcaattggagaaaaatgcctaaatggctattcccagtaatattttatggattaaatatagaaacattgatataactaatgaattttagtttgctagtgtttggccactcaaggaagctggtgttgatggttcagtatttatttctgtattatacttgccttttctctgaaccttttatttcatgaggaatgactgcttgacgatgtgatgaacaccttgggagagtattctaagcaaataatggaattctggatatggttagatgtattttgtagctttttgcaagtggactacagaaagttcagagaaaagctaagtataattaccaaaaaggcaagtcatttttgaaggacaaaggggttttaaaggataaaatttgggttttagaattttaaacaatccaataggagataatgtgaagaaagaattagaaaagcagttttatacagtatgctcttttgccccattctttatgaatgtataaagcatttgtcgatgaatatctgtctaagaatgaattgaaaaaacagccccaagtctcttagaattaggaatgttgaagcccatagttacgtgaattttgtgaaaatatttttgaaggcagtgaaaagaggacttttaaaatttataaaccagaacaagaataggaagatggaaggcaactgatggaatggcttttaatttacatacacatttgttgtttataggtacatttgttgtttataggtacatttgtttaaaatggtcttctactctacactggcaaaattctaatatccactattaaacagatagttctggaagagactgtgttgaacactagatgtcaatttgagttttctgaaaacaagttatgttgacctatctttacttcctttttggtcaaggtttagaaacataactgggggaaatgttgcaaacagtatagcttgattttttttgtaaagcacatggaaaggctcttgttatgtctttacggttaacatgacaaaaatttggcgtgaatattatcaggattaggctcactaatagctgggtgaactactgtatacatgtcagcctgctgattgatcactcagtgtcaacccaaagggaagactaacatagtggtccttgtgttcttaatcttgaccctatcctgtgtaacgtttaagcagataaagttgtaggagctgagagagaacttcaaaaagcataaaatagtgggttttaaataataagatgaaaagataatgggtattaatttaaaattccacattaaaaatggatgagtgtaggttggtagagatcatttttgacagacatatgagaagtaagtcattggaagtttaacagcaagcctggtgtctgacaacagtataataatttttaaatataccaatttaatgtaaagcaaaaatagtgttaagcctagatttaaaaaaaaaatctattctgcattgtaagatcacatctgtagaatgtgtctaggtttttagatttgtttgctgttcagcagatcttagcaatgacctgccaagggaatggcttcatwtaacaaagttagttctacagagaaaaacaaacctgtgttccaatttctttttctagaattgttaacaaatttatacataaacatgcatacattctcacacataagcaagcacacgtacttcacagtatagtaattggagtcttaaaatgccctaagattcccagaactccatcaactcaattattttcttatgagccccttgaaaaacaaaaaggaatcaattttcaaagccgcatacttacctacagtgttagaccaacctctagtaggaaaatggtagaaggattttgtgcatatattagttaggagtcttggttgtaagtaagaaaagcccattggaaccggcctaaataatttataagattatagtatctcatagaactggggcttctggaatgaattagaatcaggtactatatgcaactcaagaagttctctaagtttctcattattgtttctaacaaatccagatttttttttttwatagaaaaccagattttttgttttcccagtttaaaaaggcagaaaataaggtcacttccagagtttacattctggtctagttatctagagagatttatctcctcctgagttctaattccagatttccaggaaagggaccaaatgatccatctcaggttattcatgtatcatacaaggtcatcaatggtggctgatggggctgaacccctctgaaaaaacatgcctactctaactgtaatcatgtattttgaggagatgatggggacataaagctggaaataataagcgagttcagaaagatgccaatattgattgtataaatgtacagtctgtacaaataaaaaagtacaaacaaatgttaaagaaattttaaatcagcagttatcagactttttggttttaggaccccctttataatattaaaaatcaaggacacactagccaaataaataaaactgggtaaatatgaatatcagtatattatatcaatgttaatattctgattatattatattatagttttgcaaagttttaccattagaaactagacaaagggatatcttggtattacttcttacaacttcatgtgaatgcacatgactgcaataaaataccattttgaattttttgtctgttattattttaatgctaaaaaaaaattgaggaacccaaagaggtttttgtttatgttggctgtctgtatttaccaaattagaaaataaagttgaaaaaacttttaaatatttattttaaaataataacccattacattccaacataaatattatgcttatgaaaaatagatgtattttacgaaacaaaaagagtggcatcgttttacatttttggaaatttttttaaatgtcttaattaagacagctgaattctcatatccacttctgcatctagcctattgtgatgtcacatacaagctcctggaaaactccatcatatgcttgtaagagaatgagagtattaaccttgtagacttctgtaaggggctaagagaaacactgagctaaataattgaggggatatactatgttcatggcttgaaagactgtaagtattgtaaagatgttcttccgaaaccaatcacagatttaatacaagtccaaacaaaatcccagatatgtgtgcattgtctgtttgtgtatgcatgtgtgaaaaatggtaaattgatataaagatgaaaaagaccaggcacagccaagtcaatctttaggaacaagaaagtgagaggactgaccgactctgatggacattaagacttataaagccacaataattaagacaatgtggtgttagtgcaaaattagacaacaaactaatgaatcagaatagagtgtggaaaaagatccagacagatatggacacttgatttatgataaaggtggcatttcagaaaagtggggaaaagagagtcttgtcaacctgtctatatggggaaaaagttcatcttcatctcccccgtaccttataccatacacaaaaataaattccagttggattgtagatctaaatgtgaaatacaaaagtaatagatactctggaaggtaactatgagaatatcttcrtaaccttcgggtagggaaaagatttttaaacaggacacaaaaagattattacccataaaggaaaagattgtgtgtgcatrtgcgtgtgcacatgtgtgttttaaacaacaaaatacacagatgcatcacaaaagaaaatattctattggtaataaacatacaaaaagttattcaatctcattcaccagagaaatgcaaattaagagcacaatagatatcagcacataccactggaatggctaaaattacaaaagactgatgatatcaaatgctgagaagggatgtggagaaacgagaattctcatacactgctagtgtaagaagtatgtgagatttctartgtattcaaatatatttaaaatttgtttatctcttgcttggttgtacttatgcagtagcaatggaaacgtactctatggattaacatacattttaaagctaaaattccacaggagattgttgaaggtttttgttaaagtgattggttataaaaatgtttatagttgatagggattctcttattatgattaggtgataattatattatcagagattcattaattttatttcttcttttttttttttttttaaatcaggctttcctctgtcacccaggctagagtgcaatggcacaatcacggctcactgcagccttgacctcctgagctcaagcaatcctcccacctcagccacctgagtagttgggactgcaggtgcatgctatcatgcccagctaactgttttttatttttttgtagttgggggtctcgctatgttgcccaggctgttcttgaactcctgggctcaagcgatcctcccgccttggccttccaaagtgtggggattaccagtgtgagtcaccatgcctggcagtgtttcattaatttaaaaaatgtttgcctgccttgtgtgtgccggtcataatactgggagctaaggaatacagagattagcaaaacaagaccctcttctcattaaatgtatcaatgcaagttgtattaagtattttgaaggaaaaatataaagtgttatacaagaacagaaggttttgagagtttggatggagtctgtgaaagtcatgattgaagtgagaactgaaagaccagtagttgtaacttggtaaagagttgatggtcgagggtggagagatagattcttggtgaaaggtggagaaataggttctggtcagagcaaagccctttggagaaagcatgctcagcagaggaactagaaggccagtgtgactggagcacagggggtgagaagaatggtatagcaaacagtatagagataggttgaggtcagatctaggaggatccaggagaccttgataagctcattttcacactagaaccctagaaatgcattaaagtgttttaattgctttagtgctaatcagatttgcatttttaagagacggctgctggctgtagaacagattgggtggggggaatcggaggtggagaggagagttgtgcctggaggccagttccagaggctgatacgggagtagaggcaagagctctttctcagatggcttttcagtcgaaagctggtgctttacaagatgttaaaaggcatgctaagtaaaaaaaaaaaattatgatatgtttgggagatgctccattaaacaaggtaaaacagatattttgctagaatttttaagtcttaaaaaaaaaccttttatttcaggtttcagggtacatgagcaggtttgttatatagttaaactgcgtgtcatgggggtttggtgtacagattattttgtcacccaggtaataagctagtactcaatggtattttttctgatcttctcccttctcccaccctccaccctcaggtaggccccagtgtctgttgttgccctatttgtatccatgtgtttttgttgtttagcttccacttatgagaacatgcagtatttggtttgctgttcctgtgttagttcgcttaggataaaatgcactgaagaggagagaggctgaggaaggagctgaagccgagtgatagaaatggaatctcagggtgttgcgcctggagggttgttggttttaggaaatggagaaaaggtgtctgaaaaaagagtgggaggatggattgtagcaagcctgaaagtgtaaacttaattcataaattgtgaatttctaacagtagattaaatgaactaagggctactgcagaaagattaatttggtagtaggggtaaataggttaggacatggctgctagcaacctatttcagtagttcaccktagagataaaaatatcccttccattctctctgattttgtttgatgctgtaagtgttctatttactgaagaagttatgggggttttttggtcagtgatttatattgatcttcagaattctgtgcttaagtttcaagtgrtttgtgttagaaattaagaagttagggctttttactttccactttcccttttcaaatcagtaatactaacttttttagccactagctatattctgtattttaatagctacatatacttaacactaaactagtaaattactaaatgatttgaactgttagtattcatctttgtgttatgactagcctttgaaattagatgtgtttatgtgtgtttgtttacatatatacatgcatgttcgaataatgcattaactttaaggagtgaaatcatagtagaataaactagatttaaaacattttaattttacatagctcttataagattggaaaagttttttttttttaagaataaagtcatggggattatactttgaagtatactttttaaggttctatttatttatttatttatttatttgacggagtcgtgctctgttgcccaggcagtggcgccgtctcggctcactgcaacctcccacctcccaggttcaagcaattcttgtgcctcagcctcccgagtagctgggattacaagcgcctagcaccaagccccgctaatttttgtatttttagtggagacaaggtttctccatgttggccaggctggtttcgaagtcctgacctcaggtgatcctcccacctcatcctcctaaagtgctgggattacaggcatgagccactgtgcctggttttaaggttcattttaattagatattgtagttatcccatcccattatgtttgaattaggtcttttagactaattcagattggctcttttctcatccagtaaactgctttcttctttatccgcatccaaatgataaatgttatttgttgtcagtttacaaaatgattcctccccttttttattataaaaataatatgacaggctgggcggggtggctcaggcctgtaatcccagcactttgggaggctaaggcgggcggatcaccggaggtcaggagttaaaacagcctggccaagatggtgaaactctctctctacaaaaatacaaaaattagccggatatgatgcctgggcgacagagtgagactgtgtctcaaaacatcgtcaacaacaacaacaacaacaacaacaaagcaatatgacattaagcagaggctgtagttgggatgcataatttttttttttttttttttaagacggagttctgtcaccaggctggagtacagtagcgtgatctcggctcagtgcagcctccacctcccgggttcaacgattctcctgcctcagcctcctgagtagctgggactacaggcacccaccaccacacccagctaatttttgtatttttagtagagacggggtttcactgtgttggtgaggatggtctccatctcttgacctcgagatctgctcaccttggcctcccaaagtgctgggattacagacgtgagccaccatgcccagccggggtgcagaacttttaagttcatactgtaacagattctagtaacagttgtgggaattaatatctgagtcttcagaaggatctatttgggaattaacatctttgagacttcagagggaactatttggttggaatagtaaatagtaaacacttatataatagtatttaaggatataacagacatgccttaggcggttacattatcacattaatcatatgaggtattattcattttattattccattagacctgtgaagaaaatgaggtacagatgtgactgtagggtcacaacaaagcttataaattacagggctgggagttgaacctgagaagtttgactgaacagtgttctcacaaacgctatgccatagtgcctctggactacttgaatcaccaggttccatcctcatggtatccttaagaatacctgggtcttaattataggacaattgataggccacaacaaatctggtaggtcagttatctcctaaagctaccccaatggggtgttccagaaacttcctggatgcatccagggtacaccaaggtcttactcttgccagctaatgtgttctgttgctccagggctcactgttgataatcatgggtggtatataacaagaaattgagaatcctgtaggcatatggttatttaatcagcctttgattttaaataactttatctgaacactgttaacatataatgactaaaatctaacaccaaactagctggtcacaggtcttctgttagtattttatatttccattaacttctttaaaatgttcctatatcagaagacattgtgtaaaagccttattaaatgcttctgtttcattttcaatttaactatattagattatatacctgcttttctcctagcttytgctttcatattaagtcatttcttccattactgaaatcttgtttgtttttattggataatctgattccaagtttagaacttctatgttttaaaggactgtggatgacagggagataaaaaatgaaaagactacaagaaaagcagttcctagtttcagcaaaaaattcaaaggcatttgggtcttctattattaactgctcttttcctattttggaataaaattaaagctagagtctagtttaggtatggtagttatcatagatgcttccactactacaaacagtgtgttctttgaagatctgaaataattaaatacagtgctttggatcctcgccctgttttaaatagaaatgaattttcagaaaggattctactctttaattactgtggaagacactgtaagagttaacattgtttaaagaaagccttatatgggaaagatcaattgttagttagtatcctaactaaacgttttcaaccccagatacccattcttatgaagaaatctgttcttcagaaatttagtgtatgtagcaagccgtctgatttttccttaggctaataatggaggtcactccattaaaagtactgtgaaccactattatataccacagaatacagtatagcagtcttccaatttttaaagaaacatagatacatagattaatatatagaggctaggtcttgctttgtctcccaacctggagtacagcagcaggatcataattcaatataatcttgaactccttggctcaagcaacactcctgcctcagcctcccgagtagctgggactactggcacacactaccaccccggctaatttttacattttttgtagaggtggagtcttgctgtgttgctcaggcaggtcttgaactgctggcctcaagtgatcctcctgccttggcctcccaaagcactgggattacaggygtgagccaccatgcctgaacagatttatttttataaacagtaataaagttaggttaagcccagatagtgaaagtaggcaattgtagagtgaactttcatctttgtaggcacttgctctgtttatcaagttcttaattttcattccctcccaagaaaatatcccacttgatctttaatttttattttgtttaacttttatattttttaaccttgatgatattttagtataggctaaatctcttaggacactcagaagtttttcccccccaatttttaaagaagttccagagttccattttatctttctagttgtcttttaaagctaaaatatgtttattgtaaattgaaatcatgagcagatgagttttagtagagctaaaagaaggacagrgtctgcctgttcttaataatcttagggtgattggaaaatatatcaaaagacattttaattttcttataatctttttcacagggtctttcttgtagatgacagctgtacctttcccacctgcctctttctcttactaatatacctaagagaccttttgagtgaggggagatagagttattataatctgtatttatatattaatgaagtacattaaaaaatttatgcatggatgtaaagagatttactgagataatttatgtagaatcagtacaataggcaatttgtaggccggatgcggtggctcacacctgtaatcctagcactgtaatttgcctgcctcgggaggccgaggcgggcaaatcacttgaggtcaggagttcgagaccagccgggtcaacatggcgaaatcctttctctactaaaaatacaaaaaagttagctgggcgtggtggtgggcgcctgtagtcccagctacttgggaagctgtagcaggagaattgcctgaacctgggaggcggaagttgcagtgagccaagatcgtgccactgcactccagcctgtccagcctggacaacagagtgggactctgtcttaaaaataaataaatttataaataaataaatacatacatacatacatacahaaakgaataaataaaccagcactttgtgtacaataagcaatttaaagcaagctgctttttttcctgatattggctaaatatggataatattgatgtgttttagctttttaaaaaatattaatggtaatatatctgccgtatagaacatttagaaaataagaaataagagaaaaaattactgtcagccctttactctatgttaatatattggtatactccttttgcctaatttttatgtgtttgtgtgtatttttatatactttgtgtgtattctaaatgtattttgtatatttgtgggttaaaaacattcttgtgattgtactatacagtttttttaatcccacttatcatatagctgattttttaagtttttatcattaatattaatttggatgtttgtaattttattaaccattccaattctgtttctaggtttttattatttgcagttcactcattcattcatttgcttattcattcaaatagtaaatatttattgtatgcttgctttggtgctaatattttgatgaatattttgatgcataagatttttttcatttaaagtaggatgatttccttagctgagcatctccacactgactcttctgggtgaaaatgaaggaatgtattaaaccactcattataaacattaccaaattgttttcaaagtttcgcaccagtttgaccactaagaatgtgagtctgttttactctgtcctcacctgcactgtacacaataatttacttctttcagtttattacagctatggacagttttccacatttaatgtattacaggtggattatataaattttaaaaatgcatgttagtttgttccacaattcaatgatttcttctacaggagatgcttgattcaaaatcataattaaaaatacatacatgggttaagagtgaagcaaagactatcaaatgtacaaataaaaatatgcgtaattggaaagatagttatgataccaaataaatgactcaaatttaaggctatatatataagtagccttaaatcagaaagtatctgcagcatcctgccttcagcaggaaggcaactgaaaagaacactggttctgtgtcttaggtttaaatccttctgtgccacttactagttccctgtttttattaacccctttgagtttgtttactcttttgtgaaatgtgaatggcataagaatgtaaaatgattgccagaaatgacagggaaacagatttggatgcctctccttcaaaaaaaaaggggtgggggggggcggcaaaacaaaacattctagaataggatatttgaacaacttttctttatgtggttcacgctctaaattaatttgttgttaagctctagtagtgctgtttttaggtttaatgggcttttcaattttattttgttagaatgtttactcagaattttgcagaatagactttacaaagttgtttgaaggctgttaggtatactaagcaggaaagtaatagctatagtaaaacatgaatagaattagtgaagaaaggtattttaataayatagcagctggaagaaagattaaccaagccatgcatgaattgattacaatataaagtgttaaaatagattttcagacacgaatttcactattttaggttttagaaatgtttttgtatttatatttgaatttacctttgtgtggttttggtattcttttccgagtgaacatgcttcagtgtgttttgaataattgaacaacagttcttttcccctcttggtctccactttacttctacaccacacacaccttcactgagaatagatcaccttttggcctttgtaagcaccagtcacctagtgctgttgcctttcagagttgaatatggagcaagtgaaatctgcagatgctttcacgtatattaagcagccaattgcttaataaaacattatattgtagggtgttataggttcaaagaaatagagagcaagtgaaaaatgtagagggaagaacttgtaccrctggaatgagctactttatgctgtttatataagagtcttttcctcttcagagcttgttaaatgataataatattctgcagcaaggttttcgtcataaggatgaaatgagagggatatgtgaaagtacctagcacagcctttcccattatagggaaaagggaggtaatatttgagtaaccactccattcaaaatgttttgttaggtagtggggcacatacagaaagtgtctgcctttgagtttccagtctgttcggggatacagaatgaatggatctgaaatgactktagtcatttagaacatttttttctgtttaattaagcaccacatataagtgccatcattttattccggtcaagcagaattgggagaaaaaagggatacactcctttttttttttggagacagagtcttactctgtcacccaggctggagtgcagtggtatgatctcagctcaccacaacctccacctcccgggttcaagcgattctcctgcttcagcctcccgagtagctgggattacaggtgcccatcaccatgcctggctaatttttatatttttagtagaaacgagatttcaccatgttggccttgctggtctcgaactcctgacctcaagtgaaaaagggatacacttttacataaaagtaaactttcttgattgtagatgatgtcaacaggcagattttcaaggaaratatctaatgtgttgggagggagaggtagagttactgagtagggggaaaaatgggtcagctagacagtaatagttgtataatgtggttttacatttatttatttttttgaagagctgtgagttcatgattgtatttatatttacctttattttctcaaataattaattgtaataagcaaaatagataaaagatagcatttatgcgtgaaactagaaagcgagacatggacacagtatcaagatccagattgtgctatatagaatacagattgagtgtccctcatccaagatacttgggaccagaagagtttcagatttcaccttttttctaattttggaatatttgcatgtatttaatgaggtatcttggggatgggtcccaggtctaaataagaaattaatttacgcttcatgtgtacctcatacacatagcctgaaggtaattttatatgattttttttttttttgagatggagtcctgctctgttgcccaggctggagtgcagtgctgtgatctcagctcactgcaacatctacttcccgggttcaagcaattctcctgcctcagcctcccgagtagctgggattacaggcacatgccaccacacctggctaatttttgtatttttagtagagatggggtttcacaatgttggccaggctggtcttgaactcttgactttgtgatccacccgcctcggcctcccaaaatgttgggatttacagacatgagccaccacgcccggcctatatgatgtttttaataattttgtgcatgaaacaaagtttgtgtaccttgaaccatcagaaagcaaaggtgtcgctatttcagtcactcgtggacagtgtgtagttgtttggcatcaccattactcttgactgaatttatatgctactgataagcagtcattttcttacacgtacacgtgtgaattttttttttttaaccttttgtgggtatgcctgcatgggggaattggggcatgcacgggaatgataattgcatctaaagagaggaggatcctgtataaattatatgttgtgtacctacattttaactttgatctgtcacataaggtcaggtgtggaattttccacttgtggcatcatgttggtgctcaaaaatttttggatttgggagtatttttggggattcagattagtgatgctcaacctgtaatataaaaatgtaggtttctccttgattgttatttttggtagaattagttaaaaatgactttctgaggtaaacagcatggaaacaggaaattgtttttaaaaaggagtgagtttaatatatacacctatgtacctgtaaaaattgaaattaaaaaaatttttttttgaagtttgaaaggccaatatccatttaaaaaatctctttgaaaactggtaacttgtctatgaggtaaatgtttgttgaactgaatctcatttaattttaaaataaaaatatcactttttttcaatttgaggtgtcaaagatttcaagactctagcataaaattgctagaaaaattggaccaatttattgtggggattagatgaaatactgtatgtataaaataatatataaaacgcagtactaatgaaagggcttaagaagaaatgtcatattttcaggttaagcatcggtactgatattattagtaacacttgaggcttagaggaaatggtgttgtttgttagaaacacttactatagatttgatactgaaatctgctttggaattctacatctctcttaaaataattggagatatatgaagtagttgacactctttaagttgaaccaagctgttagggaataagatctcaaatctttaacaagacttatctggatctgctgacttttgtagtctcttctcttgttaatctgtattctagctacacttcccttcagacccttaaatatcctgagcccattcatatctccagctcttatattttccctttgcatagaacagtctttccatcccttatcctcaccttctcttaactcctattcgttctttaagttttgtaaaagggaaacagggaaagttttccctgactctgtgtcttattctccagaaacctgtcttttcctattagcgccctgttctttcatgcctcttctcctagggtgtaattacgtatttatttgtttgtttatttgtctagcagtgaacccaagcattatcctagtgcctggcacatagtgagttctcagtaaataattgttgagcaattaagttaaaatattgagtaacttctctttggatcttaatctaatttttgctttgcttttgcttgcttcttcatctttttggggtgcatattcagttaatagctgttatgattattgtgtggtaatatttacctttaaggaagctgtgcacttttcacatactttttttttttgtaatgacaccattcacaaacaaggaccaagttaagttgcagtaagcttacttttttacctccagagaaatgaaaacatgttcacacaaaaagttgtatgtacatttttatagtggctttatttataataaccaagaactgaaaacaactcagatgcccttcaggtgtcatgtcaacaacccaaatgtccttcagctgcccttcagtaatcaaaggagccctactgaaagggatcacctggtctggagaaagctggtgtttgagtgtgattactactaaaattttcctttggaattgatccttactttgctggctcatgtaatcaggcatctcaaacagttacttctgccaaaaagcttatcctaattggttcccgatctagagccctctattgtgtgttcttacattctttcatatttctgtaacggttctgtaattgtttatttacttaactgttccttccacccaaaatagaagtttcttgattttgtctttatagccttctcacctaacatagtacctgggacattgattgctagatattcaggaaatgtttaatggtatgaaggattctcttcacagtaacctgtttcaaggacttcatcttcgggccttgaagagaatggacacttggaaattctcctcctgatttatttggtgcatggatacccagatgaatagttaaactgagatttttaatagatggacaatccttctatactatggtttatgacatgtcattgattgctgcattgattttggtacatctggggtgactatttaggagccttctcctcttaaaattcgttgtgtatacaccccaaagtcatgtaattacgttacagagaattaccattctgatggtgtgaagatacaccttgggaaatactttaaaatcctggacagaaactgaaatatatatctgaaagatatgttcatgggtattaggtttaaggatgttaaagctatagccttgaaaagctttgttcatgatttaagttccctgccatttgtttcaaaggcacatttacggaaatgtgtattttgtgtgtatttattcagcaaatatttgtgtgcctattacgtggtggaccctagaatccatcaatgaattcacaaagcagacaaaaatccctgcactggtggagtttacatggagcttatttgctgcctctgtatgtttctatatgcatgtgtgtagatatgacatcattataggacaggcagcataataaattgttataaggatgttttgtattttagtagaggactgataaaattggagggccattgctaactcttcattatctgttaccttatttcacagatctgcattttgaatttttttgccctggcttatccaaacaggaaaggcaaagaagttttattaaacaattgaatgaaagttrtatttattgttctagcaggtgcaaagcattctgctgtaaatattgcagggtggaaaggatggctaacacacagttcataacttcaggaagcatatagtttaatagagacaagacaaatatatgaataatatgcaaaataacatgaatggtacaaccaatgcctattgtattcaaaaaaggggagatgttacactaatcagaaaggccaaaatgaaaaaacctttgatatgagcatcatgaaatgcctgcgatgatgtggcacaattggaactctcattgttggtgatgtaaattggtacaattgctttgtaaagatgtttggtattttcttataaaagtcagtgtatacctgctgagaaattccactccttatgtttasccaagagaaaaagaaaacatacgttctaagaagacttattcatagcaacttcattcttagtagtcaaaaactagaaatagcccaggtgtttatcagtggtggagtggatgatctatggtatagatatataagggaatatttatgcagcaataaaagggaatgaactacttgataaccacaacaacatgaatgaatctcataaacattttgctaaaagaagcctttcacaaaataaagatacgttstaagattccatttacatgaagttttagaatggccactcatttattgtggtggaaaaaaaaacccagaacagtagttgactctgaatgggagagacagaccagaaagggacatgggaaaattttctgtagtaatggtatgttctgaatcttgatacaggttaggttgtgtgcactggtttatgcattgataagacagtgaatatatatatatatatatatatatatatatttttaagatctctgcatttcattgtatctaaattttgcatcaaaagaaaatgaaatatattgaactctaattaatgacaaacatgctgagttatttagggagacatgtactctacagttttacttttttggtactttcaaagtagctgtattaatgtgtaaataaatgactgtggatagataagtgtgctgagcaagtagtagcatattaatagtagaatctagatggtgattatataggtgttcactgtaaaattctttcaactttgctatatgtttgcacattttcatacaataaaatgcgaaggaaaagaggaatagtatatrtggaaggtagcataaggaaattttaaaaatgtttttatttaagtagatcttaggatgtagaaggatggaaaagatttgttttggttgagggagggtgtgagttggtatagaggcagagatgtcggaaaggcattataggaggagggagtagtaataggagaaacagcaggttaagaattggactagtgattggttttgtttggctaaagtacagggcaaaatattgcaacatgaagatggaaaagtagaaggcatttgtgtaagaaatcattagaagttcagtttgtgagtggtagactatttcttcgtttgcagcaaaggggaaggaagatgaggagtgtgaaactgtaaaaacttatgtggaaagaatgaaatctttagataatagccgttgaccatttccattttcttcatagtgtaagggtatagctattggatatttatttgttttttgagacagagtctcactctgtcatcaggctggagtgccgtggcaccatctcggctcactgcaacctccacgtccygggttcaagcagttcttctgcctcagcctcccaagtagctgggactacaggtgcacaccgccacacctggctaattttttctttttgtattttagtagagacagggtttcaccatgttgcccaggctggtcttgaactcctgagctcaggcagtccgcccacctcggcctcccaaagtgccaggattacaggcgtgagccaccgcgcccggccagctattggatatttattataagtgggattgtggatcagtgggatttggtactgatgagatcttaaggcaaatgtcagagatttgaggtgataaatagaatgtgttaggaattctggcagtagacatttaaaaaatatctgctggtagagtattacactgagtttagtgtgaagtcattgaggaccaaatccacatagtttctaaattctcctagcattgtttgacagcatctgtgtgggagaacagagcaaattaatggtattactcagtcctagagattggcaagggttaccaagaatcctgaggtgcagtgaatgtgtagttgaagtaaagaggaggcaagtaaagcctgtgaatggtggtagactggaagagttggaatgagtcaagggtcaggaattcacaatgaggacaaaagaagattcagtttaaaaagggtggaggagatgcaggatgtggtaccacgttcttctctgctgaatttcagagttctaaggtcttcacagtgaaacatttggaagtaactggcatcatcctccacttgatcacataaacctagaacttaggaggcttgttgttttttttcttttgttttgttttgctttttggtaacctgattttcttttttctctttttcaacttttattttagatttagagggtacatgtgcaggtttgttacctgggtatattatgtgatgtatctattacccaggtactgagcaaagtacccaacagtttttcaactcttcccactctcccttgttccctccccgactccccactgttgttgccatctttatgtccatgaatacagtacccaatatttagctcacacttataagttagaacatatggtatttggttttctgttcctgcattaattcaattaggataatggccttcacctgcaccttgcatccatgttactgcagaagacatgatttcgttatttttttatggctctctagaattccatggtgtgtatgtttaataccacgttttctttatccagtccatcattaatgggcacctaggttgattccatgtttttgctgttgtgcatggcgcagcaatggacatgcaagtacatatgtctttttggtagaacaatttgttttctttggggtatagacccagcaatggggttgctggatcgttcttgggaagtctttaggaagccttcttgaaacttattctcttaatctccacctcaacgaggttgttttaatttttgaatttttgctgtgaggataatctaaactatatgagaatggataactagatagatgaacaagatgaattactattttagaactgatacactccttcttgatttcagttgcatacaattgcatttatgctgtgagttggtgccaaatagaataggtttattgtcatacacaaatgaggaaagatcaagatggatttaaatcatctttgcaataagtgggggccaattcacagtgagatggcatcactcacccctttacgaactaaagagaaaatggcaagaaaatgtataaatatattttgcactggcctcagtggcttacgccttaatctcagcactttgggaggctgagatgggagcatcacttaagcccaggagtttgagaccagcctgggcaatgtggcgaacacctgtctctacaaaaaaatacaaaaatcagctgggaaaggtggcacgtctgtggtcgcagctgcttgggaggctgaggtggaagaatcacctgagcctgggaagttgaggctacagtgagctatgttcgagccactgcactccagcctgggtgacgaaagtgagaccgtgtctcaaacaaataaataaataaaatttattttggtttagatatgcactgaaacatatataaaggcctaggtttatgttattagctatttaaataactttgtaacaaaaataattctagtcaatattagggatgttttagaaaggtcttatgttactcatatttgaaaaattctgttgtaccagaataaatttaggtcctcctagcatggtttataaggccagtcacaaccccttcttcttatctctccttaattctctctaatcacctacttttgtttcttgtactttatgacccttcagcaatattaaatgttctctatttgatatactactcctcttttaaaaaaaaaaattgttttaaccttcaccatttctttatccttaatgacatagatcaggtttctcctagaagccttgctcttacttaggctactccctaatctctgagctcctacaaaatacagcatttgctgtattattttgttttcacattgagtctgttaaaatcatatatttaataaggctcggtattagtcatgattcatttttttgtattcccagcatatagtaccttacagatgatagtaattgttgacaaaatctgaacagagtagcagtgctggtgaagggcattgatgtcaaactgtggttttctgaaagctattctctggaagaggaagtttattactataataaaatagaggcttggggtatacctttatgtcttatgtatrcagtctgttctcttaagatgaaatagctgtatcagaaaatagtgttccatttggatcagacataactattccattgagctttatacattgctgttttgtaagctgagctgcttctatttccctccccttttttggttctatagtacttaaaaattacatcatacagtgatttactagtatattttaattttgaagtcatgagtaggcagaattgtaaataaaatgtaaataatacaaagataaagtattagcatataatctttctacattttcttagagtttctcctgtttttttttccaggaaccctgaaattatctgcaggagttgcttcatgtgattgctctttttaattatctccatgtgaagaaaacattgccaataatgttagcttgctttttctcagcagtagtcagttttgacattacttgcctatgggctagccctctacattttacagggcataatttcttaataaacttttccccccatattggaaactttatgacttaaaaatatctgggaaataatcattactcatagaactgacacagaagttgtagaatccacacacgtaagcataaagacttttattttactagggagaagtcctcacgtgatttttttgtactcttattttaggctctttaaaaaaaattttggcaaattaagagttgcagattagtatggaagataaaaagttgtcagatagttttaagaggagacagctgaaagcaagacgaaaggcggacaacctgctaaaagcaaacataattcccaaaaagcgtgttaggtgttttagctgcgtaagctattggttataaggacattgttgtgtaacagcagagtgtaataactgatgcaataatgagttaatagaaaaaagttaaattacatttttgtatttgtttaaaatgacaaaggagtgcgtgatagattttaggaagatttccaataaaagacttttttttaaggcaatatcaacgatttatatatatactcctttttgtgaatttgatcataatattttataggaacatttttgggatctatgacagtatgtttaagtgaaactagaatttaaaaatatgaatcctcggatgatagcttagtacctgtgtgtgtgtattttaagattattagatgtgactttttccttgatctttctatccatgggaatcccaaagccttatatggtcaagacttagcttttagatttctagtgaaatgcaaggcaccactccaaaaaagaaagaaaagaaaaaaaccaactagctgtcttttactctgtcttcagttctgtctttttgcctgactttattaccacagtagttaaattactaagaaccttctgtgcgttggtagtctgtcttagtagagggaggaattccttttgtggcagtagttttatgctacagtgctgttattttaacagaacattatatgctattggttatgtaattttttaaaggaaacttaaaagcagtctcattatgttatgtcactataaaggtagagaggggttagatcttcatgtggtgtaactaggaagtgtaggtttcattgatggtaaatactagggaaggtgaaagcaaaattattacttccttggaatctttctgccatggaactcctgctacctgaatagagggcacaggtgataatgaggtgaacattcaggagcagcagtgataagtgacaaagggatgctaggataacttacttgtactctggtatgttcttatttagctctaagtacagttatctttttgccttgaaggatatgatttttctgagtggtcatgagtatcacttatttatacatttaactccaagatggtttaatagtctgtagaaaatttttagtatcaattacacatttttcatgtaggaaaaaggaaagtgttatttgcctgtttaacaaaagaaaattggaaaaggtttttacaatgtatccattctcctgtagtaagtcagctatgatacagaaaaatttctctgatcacagtgatttacaggtgacaaagtattggcaaactatttcctagtcctactaatgaagctaaatcatacttgtagacaaggtttctttccttcagcatttgattactgtctaatgtgttctagatactgtacatatagtaacaactaagatgggttcttgcttttgagagcctgtttgagagcccgtagtgtagtggaggcagaagggggagaaaagggatgaatgtaaagatagtacatacgagtagataattatacaatttttaaagtatgttaggacaggtatgttataatatcaccgaaaatagtgggaggcagttattcaaccttagctacattaacataggctggagaagacattrgaaataaaggcttaaggtgtaaaagactaaattgaggagaaatctgtagggtctaacagtgtgtcatccattactcagggcaccctttatcttcctccagagaagttaaaagtcctaaattactgtagttaattacttttttttttttttttgagacacagtcttgcttttgtcgcccaggctgggagtacagtggcgcaatcttggctcacggcaactccacctcctaggttcaagcagttctcctgcctcagcctcctgaatagctgggattacaggcactcgccaccactcccagctaatttttgtatttttagtagagacggggtttcaccatgttggccaggctggtctcgaactcttaacctcaagtgatccgcccaccttggccttccaaagtactgggattatagggatgagccaccacgcctgacctcaaagagcatttattaacatttgccattcagtagtttcatggaaacagtttggaaatactatgataattttttttttaagtaactttactctcagaagggctccatactgacagttgtttcaggaggcagattaaaaattcaggtgttcttatttctgccctattacttccccttttgacaggatagtgatatgctttgaagaggtgttaaaactttaaatataaaagtactagcatcgaagaaaatgattgaatgaatgaattatgcagcagaaaatttatatttccctcaatgcaaatgtataaaagttgacatttcttttttaaaaaaattattgccatttgccctgtctcctcaaaagtaaatattaaacgaataataatttttattatttattagaataactctggttagactgttrttttgtatagtttttacttgttaatcatgagtactgccacattatcagacaattattattttttggttctcaagttataatttcggattgggcatgtttaagaaatggagggtggtctagtgttattagagctttgaatttgtgcaagtggagagagaggactaagtttaggtaactcttacttgatgacatttaagaagggtgaaaatacaggagaaaagacagatattataagttgcggaagggaacataatgtttggatacacataagcttaagcagtgaagactggtatgaatactttatacattcatcaaaatccaacagtatggccattagttatcactgcatagtagattacccccaaacttaaaataccaaacattagctcacactttctgtgggtcaggaatggatatgacttagctgggtgcttctgactaaaggtttctcatgatattttcctcgagctattggctgggactgccatctcatctgaaggcttgggtagggtagggtggggatctgcttccaagttcacttatgttattggcaggccttgcttccttgccacatgtgtctctcaacatggctgccttccagcatgacatttggcttatcccaggttgtgagtgatccaggagagagcaagagaggagggtgcatgccaagatggaagccatagtctttttataacctaatctcagaagtgacatcttattacttctgtctcattaagtttgtaagaaacaagtcacccagtctaggggaggcagttacacaagtgtgtgactaccatgaggtagtgatcattgccaccttagaggctacctactataagcaaactaatataatatttgtggtattttacattcttcaatttacattgccatgtacttagcagttggttcctatttattatgccttaagagctgcttgttatctccctttctcactattcaacaagatacttgaatcaattttatctttgcttctttcccctctgcccccatctaaatgttcagtgcccctcttattttgtgactttgaagtattaactcctgtttcctcaactccccttatcagtggtcccagaaatgcagagtaacttggttgtctaaaatggaaaatattatttagttaagataaccatataagattttttcaatccttcatcatccccaggatccagaattatatattcttaacttcattttttatttttttaaaaacatawctgaatatagctgaataattactaggttctcagtctctcttatacatatctttgctctttctttctgaaaaggattcaggaatgtagttcccccctgccttccaactttttttttctttccatgtcatgacatgacaaaaaaaatttcccttctcttccaaaacctttcccctttttctcaattggagagagagagaaagagagagagagagtgagtgaatgtgtgtgtgtgtgtgtgtgtgtgtgtgtgtgtgtgtgtgggtgggtgtgggtgggtggtgtgtgtgtattcttgaggtttctgaagttacctatgtatactggagtaaggagaatttgagattagagagttaatattagaaatttatctatgtgtatgcttatgtctgatggcctatgagtttattgcaggcaaggtttggctctcttttaaaacggttttgagctaggcctccatgctttatgttaaaaagtaagttgttcaattaatgttgattgtccgtaactaaccattgtttaattagaaagcatcttttcagaatctctttatacaaatcctttgatatacttttgttaaaaaggatgcatattacatatgcttattttaattaaaaaatgttagaagactgaagtaacggttcaaatttgggtaaattttcctttacaactagagagagtattttcttaaggatttctttaagatttagaagataggcctgaaaacatttcagtggatatttttgtgtaggataatttttaactacatttcaattttggacttactcaattagttgcttactggggaagatgaggaagtcagcactcatccattttaatcttcatctcattttgttagccatgttactatttctaccttattagagtgtatgatatttaaatcctttctaatttactttgtatgagtttttcaaccgtgcttattttgttgttaaataagatttatcatccacctttgatctcttattttattcaatgttattaagtagcctcaaaatgtagggcattttctttggtttttcaagttatgtcctcttccacactgctgtctctatctgaagttttacatgcttatatactgctatggtctgaatatttctgtcatgcctaaaaattcatatcttggattccttaccccaaggtgtgatggtattagaagatgggacctttgggagatggttaggtcatgagggcagaacccttttaaattgaaattagtgctcttataaaagaggcccaagggagctgcttgcccttccaccatatgaggatacgtatatgagtcaggacgcagaccttcactggacatggaatctgccagtgccttgatcttggacttctgactccaaaattatgaaataaatgtttgctgcttataagtcccccagtttatgatattttaaaaatgacagcagctcaaacaaaccaagacacattaaccccaaccccaccatttctttttaattttttcttcctgtagtatgtgttgttcatagttgctgaattaggttagactacagagggctgatttgtattcaaggattggcaagaaaagtttagaaccagtgcagaattgtatcaaaatagcaagtgaacagtacaaatgttgtaaaccagataaagatacagggatatgggagatattatttcccagtcagtgtctccctacctcatgtgttggtggtcattgtggctcacttggcatgaggaacccagtggggagcagctcagagcctggattttgttgtcttttctatcactaggctggtggagaaagaagcaaagtgagagcccatcagctttctcttctgcatgttactatgtaggccattccttgctgtgacattcatttactagggctctatttcctactcccttatagggccttcagttgaactggacatgttctgtcacaattgccatagtgtttattctgtatctttttagagataatccatatgtgaacaaatacacacacacaaaatatatcacattggtcagagactactcgtgttttacatttgttcttttcactttgcaaaatatccaggaatttgtttcatattagtccataaattagttctttattgatggacatttaaattgtttccagttttacacttaccagaacttagcaaataattctgtacatgtcattttgcacatgtgattgtatctgcagaataaattcctagaatgaaattgcactgtcaagggatatgtgcctttgaattttgatagatagaaccaaattgttttggggtgttattttaccttttgctgctgctgtttagttgtgtagcctattggttaggggtacagatgctgaagccagactgctgggttaaaatcctgaattttgccagttatcatctgttaaatggtagtaatagttctcacttactgggttgttgtgaagattaaatgaattagtatatgtaaactacctggaacagttccatggcacgtataaaagtgctatgtaagtaagggttagtgtttatttaggacatggattctgtaaaatgtggcttcactctgccatttttactaggaagaacttcttataattctattttccattttccccttgcttctatgtaactgcattttatttctttccctcctgcctcttcaagctactgcttctcaaccctctgttgtttcccctttcttaaatactcatgccctctgggttctgatgtagctttctctgatcactttttacacatgctgcttgtgccttgttatttattcctctagctttggttactgtgggtatcagtggttcacaatctaatgtattttacaagttagatgggcaacttctttaaagaggaaatttctgggcaccaccttcagagattttgatttctcctctcccccaaatattggttaagtactttagttaaatccatagcatttatcatagctctttttgttgttgtgtgtttagttacgtgtcttgtgctggactctaagctgtgtgaattcaggtatctggtctgtatacttcaccattgtattcctaccagccagcatagtgtctggctgtagcagacactcagtaaataattgttgaattattaatctgttctctttatggcccacttgttttgctgaacactgtttcatcaagaaacaattagttaacaactatgtgtattaactatgttaatgttttgttttggaagactgtaacaattttatgtccttactgtagagatgtttttgggaaataactcagtgactttaagaggttaatgacttaaagtgttaattaacgctttggtgtgtagtcttccaggcttttcattagacattgcaacagcaagaattgtgtcatattatgagtattcttttgtaacttgttttttaagtaaatagtaagtagaagcttttgtttccctgaaactaaaattttcgcattagtatatttattgagtgtatttattgattaaacccctctagctgagtttgtgaaccayatctgataaacgatagaattcagcaaggaaacctttctctgtatctgccttccaccctgtctccagagtgcagacagtaatgagacctgcataacatttattttctccaaaaagttttcttataacttatttccattcacatattgagttttcctttatttcgctatatcrctgttaaatttcatagcatttttctacttacttgcttatctttttttcttaattgggcatcctgtggacaagattgtttattttagttcatcaacaaaaatttattgaaatagcactgtcaggaattatggaatgtgtaaggcagtttctattcttaaggaactawaatctagccaggagaagagtggaaatacataaaatactaataaagtcagcatgtcttacacagtacttaatacagttttatgtatacatacacacagtaggtcataaatgcctacttatttaagaaattagtattttggttcactacatatgtattatgtatttgctgtatgctaggcattgtgcacaaaggaaacaggaaaatatgccctctagtgttggtctttgtatctaccaaaatgaatgacttactgcattasgttatatgtggtaggcagtcagtaaaaattattcatgaaagaatgaccctgaagttcaatttattttgtatccctaatgactaaactccagaagaaattctgtgcccttactaagtccccaaataaaagtgttggcttctaaaaatctaggttcaatgtactactttatagatttttatcagtaaaggaaataacagagctatgtaacaagaatagataaagagcatattttaatctttggatatttgtggtttctagtttttggcattctcattcaaatatatagtatttgttgaatgaatatttatacagtaattaaattactttttctttagaaacttttgtgggttttttgtcttgaattgttttcgtcagatttttttatatcctgtatttgctatgtctagttcattcagtcaacaaatatatattgtgatctctctttgtcagacactgttcttctataattactcttagatactatatataagcctcaacttttgtttgtccaaatgaagagttccctatggtctagccattgtgtatgttttggatttcttgttctagtcatcttgtcatttgaatctcatttgaatatttaattattgtgtggatagatttctgtttttacatctagattttcacacctgaggtagtagaaaggtgagaaaaggtcaatttaaatgcaatgctggactctttgttttcataactaaatatagacggcctcctaaaattgtacttgcttttcatttgccagtattctaatgcaagagctaggtttttcttttttattatttagtataggagtactgcttggagtttttctttgtctttcttgtgtaaaccacacccataattcctcctttgaaatgtcccacttcagttttctttaaaatagaacaaaaacattgcttggacagtatccaattcagttcctctttaaacatactgacatttatgtcgccctgaatgcttggggcatgaaatattttctagtatatacacacaatttctgcttgtaccagttgagcttgtcgtaagagtcataaagaattgtttctgtttggctgaatgtggtggctcacacctgtaatgccagcactttgggaggccaaagcaagaggattgcttgaggccaggagttctagaccagcctgggcaacatagtgagacactatctctaacaaaaaacaaacaaaaaaggaattgtttctgtgaagaggaaattgactaagagaacttctgtattcaaagtaattcaaactaatttgcctattacctatcaataattagctgttcctaatgattaggcacaaattgcaagcatttcgggtaatggactataatttcattttcacctaaattgttataattacatttatacaactcttttcttttgctttgctcttctgaatcatatataaacttatgaatgagtttgcagaaaagtttgtttgaaggatgtttgtaatccctaagattttcttagggcatcttttaaaacttaaccatcctcttagaaacttttggcaggtgggactcttacctgccacctgccaccaaaagtggcactaaaaggaatatttgacaattctttgccatttaactgtttcataatttatagtgggataaaaatgcattctagaataataatataaaaaggagaaaataatttaaatggggaagaattagcatggactatataaacaatagtgtttaactttttgacaggtactactttatgcgctgtatatattcatatatttctcatagtaaacttttgaggtagtgggttctattattatcctcattttcaggaggagactgtggcacacaagatgggagtttacccaagaacacccaaccagtaaatggcagaactggattaattccagacagtctggctctagagtttgtacttttaacaaaaataatttcaagaaaaggaatataacaatgttagaatttatttcaaatgctacttgttttgtgatggcaagtttactcaatttaattatgtttgtttaaacatacttgttctattttaggaatgaaatttaatgttttttcaagctacacatctcaagatctgtctttaagtcatggactctgtctgctttgagcattgtataaacaccttgttaactctttgttagcaggcttctcaattttttccttatgaacatgtgtggaacaataaaaactaaagttttatgtacttgaatcagtttacaactcaagttgacaaagctgcctgtacgtggaattaaatgacaaaactgtcttcacacagccatttattattggtaattgttctgcatttacattcaagaaaaacttgaaggtaaaccatgtcagataagattttgaaagtgtwtttgagccgttctgcttctttccttatatggttcagtaaactgaccaaatttagtcagaaatttaagtcagcaagtcttgtttttcttaatgtgctacatgtgttagcttttgattctcctagcaacaatatttttatgggcatgctttgccagtttcttgtatgtactttataaatgttgaggacaacagtttgaacaatttacaccactaatttgagattgatatatgatatatattttgcggcaatgcttttagcatttaatttatattaaaatatttcaaaaacatttataaacaaaagaacaagcagatttaacattaattgcttttggtattggtattttgttggtgtttcttatgtcgacttaaaagtatatacatttaaaatcaaaattagcagtgtttcatttattggagaatagctatttctgtgtgttaatgtctttcaaagagccagtgtaatcaccttcttcaaatggagaaactttaaaaattaccaatttgtcatgaaagtcttttatcttaagtgtcaaaggattactcaaaagatggcagataagaccctattctggatcttgcttacctcaccgtatttggctttgcgtctttatataccagacctgtttttcacttgttcttatgttaaactcaaatatatgaatcacctccaggaaatattccctgacgaccaccattccttcttagttctccttttctcagctctcataaaaaccagtggacgtgtctgaaattgtcttaccatattccttttgatataatcatctatttttgtatttgtcttctgtactagatggtgtcttgaactttctatttctagctgtttamtgactaaggtatcacaaatgtctgttttccaagcacaatatcctgatcataatttaatcttacccctttccttactgttttcaaaatcacttctctacactctttccctgaatgatttcaagtcccattgttttattacctcaatgcagataattcccaaattgacattttcttcccacatttattttcacagctccagatctatatggttagataggtgtacagacacctataaattcagcatatccaaaacaaataaaattgtcatctttcttttcccagtctgctgcttgaatctgtggtgtttatcttcatgaatgtcttcttcctgcatcttaactcttcatatctttcattaaaccttgaacatttcctcctaagcttccttaatacagtttcatgagtacaggcataccttagagatactgtgggtttggttccagactaccacaaaaaagtgagtcacacaattttttttggtttctcagtgcatataaaagttgtgtttatgctayaccgtagtctattaaatgtaatgtagcattatatctttaaaaaatcataatgctgtagtacataccttaatttaaaaatgctttattgctaaaaacaaatgctagtgattatatgagccttcagccagtcatagtctttttgctggtggagggttttttttgttttgttttgtttgtttttgttttgacggagtcttgctctgtygccgaggctggagtgcagtggcacaatcttggctcactgtaaactccacctcccagattcaagcaattctcctgcctccacctcccgagtagctgggattataggtgcgtgccaccacacccaactcatttttgtatttttagtagagatggggtttcaccatgttggtcaggctggtcccatactcctgacctcatgatcctcccgcctcggcctcccaaagtgctaggattacaggcatgagccaccgcgcctggcctagtggagggtcttgacttgatgttggctgctgattaatcagggcagtggttgctgaaggttggagtgactgtgacagtttcataaaataagacaagtttccctcatcaactgactcttcctctcatgaaagatttctctgtagtatatgatgctgtttgatagcattttacccccagtagaacttctttcagaattggagtcgatcctctcagaccctgccactgtatcaaccaagtttatgtcattttctaaaccttttattgctatttcaacaatgttcacagcatcttcaccaggagtagattccctctcaagaaaccacttgctttgcttgtccatgagaaataactcctcatctattcaagttttaatcatgagattgcagcaattcagtcacatcctcaggctccacttctaattcttgttctcttgccgtttataccacatctgcagttacttccttcactgaagtcttgaatccctcaaagtccatgagggttggaatcaactttcaaactcccattaatgttgatattttgacctccttccatgaatcaccaatgttcttaatagcatgtagaatagtgaattctttccaaaaggttttcaatttactttgcccagatccatcagaggaatcactatctgtggcaactaactatagcattacaaaatgtattttttaaatacgaagacatgaaagtggagattactccttgagctgcagaatggatgttttgttagcaggcatgaaaacaacattaatcctgtacatctcccatcagaccccttgggtgaccaggttcattgttgttagcagcaatattttgaaaggaatctttttttctgagcaataggtctcaatagtgggcttaaaatacttagtaaaccatgctgtaaacagatgtgctgccatccaggctttgttgttccatttatagagcactggcagagtagatttagtgtaattcataagggacctaggatttttggaatgggtaatgagcactggcttcaaacttaaggtcaccagctgcattagcccctgaaaagagattcaaactgtccgtggaaactttgaagccaggcattgatttctcctctcaagctataaaagtgctacatgtcatcttcttccagtagaaggttgccgtgtctacagtgaaacgctattgtttagttgtagccaccttcatcagtgattttagctgcatctggaagatgcagcttctccatcagcacttgctgcttcaccttgcacttgtatgatatggagattgcttcttaccttaaacctcatgaatcaacttcctgttagcttcagacttttcttctccagcttcctcacctctcttgggcttcatagaattgaagagagctggggccttactctctattaggctttggcttaagggaatgttgcagctagtttgacctgtccaggtcactaacactttctccatgtctgcagtaaggctgctttgctttcttaccatttgtgtgttcactggagtagcacttttaatttccttcaagaacttttcctttgcattaacaacttggctgtttggcacaagaggcctagcttttggcctacctcagcatacctttctcaccaagcttaatcatttctagcttttaatttaaaatgagagacacatgactcttcctttcacttgagtacttagaggtgattgtagggttattcattggtctaattttaatattgttatttctaagggaatagggaggcctcaggaaagggagagagatggggaactgccggtttgtggagtggtcagagcatatatataacatttatcaattaagttcaccatcttctatgaatatggttcatggcgccccaaaacaattgaaatagtaacatcacagatcactgatcacaaatcaccataacagatctagtaataatgaaaaaatttaaaatattgtgcaaattaccaaaatgtgacacagacatgaggtaagcacatgtttagaaaagtggcaccaatacacttgcctgacacggggttgccacaaaccttcaaattttaaacaaacaaacaaaaaaatgcagtatccatgaggcacagtaaaactaggtatgccgatatcggtggttgtttagctcaggccctttcctcttcttattgcttctgtgacctttctgaaatactgatctgatcacgtcacccttcttcctaaaaactctaaataagctttttcaagcatcatcttgaaattctaaagtgtttttttctactttctcctactacttacttgagccaccgttactgatgggaacatagcagattctgttcgtctgttgaggtaaaaagaggttgaaaatcatctgtagtacaactacagtctttgcattatattcagatcttttaccacttagccttatcctgttttataacttacagatactgtctaccactggttgactgactgwytgtttattccatgaacttttaaaatcagcagtgtctgtgctcagtgaggttcttgccagttgatttggtacttgaactcttatataatcttcaaaattatgctcaaatatgtagggacccgtatggaccctcttagtcacaaaaagatctctttatgtcctccgtgatattttagtactttctacccactgctattatggcccttatgtgatcattgttatttatggactatccaactatattttaatgtgatctttttcatacgatcttggcatatatactttttagtatatataatatgaaaaatagctaaaggaattagtgatatttagccgtaaacagagaatatgctagaattcttggggaaaaaaatgttttcagagtatttagaggttatcagttaaaagaaggattgcatttggtatgtggagcttgaggaggcaaggcatggaagttaaaggaatacatattttaagtgatacatagtagtctcaaatggtagcctgcttttttttttttaactttttaacttgaggtataatttacattggtaaagtatacaactcttaagtatacaattcagtgaaatttcacatatgtatatctctatgtaaaaatcaccccgacaaagatagggacatttccaactgtccggaaagcccccttgtgtccctcctgtcattctcccacagatttaaccctggttctgagtcttatcaccagatcttattttatctggagacctgcagtatgtatccttttgtacctgccttctttactcatttatgtatttcattcatgttgttgaagatagcagtattttgttctttttgttcaatgttcttttcttttttaatcagtttataggattctgttatgtgaataggatctccctttctacacctcaccccaccctgtgtatttatccattccacataactttagtagatgctattagatagttttctgaagtggttgtgtgaatttcatactttcaccagcaatttggttgttttcttttttttttgagacagtcttgctctgttgctcaggcttggagctcagtagcgtgatcttggctcactgcaacctccgcctcccaggttcaagcgattctcatgcttcagcctctcaagtagcatgtgccaccgtgcctggctaatttttgtatttttagtagagacggggttttgccgtgttggccaggctggtcttgaactcctgacctcaagtgatctgcctacctcagcctcccaaggtgttgggattataggcatgagctgccacacccagccttggttgtttttccacattaccgtttaatgctttttatgtaagaaagaacttcttgaattttttacttgaaacactattcattgtagacattttgaaaataaaggaaaaattaaggaagaaaataaaagtgggtctcacaaccattatttttaaccttcaggatgcattcttttagtcttgtgtgaatttttttagtaaagttgatgttttggctgtgttcccacccaactctcatcttgaattgtagttcccataatccccatgtgttgtgggagggacccagtgggaggtaattgaatgaatcatgggggcagttacccccatgctgctgttctcatgatagtgagtgagttctcacaagatctgatggttttataagggacttttcctgttttgctcggcgcttctccttgccaccgccatgtgaaggaggaggtgtttgcttctccttccaccatgatggtaagtttcctgaggccaccccagctgtgtggaactgtgagtcaaacctctttcctttataaattactcagtctctggtatgtctttattagcagcataagaacggactaatataaaactttaaatcatattaggcattaaaaaatacattgtgtgttttctcctatattcttttatccttttccatttccatatttgcatcctttttaaaaaaaacttgctataccaccttgaaaacacctgatctcatctaatctaggaagctaagcagggttggatctggttagtacttgaatgggagactactaggaataccagttgcatttggtatgtggaacttcaggaggcaagacatagaagttaaaggaataggtattttaagtgatacatagtagtctcaaatggtagcctgttttttttttttaactttttaacttgaggtataatttacattggtaaagtatacaactcttaagtatacaattaagtgaaatttcacttatgtatatccctatctaaaaatcaccccagcaaagatttgtagttttgtagtgttgtaggcttaaaaaacaaaacaaacaaaaaaaaaaccttcttaatatattgtgggcatttccccatattcttttataaagaatcatttcttatttgcttgttgatatttttcggtttaaaagaataatcatatttgtattacatataattatcaagtagggttttatattcttatactgaggataaaattcaggatacagttttggagcctatgggatttaaaagaggttgagaaaaaaaggtgaacagaatttaatgagtatcagccgggtgtggtggctcacacctgtgatcccagcactttgagaagccaaggtgagtggatcacttgaggtcaggagtttgagaccagccgggccagcatgttgaaaccccatttctactaaaaatacaagaattagccaggcatggtggcacacacctgtagttccagctacctaggaggctgatgcaagaggatcggttgaacccgggaggcggaggttgcattgagccgagattgtgctgctgcactccagtgtgggcgacagagcaagactctgtctgaaaagagaaagaatttaatcagtatgatttctcaaggaaagtgaatgattatrcaagtcacagtaagtcactctcttatctcagcattctataaactactttctaatacaatacactttttatgtttcttcgtcattaaatagctgtgattctcaaacctctttcttttaaccactgccctgtgaaaaatagttttcttgagcaatatctgtatcaacgttgcctatgtattcttttatcatctgttatatgtaagatatgttctaggcactttggaaaactgccgtcagcttgcttataacttgttctagagggaagatacataataattttaaatatggtagggaatttttatgataaataccccctcacacttcttccctccacttgaaatataaagacaccaacgtccaaaaagattaaattacttgttcacagccacaaaatttgtggcagagccagaactagaacctaaaaccaaaagctgtgattccctctcaatgcttttacccttttttttttctgagatggagtcttgctctgttgcccaggctggagtgcagtggcatgatctcggctcattgcaacctctgcctcccggggtcaagcggttctcctgtctcagtctcccgagtagctgggactacaggtgtgtgccaccatgcgtggctagttttttgtatttttagtagagacagggtttcaccatgtttcccaggatggtcttgatctgctgatctcatgatccacctgcctcagcctcccgctttaaaactttttgggtacactgtatagtgcttttcttgatagaaactttgtcattttcttccttagggaaatgctgctaaaagcatttcttttgtttctatggtagttaaggaaaatttatttcatgtatacaagtaatacttagcccctagaatgcgtgatatcctgttgcaggtgagaaatgtgttgataaactaggaacatctgtggaaagcagtgtgttaagtgtagaaaaagcttagtttctggaacctgagcatctctgtgagattcccagccctatcatttcctgtctgtgtgacttattcaagctacttaatctctttgaatcttagcttcctcctacattcattaattcatttattgagcccaagaactcaaggtattgtggaagcagccgaattctgcatgtcaagaactgtgcatggtattgaggatgcagcagaattcctgctctcagtaaacgctcattctgggagtgggtaaacagatggtaaataagtaagcaaagtatatatagtatgttgtaataaacggtatggagaaaaataaagtagatactcaggatataaaatggtagggagggggttgtaattttagtatgctgtccaagaaaggcaataccaaaaaggtgagagttgagcaaagacttcatttatgaaatgtggatacagtcatatcttatttatgcattgcttgtgtataatgctgatccattatctctcatcagccagccccaaactgctctttcttaggttgaagtggcatttaagaagctcttttgttttctccaagagttacagtctgacattaatatccttttttgttgttgttgatgtgttttcagtcctagaaaatagttttttttcccaaatatgaacaaacaggaacttcctttggtggttaagtactgtcttggtgtttaagcctcttttaaggggatgggtagataaaggtaatggtctatgtgtagcaaaatgtattagaaccactttttaaatggcacatcaatttttattactttcaacagctacttcaaatatccttccggattcttaataaacttgggctttttatacatytaaatgggtagcacatgaattttccaacaaagatcttttggcaataaaccaaagatgacagtgtgtaaattaatatgtctactgatcagtttattagaaacacttttagagtacagagataatagtcatcagcccacatactcctagttgtgtattagttgtttatcatagataggaaataggagctaattagttcatttactgggttttacccacattagaaaaaaaraggccacttgccctctgggcaaatagtggctttgtgtgaattaggacggaaaaaacctttcaccaagttaaaggctccttgagtggatttcatcccaccttcccaatcccccaagtcaaatacatggcacagactttacattcttgggcaggggtcctggtaatacatggggattgcatctcaggagggacaatatgatgatgattatgaatagtgccaattccagaaagcctccccagggtaaatggagtgtgtttatgaatacaacctatctcataggacaggtataaagtacttatattcacatacagatatatccctaatctgaaaattatggagtttacaatctagtagaggtagaacataggtataaataagaaaattgtggctattgatattattgataatgtgatagagtactaggaattacttkaaaaggatgactaggagggccttcctgaagaagaaacatctgcattgagatttgtttaatgagaaggaatcagcatgcttagatctgggggcagagcattcctgacagtgagaactgcaagaacaaaggctctgaggtatctggtcaaggaatagtaaggtccctattgtggctggaacagagtgattttaggaacaattgtggggaacaatgagtaccttggagtgggtttttgtgagaataatgtatgtaaatcatagataaagcacctttcatactacctggcacaaagcaagcatttgataaaagttcccttcttatttactttagggctgtagttctcaaattttttttttattttaggacttctttatattcttaagaattactgaagattccaatgagcttttgtttctgtaggttatatgtattaatatttatagtcttagagtttaaaaccagggatttaaaatacaattaattcatttaaaaataacaatgatttacccctgttaccaaatgacattttttaattaaaataactaattcattttttcttggttgtatgtattaatatttacagtcttagagtttaaaactgaggatttaaaacactatttaaaaataatagcgatttacccatgttaccaaataacattttttaattaaaataactaattcattttttcttgaaagtttatcattggcaacaaatatactgttaattgcttttcttttttttttttttggagacggagtcttgctctgttgcccatgctggagggcaatggtgcaatcttggctcactgcaacgtctgcctcctgggttcaggcaattctcctgcctcagcctcccgagtagctgggactaggcgtgctccaccatgcctggctaatttttgtacttttaatagagaaggggtttcaccatgttggccaggatggtctcgaactcctgacctcaggtgatctgcccgcctcggcctcccaaagtgctgggattacaggcgtgagccaccgcgcctggcgttaattgcttttcttgaagtgacagactcattttgttcatttgcaagaaaagatctcccaaaaatcaaagttagactaactgtagtttgtcatttaagtagacataatgttgcatggaaaagtggctaagtcagcttgcatctcaatgtcacaagtgcttttcatcaagacaaccatcatacttggaagaggtgctttaacatacacttcccatcttgttccagagaatataaaaaagacctgtatacaagggccaagatttaatatgtaccgctttgtcaaagacatatatgagtgaaaattgctgccccctaaccaccactttttttggagacagggtctcactctgttgcccaggttggagtgcagtggtgtgatcatagttcattgcagccttgaactcaaactcaagcgatcctcctgcctcagcctctcaagtagatgggattacaagcatgagccactgtgcttagcaatgtttttttttttttttttttaaattatgagtacaaagtggttgaaacagtgactgttaatagaggtggggtttttttggccactgccattatttgtgctaaaacacatgcagttttacagctggtacttttataccatcacgtgtacatgtcaacaaagtaaaaaagggaaatgacatcttagttttttcttgaaaacagttttgccctaatcaactccctaaaggaatctactcccccttcccccagcagacaacatttttgggaaccactgctatagagactattgttagtacttaattataatgtcttcattttaataggtacttgttatccagattgggttgccataaagagtctaggcacatacactactgttgtatgtgtacctaagcaaggacccttaacaatttagtgtcattagcatgtttgatggagtatagtcaagatagcagcagatttatttacagagaatatttatattataaaagctacaaagtaggaattttattctattgatgtattatttggagtgttaattcgtattttttccaatcttgctttctgttttgtttttaggcttgcattgatgacaatgttgatatggtgaagtttctggtagaaaatggagcaaatattaatcaacctgataatgaaggctggataccactacatgcagcagcttcctgtggatatcttgatattgcagagtaagccagttctgtgttttcattttattctaatactgtttgacagacctgaatgtttattgaartgataaagataaatgagtgaactcttatattactttaattcatgaaaattattctttccaagaaagaaaataagtggttattgggaatccatatattctcagaatcagatcttctttttgtctccccaccctctttggcctttggtacttygtattaacattagtaattgtacacattctctgtctccatcttttttcttttgagtacagctagagcattttcaaatgattgagggttaatacttagcagtctaactcattcctttataatcataaatttggcaactgggttacattgctatagggagaatatgatacatagttctccagtgagcctgtttacttagtttttctgaagattgtcttttttaaaaaatacattttttagaaaattcaatgagaaatagtcattgtattctctactacctttaatgtgtgggtacacactaagaacatctgattttttaaagcatttaacagtggaagtatagatatcttgaaaaataattttttcattaaattatttttcttattactatctatccacacagtaaacagttttgttgtctctctgctcatatatgaaagcttatcaatgaataaatattgaatatgggaattctactctgtaaatatcttagtaagccttcatagttttttgtctacattttgctttttttccccatttgtgctggagatacaatatctcaatttcaaggcagaaactgtatggtgaaatgaaaagtgctccggcctgggaacgataaggtytgaattacccgaattttattactgactctgccactaactatacgacatctttccataatttgtttcctctttctgagccatgatttctttgtatataaactgaggaagtctttttcccgttgcaaaacagcagtggttgttcaaacctaacaattgtgattctcaagttctttacttcctttttgtacttttcccgctcaatctcgagttctttacttcctttttggacttttcctgctcaacagaagacttagatctcttcatagaaaaaaaaacccagataattgtgcatttatctttaactayacttaatgattaggctctggagttaattgatatggaatatgaatgcctcctcagtcactatcaaggagtataaccttggcaagttgtttaacttttctaggctttggttttctcttctataaagtagtatttcctaggtttgttgtgatgattaactgcagtaattcatcaaacgtaggacctggctcataggaaatagtacatattaacttttgaccattaccttttgtatctacactgggaaaattaaaactcaacctctttcttcagatgtttaattcttatgtttcctttttgtattcatgtttctgagtttgaaaagacaatattaattgtcttgaataatttctttgcatagacttgattgggtcacagacctattgtgtcagttggaatgcttttagctgcaagtgatagaatacccaatttaaaatgacctaaagaataatggtacttgttatacaggataaaatatcatttagaggaaggacatttaggcttattaagccactcagtgatgtcagcaaggacctggaatctttcagttttttcttctgaatttcccaaaaatggactttattcttagccttctcccctcttggttacaagatgattgccacaactctagaattgtgttttacatatccacatccaaaagcaaataaaaaaaaaatggattgcaagtagaaaatatcctccctgtattctgtgtacatcaaagaggaaaacctttcccagagagccctccagttgctgaagacatcccataatgggacttcttttggcctggtcttggtcatttgtccatgttgtagctaggaaaagtaaatatcttggcatattcagcttttacatgctagtatataagaagtatgaggaagggtaagcagtttgttgcagttgctaatgttatcagtagggtgactattttcagtttttggagggtgggatatggaatatatgctttacaggacttgtgcaaacaaaagtgaccttttttggccaaggttgactatagttgctaatctaattagtttgaatttatgactgtgctataaactatggagtttccttgaaccagattaaaattagaagaataagttttcctttttattctttctgccacaagattcttttttaaaataatgactgtttttataaaaggcagtttaactctagcrtatactggatgatttgttaaggtgatgatagcccaaaatccttccgaatgctcatttttatcagcataatctcttttagcaggttgggcatggtggctcatgcctgtaatcccagcagtttgggaggccttgcttgagctcaggagttcgagaccagcctgggcaacatgacaaaaccccatgtctgcaaaacatacaaaaaaattagccagttacaatgatgtgtcccagctactctggaggctaaggcaggagaatttctggaggctaaggcaggagaattgcttgagcctgggaggcagaggttgcagtgagctgagatagcaccattgcacttaagcctaggtgacaagagtgaaaccttgtttcaaaaaaagaaaaaaatacattaaaaacacctctttcagcagttaatttcactaatgattaagtgaaattaatgaaaccctagttttcttgggtatagaaaaataatagtctggtggcctaattgatagggtgaagatagtccacagatcagtgttttataggcatgaaagaaagcacttataataataataataataataataataataatagagacaatagttataacccagggggtaagaaactggggcatatggtcactgtggtaactgaagtattttggagttaaatttgttgcaaatcctagttctgccattcactagctttgtgtgcttgaccaatctacttagtctcagtaatttaagattatttataaaattggaaagatctagtttcttcctaagtcttttttctcatattgyattccacttcacatttttcactctgtcaatactggactacttttagttccccaacattccctactggtttacatcagtgtgcctttcttcgtaatagtttatttgcctgctgttgcattacttgagcagcttctaccagactctcaagatgcagtttgtataagggtcatttcttccaggaagagtttctgatgttcttggcaaattcatcatcatctctaacacatcagttgtttgtktatatgcttctttactaactgcatttatgcactgaatagtagtaattcatccctattgatatgtgcagttaagcctagattagtttactctgaggatttgaggatgattaggatacattgagttctaaatttttaacctytgttggaaatagtagaacaaagaatgtcagattacagtatcatttctaggcatttaacaattttacatttggtctgtagcgtaatagaagccaagtgaataggtagatgaatgatggctcttcatacactggctcaattatctcaccttttcaccaaaataattaccctcaacttttgcttattcttaacaaggtagaagtcctagggtaaactaaaaatagaggttgtttagtaatgtcctttctccagaatggaatggaggacaaataaatgaagtgagtttgtggagcctgattttatgctcagcatatgcattgttttaataaatactcactgccttgactttttcattcttaagaatgttactactttgattaacatgttttaaaaattatgcagtcaataaatatgtaagcacttactatatatatcaggtcaggtactaaaatgtatgcattaacatcattcttttcctttggggtgctgaatcagtattatgggcagaatagtgtcacccaaaattcttacttgaaaccctaaccttcagtacttcagaatgtgactctatttggagaagcggcctctaaagggatgattaagttaaaatgaggctgatggagttgtttctcatccagtctggctggttttcttataagaggaagacattgggacaaaaaagagacaccagggcccctctcatagacaggaaagaaaccatgtgaagaaacaagaaggcagccatctaccaaccaaggagagaggcctatgaagaaaccaaagctgctaacacattgatcttggacttctaggcaccagaactgtgagaaaataatatttctattgtttaagccacccagtgtgtggcattttattatggtagtcctagcaaactaatataagcagtataaactttccactatcacatcaaggcatactcttccttaaaaattacagtgttaatgtcattggctatggatcaaaaatgaaatggaacagtatgactttggacatactagaaaaggcaaatgattttagagcccaagaacccatgtatgcaatttattgttccaatcttgaattatcaattcattatacatctgtggcataaattataattgaattactgtgtgcaaagcattgaaaaccaagttctctgactgaagaaataattagatgaaaacataggaactatacaatggtaacattttaattgtcattcttttttatttwttagttggaatatttttgtaaaagaaactttctcatctctactatttggttaccctttgtattagtccattctcacgctgttgtaaaaaactgctcaagactgggtaatttataaaggaacaagatttaattgactcacagttccacagggctggggaggcctcaggaaacttacaatcatggtggaaggggaagcaaacacattcttcttcacatggcggcaggaagaagtgccaagcaaaggggggaaagccctttataaaatcatcagatctcatgagaactcactcactgtcacaagaacagaagcataggggtaaccacccccaggattcaattacctccctctgggttcctcctacaacacgtggcgattatggaaactacaattcaagatgagatttgggtaaggacacagccaaaccatattacctcagtacaatttttataggggagacagaatatattctttattatttctccttatgtactggctttttaaataatgaatttccttgctatctaccttcagtagggactaatttttttttttctagtttaagtaatattaggagctcatgcatttgaacatattttctattttattttatttgtattatacttttaagttctgggttacatgtgcagaacgtacagttttgttacataggaatacagatgccatgatggtgtgccacacccatcaacccatcacctacattgggtatttctcctaatgttatccttcccctgaccccccaccccccacagaccctggtgtgtgatgttcccatccctgtgtccatgtgttcttattgttcaattcccacttatgagtgagaacatgcggtgtttggttttctgatcttgtgatagtttgctgagaatggtagtttccagcttcatccatgtccctgaaaggacatgaactcatccttttttatggctgcacaatattccatggtgtatatgtgccacgtttgcttaacccagtctgtcattgatgggcattttggttggttgcaagtgtttttctattgtgaatagtgctgcaataaacatatgtgtacctgtgtctttattgcaggatgatttataatcctttgggtatctacccagtaatgagattgctgggttaaatgatatttctggttctagatccttgcggaatcgccacactgtcttccataatggttgaactaatttacactcccaccaacagtgtaaaagcattcctgtttttccacaacctctccagcatctgttgtttcctaactttttaatgatcgccattctaactggcgtgagatggtatctcattgtggttttgatttgcatttctctaatgaccagtgatgatgagcattttttcatatgtctgttggctgcataaatgtcttcttttgagaagtggctgttcatatcctttgcccattttttgatggggttgtttgcttttttcttgtaaatttaagttctttgtagattctgggtattagccctttgtcagatggatagattgcaaaaattttctccgattctgtaggttgtctgtttactctgatgatagtttcttttgctgtgcagaatatctttagttgaattagatcccatttgtcaattttggcttttgttgccattgcttttggtgttttagtcatgaagtctttgcccatgcctatgtcctgaatggtattgcccaggttttcttctagaattttaatggtttttaggtcttacgtttaagtctttgatccatcttgagttgatttttgtataagttgtaaagaagtggtctagtttcagttttctgcatatggctagccagttttcccaacaccatttattaaatagggaatctttttccccattgcttgtgtgtgtcaggtttgtcaaagatcagatgttgatagatgtgtggtgttatttctgaggcctctgttctgttccattggtctgtatatctgttttggtaccagtaccatgctgttttggttactgtagccttctagtaaagtttggaagtcaggtagtgtgatgcttccagctttgttcttcttgcccaggattgtcttggctatgccggctcttttttggttccatatgaagtttaaagtagttttttccaattctgtgaagaaactcagtggtagcttgatgggggtagcattgaatctataagttactttgggtagtaaggccattttcacgatattgattctttctgtccatgagcatggaatgtttttccatttgtttgtgtcctctcttatttccttgagcagtggtttgtagttctccttgaagagrtccttcacatcgcttataagttgtattcctaggtrttttattctcttagtagcaattgtgaatgggagttcactcatgatctggctctctgtttgtctgttttggtgtatagggatgcttgtgatttttgtacattgattttgtatcctgagaatttgctgaagttgcttatcagtttaaggagatttggggctgagacgatggggttttgtaaatatacaatcttatcatctgtaaacagagacaatttgacttcctctcttcctatttgaatacgttttattgctttctcttgcctgattgccctggccagaacttccaatactatgttgaaaaggagtgacgagagaggggatccttgtcttgtggcggttttcaaatggaatgcttccagtttttgcccattcaatacgatattggctgtgggtttgtcataaatagcttttattattttgagatacgttccatcgatacctagtttattgagagtttttagcatgaaaggctgttgaattttatcgaaggccttttctgcatctgttgagataatcatgtggtttttgttgttggttctgtttatgtgatggattacgtttattaatttgcgtatgttgaaccagccttgcatcccagggctgaagccgacttgatcgtggtggataagctttttgacgtgctgctgaattcggtttgccaggattttattgaggattttcacatcgatgttcatcaggaatattggcctaaaattctctttttttgttgtgtctctgccaggctttggtatcaagatgattctggcctcataaaatgagttagggaggattgcctctttttctgttgatcagaatagtttcagaaggaatggtaccagctcttctttgtacctctggtagaattcggctgtgaatccatctggtcctggactttttttggttggtaggctattattgcctcaatttcagaacctgttattgtcctgttcagagatttaacttcttcctagtttaatcttggaagggtgtatgtgtcgaggaatttatccatttcttctagattttctagtttatttgcatagaagtgtttatagtattctctgatggtagtttgtatttctatgggattggtggtgatgaccacttcatcattttttattgtgtctattggattcttctctctttattagtcttgctagctgtctatctattttgttgatcttttcaaaaagccattgatttttttgaagggttttttttctgtctctgtcttcttcagttctgctctgatcttagttattgcttgtcttctgctagcttttgaatttgtttgctcttgtttctctagttcttttaattgtgatattagggtgtcagttttagatcactcctgctttctcttgtgggcatttagtgctataaatttccctgtatacactgctttaaatgtgtcctagagattctggtacgttgtgtctttgttttcattggtttcaaagaacatctttatctctgccttcatttcgttatttaccyagtagttactcaggagcaggttgttcagtttccatgtagttgtgtggttttgagtgagtttcttaatcctgagttctaatttgattgcactgtggtctgagagacagtttgttgtgatttctgttcttttacatttgctgagaagtgttttacttccaattatgtggtcagttttagaataagggccatgtggtgctgagaagaatgtatattctgatgatttggggtggagagttctgtagatgtctattcggtcttcttggtccagagctgagttcaagtcctggatatccttgttaattttctgtctcgttgatccatttaatattgacagtggggtattaaagtctcccactattattgtgtggaagtctaagtctcttcgtaggtctctaagaacttgctttatgtatctgggtgctcctgtattgggtgcatacatatttaagatagttagctcttcttgttgaattgatccctttaccattatgtaatggccttctttgtctcttttgatctttgttggtttaaagtctgttttatcagagaccaggattgcaacccctgctctttttttttttttttttttttttttttgctttcaatttgcttggtagatcttcctccatccctctattttgagcctatatgtgtctttgcacatgagatgggtctcctgaatacagcacactgattggtcttgagtctttatccaatttgccartctgtgtcctttaagtggggcatttagcccatttacatttaaggttaatattgttaggtgtgaattcgatcctgtcattatgatgccagctggttattttgcccattaattgatgcagtttcttcatagtgtcgatggtatttacaatttggcatgtttttgcagtggctggtaccagttgtacctttccatgtttagtgcttccttcaggagctcttgtaaggcagacatggtggtgacaaaatctctcagcatttgcttgtctgtaaaggattttatttctccttcacttatgaagcttagtttggctggatatgaaattctgggttgaaaattcttttctttaagaatgttgaatatcggcccccactctcttctggcttctagggtttctgccaagagatctgctgttagtctgatggttaccctttgtgggtaacccagcctttctctctggctgcccttaacattttttccttcatttcaactttggtgaacctgacaattgtgtgtcttggggttgctcttctcgaggagtatctttgtggtgttctctgtatttcctgaatttgaatgttggcctgccttgctaggttggggaagttctcctggataatatcctgcagagtgttttccaacttggttccattctccccgtcactttcaggtataccaatcaaacattgatttcgttttttcacatagtcccatatttcttggaggctttattcatttctttttactgttttttctctaaacttctctttttcctttatttcattaatttgatcttccatcactgatatcatttcttctgcctgatcgaattggctattgaagcttgtgtatgcttcataaagttctcgtactgtggttttcagctccatcaggtcatttagctcttctctacactggttattctagctagtcatttgtctaaccttttttcaaggtttttagctttcttgctatgggttagaacatgctcttttagctcggagaagtttgttattaccgaccttctgaagctgacttctgtcactttgtcgaactcattctctgcccagttttgttcccttgctggtgaggagttgtgttcctttggaggagtagaggtgctctggtttttagaattttcagcctttctgctctggtttttccccatctttgtggttttatctacctttggtctttaacgttggtgacctacagatggggttttggtgtggatgtcctttttgttgatattgatactattcctttttgtttgttagttttccttctaacaggcccctcagatgcaggtctgttggagtttgctggaggtccactccagaccctgtttgcctgggcatcaccaatggaggctgcagaacagcaaatattgctgcctgatccttcctctagaagctttgtcctagaagggcacccccctgtatgaggtgtctgttttcttctgctgggaggtgtctcccagccaggctgcacaggggtcrgggaccctgttgagtaggcagtctgtccgtttacagagattgaatgctgtgctgggagagccactgctctcttcagagctgttaggcacagacgtttaagtctggagaagctgtctgctgtcttttgttccaatatgccctgcccccagagtggattcaagagagtcagtaggccttgctgagctctgcccagttctagcttccctgccactttgtttacactgtgagcctagaaccacctactcaagcccagcaatggcagatgccctttccccccgccaagctcccacattgcaggttgatctcagactgctgtgctagcagtgagcaagggcgtgagacccrccgagccaagcacgggaggggatcttttggtctgctggttgcaaagaccatgggagaagtgcagtatttgggcaggagtatactgctyctccaggtacggtcactcacggcttcccttggctaggaaagggaaatcccatgaccccttgcgcttcccaggtgaggcaacaccccgccctgcttcagctcgccctctgcgggctgcacccactgtccaaccagtcccaatgagatgaagcaggtacctcagttggaaatgcagaaatcacccgtcttctgcatcratcttgctgggagctgcagaccagaactgttcctatttggacatcttggaagtaactcccgtttgaacatattgatgtgtttcagtccactgcagctattatccttatcagttggcaaattgaaccatctttggtcattgagaggctcttgaagttggcttcctaagaccttgggacatgaccaaataaagtagtctttaaaagtttccttactctttggtattgcaagattttccagactaatcttttatattcctgcccaaggcctggagtcctcatttctccaagaaaccctgttccttaggatggctactgagagtgctcattactattgggttggtcattgtttccaggtcgaaatcagcaccaaagtgtttttttctttaacttcttctaacctgtgtcactgtctttcctctcatacattgctgggaagcacaggattaaagtaacacgtaattactaatttgcttcatcatgtattacacatacgttacactgagtataataatgccgccaccaccaccaccaccagtatgattactgaaatcattcaaagttttgtttttgagggttttgttttgttggcatttctttttgtccttagtatattcaacttggaatataccatcaggttactatgtgttgaattcacttgagtttactttttaaaattttaattttgttttataatttacgtaaaatactagttccagtggcaatacctcctctaccaccatatttcatcccataccctataaaaaaagtttaaaaaactatcttctagtttgctaataaaagtattatttttattgaagtattaatccccccatcttttgtaataaatgatagaatatcacacacgtatttctccactttgcttttttcacttaacagtctattctggagatcactatctagtggagtgtagagatactcgtcattgttcttttcagttgtagtactccactgtgtagtattcattatagtttatcatttattcagtgtgtccctcttaattgaccaatgaatgttggttaattgaatgactataattttagtcttagagttgtcccttatttttgtattattgcaagttataggaatttttatgtttataaaatattttgtatatgaataagaaaatggaatgattaacattttggtttctggtgtaattatttggatataatcttttctgttatttaattttgccaccacatttgttttttaggcttccactacaaatacttaaggcatgcttttatcttgaatagctttagtgttcagttttccaatctaagagggaaattagccctgtattagcctagcattatatggcttcacagttcatggagtagactattaattggtgcacttaacgcatttttcttcttgtttagagtgattttatagacattgctgttggagatttcatatcctattataaaatgctcatagaattttgttggtttgtttgagacagcgtcttgctctgtcgcccaggctggagtgcagtgggatgatcataacacaccgcagcctggacttcctgggcttaagcaatcctcctgcctcagcagcggtagctaggactgtagacttgcaccactgcttctagctaatttttttatttttattttttatttttgtagagacagagtctcgctgtgttttccggggtggtctcaaactcctgacctcaagtgatccttctgcttcggcctccttaagtgttgggattataggaatcaaccatgaggcctggcccagtgacattttcagcatagaaaaaaattcattagctttgtcacttgatcattaaagaattagctatttaaggatataactttgaaatatgtgtggcgacttacttatggcttggcttttcttctgcattatagcctttattttataaacatccaacagaatcctaagatttctgttggctcagctttaaaatatatccagtatctatttctcattacctttttccatctctctttgatcctgagcactgttktttttttttttttttctttcttttttttttttaaagacagagtctcaccctgttgcccaggctggagtgcagtggcacgatctcggctcactgcaggctccacctgccaggttcatgccattctcctgcttctgcctcccgagtagctgggactacaggcacgtgccaccatgcccagctgattttttttgtatttttagtagaggtgggatttcaccatgttagccaggatggtctcaatctcctgaccttgtgatctgcccgccttggcctcccactgttgtttttcactggaattattgcagttgcctccttgtaggcataactgtcatctttcccacacctattttttttcacagtagccgcagtgatcgttttaaattattttgcgttgtagccataatgatcattttaaattattttgtgttgggtaacatgacagttttattgaaagcctatcagtggatttatgctgcattcagggtagaagccagagttctggtggcctacagaggtatgctttggtgccttgtcacctctctgactccatcctccactcttttctaggctttgtgctaaacctacactggtcccttggttgagcctttgaacagactaggcatcttgcctcatggcctttccatctatttgctggttcttctgtctggaattcaataatgctgttatttttggtgctttgaaaacagaaatttcaggaatttcagaaattcttgaacctcacctccccccagcaagaaatattatagtataggagttaagagctcaggctcaggagttaggcaactctgtttaaatcttaattctgttaagtaattctcgtcaactttgaatgaattaccagcttccctaagcctccatttcttyatccataaaatggaawtattaatacttgtacctaatttataagattgtgaagattaaatgagatcatgtgtataagacacttggcacaatatgtggcaagtatttctattcagtaaatattaactgaattagttgttattgtttataatataatttttggttaccacttttcagtgaaaaataggtaagctcttgggtttcccagattatttaacaaaggaaactatcattttgtctcttggttttagggcaaacttatctagaagagaggagcagaggagaatgaagtagtaatttgtcatattttcattcatatgttgttatgtgggccataggaaagttggcagatccatgaatttcaattttattatatatttctwgtcaagaatactttattagtacaaagcatatcatgtattttgattagaagtcttagagaaattaagatcttaggaaaatattaaaattttatttggggtatttatatccttgtatactaataatgagatacatttgctgaaagctgtagatgttcccatatacattcttacttggtttttcatggaaatttatgggaatgttcactgttattcctatttcacaatcagaactgaactctcattcttgagacgtaaattctgatgatttttttccattatatcataactgatagtagcattgggcactatgagatttgaaaatgactgcaacatagattctcatcttcaggcttatagatagatacatgtgaagtcaattaactctaayacttggtagactaaatggaccagtatataaggaactctgaggaagaagtgcttaattctgtctaggccaattaaagaaagattctggaggaggtaacattcgtttattttattttattatttttttattattattttttattattattatactttaagttctagggtacatgtgcacaatgtgcaggttagttacatatgtatacatgcattaactcttcattaacttgtcatttagcattaggtatatctcctaatgctatccctcccccttccccccaccccacaacagtccccagagtgtgatgttccccttcctgtgtccatatgttctcattgttcaattcccatctatgagtgagaacatgtggtgtttggttttttgtccttgcgatagtttactgagaatgatgatttccaatttcatccatgtccctacaaaggacatgaactcatcattttttatggctgcatagtattccatggtgtatatgtgccacattttcttaatccagtctatcattgttggacatttgggttggttccaagcctttgctattgtgaataatgccgcaataaacatamrtgtgcatgtgtctttatagcagcatgatttatagtcctttgggtatatacccagtaatgggatggctggaaaaggatgagcataatttttgcctctgcgagttgggagctgcctgaggaaagtcatgtcattcacaaatgagaaataatatatgataaagttcttttaactggctaccactgtatttatacttaccatttctttgttaaaacttattgactgatatccatatgcctaaacattgctgctaataggccacttctgctaagctcacggttctgtttccaacacttgaattgcagacctaccaaaagttatttgtatgtgttttctacctgttaatgcctgtcatatgcaaaaccagaatattgttgctaagataacaaagttgaatactttggaaagactcaatggcagtgccytaaaaggatggttgttttttaattagatgggggtgagacaactcaaagactgaaagaaaaaaagaactagaaggattgtgtactcaaattgctttgctgttgacttcaagtttttggttcactctaaagacagttcgaagtcttagataacacattacggatatcatttatgcaagaaagacagcatggatttatagtcatgaagacatcatccaaagaaatagactagtcttcactaaaggatggataaataaatatgcatttatgtcttgtatgattaaataaatgcattatttatgcatatgtgttatattttatgattacctatttcagtcagcctwtttggttaaccaagcaaatactggttctgattgcattaaacagaagggccttattggagccataatttcttggagagaaggcawtagtggaatatggagagggtagcagataagactgggcaagtcagctggggttacaacgtaaaggatttgtatgccaggctgagtttgtcctttgatggtgatgcagttttagggaagtgatgacctttcagactgtttttttggaagattcttgacaaattagagaggttgggcaagaaaactagggcagtggcagtgagattggaagtagagcagatctgaaagaaatttggagaatagaattgataagtcttggtgtgatttactggatctaagtactaaggtaggaagaaaaatcaaaggtggtgctaatgatgataaatagctaacgtttaccaagtgcttactgtgttttttttttyactgttctaagtcctttagataacataatttcagtcatataaaaatgtactacttcccacaggtccttatgcataaacctccaaaactgcaaaaaatgaaaacataaattttaagtttgttgtaggcacatttggcaacagataatgacctgcactgatgggaggctatttgtagtctttatctcacttaactgtaaatgtgtggtttgttttttttttgcagaaataattttgtgtttggttatagagtgctatcccagacctggtgggagtgttacataatccataatattatctttctaaaatatgaaaaacttttacttttcttctgctggtggaaatgtaaattagatcagccattgtggaaagcaatttggtgatttctcaaaaccttaaaacagttaccatttgacccagcaatcccattattggttatatacccacaggaaaataaatttgtaccataaagatacatgcacatatatgttcatcgcagcactattcacagtaacaaagacatgaaattttctttgtttgtttttctcagacctcttagggtgaaaaaaatatgagcaattttgaaatttgggtgtaggcgagagataatagacctgtattaataattataatttgggggccaggcgcgktggctcacacatgtaatcccagcactttgggaggctgaggcgggcggatcacgaggtcaggagatcaaggccatcctggctaacacggtgaaaccccgtctttactaaaaatacaaaaaattagccgggcgtggtggcaggcgcctgtagtcccagctactcgggaggctgaagcaggagaatggcatgaacccgggaggcggagcttacagtgagcggagatagcgccattgcactccagcctgggcgacagagcaagggtccatctcaaaataataataataataataataattgttacttggttgggcacaatggccaacacctataatcccaacaccttgagaggcctaggtgggaggattgcttgaggccaagagttatagaccagcttcagcaacatagctaccccatctctaccaacaacaacaamaaaatcagctgggcctggtggtgcatgccagtaggcctagttacttgggaggctgaggtgggaggatcgtttgagcccaggagtttgaggctgcagtaaactatgattgcacctgttcacttcagcctgagccacagaatgagactccatctctaaaatttaaaaaagtcaaaaaaaaataaaaattatagatgaagagactgagtcatagagagaaatcacacaaaatatgtgtcagagttagggtttgaacctacacagtcttaacttttcaaatgtgcattttagatactacactattctgcctctctttctagcctttgtcattgggaaaatgataccattaaacttattaagggatctaaagagcggaattaggggaagctgaagaagagggagacagtgtagtagaatattaatttagattggtctaatttgagctatcaatggaaaaagtacagtaggaagccagaaatattttggatatatttataatgcacatactggatttcatcagatctaaggtgccattgttgtaacatcataaataccgattttaaaaattaaataaaattatggtgcagtatttgtttttatcccataaatttcccctgcccccccgccacacacacacagtatcattctctgtgctgcttagagtatataacattgcttgcttgggattttcttctgcgtcactgataggcattctgcaagctttgattttggcactttcttgatcttaccataaaatatcaacataaagttttcagacaacatccagaagaaattttatgtaatagttaaggtcaacagatacgattccaacaacacacataactcaactgaagtgaaaacaatatgaatagctgtgactggtgtcacatgtggatgataatgacaacccagtcatgtctgccacctggccaacatcaattatacaaagtcattgattttaagattcattgattgtaaaagatttcaatgacattaaaatgtgtaggaaatgtgcatcttagaattgttaaacaataagtagtacttttgcctctgagaattggaagttgcagtaataaagtaagatgctaaggcatgtaaatgtttttaataaatacatggttttcaagagttaatacatgattgaagaggtttagaatcaattctctagggaaaaattgagagaaagattctgtcttgagcatttcctatgtttaagagttactttatgaagaaaatgtaaatacttcccctgattgtgaatttatcttttataaatgacaatctaggtgacccatttcacaaatagattaatttctctcataagtgttagcttggtctttgttactggtataattaattgtactatatgctgagtacaactaaaaactctgaatattatacgtaaaacacaagaagactctgaaaggtggagagaataaggcagaggagctagggatctcaggacccaaataatgacactgcagtagttccctgccttttcttttagcctcatatattccataattagagctaaagaagctgataacccagaagtgcaatggccacagacaaagaaagcgccagcaaaagcccagtcttttaaatactagtagagggacaccatagcaagacagaaaactttttgagaataaccattctacttcaaccaaacaccacagaaaaaaacattggtcacactcatagctgcaaaggccaagtagggatcctagatttccatcctcaccaagctgttatgaggcaccctaacacctcctccactggaattgtgtcagattaggccaggtacagagttgggactttaattcccatagaatggttaactagcctttccccaacttgtagtgttactggagaccatgtgggaagctaaaacttctacgtttatttgggagtaaagaggagcttctgtccttccctgctaagtggcatcagaggagtcctattggagaatgaatgctttcaccacttctaagcagtaaaaaagcctttctctacctatgcaccccaacccccagcacccaggggtattagtagaggctacatgggagcaktagcttctcagccagagacatgtcagtggaggtggagtggagagtcaggattcccacccagcccaggggaatcaagaagctgccccatctgtagtgtaaatggaggacaagtggggaacctgaacatctacccccaacttgccgaaatgaaatggcacctcactatcttcatctgctggagcaaaatcaaacaaagccaactaacacagaaaatttaagtaagatctagagtcttataatacccaaagtgtgcagattttaattaaaaattgtctggctgagtgtggtgactcaagactgtaatcctagcactttgggaagccaaggtgggtggatcacctgagtctaggagtttgagaccagcctgcgcaacatggcgaaacctcatctctaccaaaaaaagaaaaaaaaaattagccaggcgtgatggcacatgcctataatgccagctactcgggaggcttaggtgggaggatcacttgagctggggaggtcatggctgtagtgaactgtgatcatgccactgcactccaacctgggcaacagagtgagaccctgtctcaaaaaaaaaaaaaaagaaagaaaaagaaaaaattgtcatactaggaacctagaagatctcaaattgagtgaaaaaagacaattaatagagatgaacaccaggataacagatattaaaattatctgacaaagattataaagccagctatcttaaaatgcttcaacaagcaattatgaatgagcatgcctgaaacaaatgaaaaaatagaaagtcttarmaaagaaataaatagaagaaccaaatagaaattttagagctgaaaaatgcagtaactaaattaaaaacttcaatggatgataggctcagtagcagaatggaggaaatagaagaatgactcagtaaactgatagaacaatacaaattgccaaatctgaacagcagagagaaaataggctaaaaatgaacagagcctcagggactgtagcaaaagagcaaacatctatgccatcagatctctctgaagaagtggagaaagagggcatggctggaaaagtattaaaagaaatgatcactgaaaacttttcccaaatttggcaaaagacataaacctacagatttaagaaacctagcaaactcctaacagggtaaaccaaagcagtccacaccaagacatggcatatgcagacttttgaaaattgaagattaaaaaatcttgaaagaaattagaaactataccagaggggggataaatagtttgaatgacagcagatttctcatcagaaatcatggagactacatgtcacatttgttaagtactgatagaaaagaactgttatttttaagaaaactttcaaaggtctgaggtcagaacttttgtttggattcataatgttacacagtatctttcattgggatacagaactttcaaaagaaaatgggaaagtgcatttctactaatgagaaataatcataagattatttactattttgcattttgttgctcagagacttgctaatgaaaatagcatttatttctgaatagtgtaatgttctgcttaatctttgaatagttcagatagtttaattttcataatttctcctaggatggctttgagtaattttttcagattttcaagaagcatataactattacaatgctattttgctgactttctgatttttaaaactttgtatattggttaaaataactttttaatactactttttctacaataatgtattagtccaatcttgcactgctatgaagaactacctgagacagggtaatttatgaagaaaagaggtataattgactcacagttccataggctgtacaggaagcatggcaggggaagcctcaggaaacttagaattatggcagaaggcaaaggggaagtgtgcacatctttgtatggccagcaagaagagagaaagagagcaaagagggaggtgctscacactttcaaacagccatatctcgtgagaactctgtcagcactaagacagcactaagaggatggtgctaaaccattagaaaccaccctcatgatccagtcacctcccaccaggccccagctgcaacactaagaaatgcaattcagtatcagatttgggtggggacatagagccaaaccatatcaactgaataagaaaatatacattaaatttggacactaaatatatttagctcttgctgataattgctttctttgtctctcttcactaagttctcattagcttctggtttaaagacaaagtttttcttaaattttttcttaaaagatgaaaatttttaaatagctatttccttttcttaaatatttgcttctgtggtttggtttttgacaaaactcagaagatagtggagactatcaaaatttgtcttccaaagtcagttaacccagaatctcacctgtttatctaatataccatattcacattgcaaccaatagctttgttaactttataccttttgttagattttccagttagcacataaatagttttgtaaaaatccttttggatcatgtcttgatttggaagcttactcatttatctatctaaaattatcaaatcagagtttctagagtattataaatctcaattaaatctgtcagattaccatttttcatttctacaatttgttaagaatttaatggttgggcccggtggctcacacctgtaatcccaaggtgggaggattgcataatgccaggagtttgggaccagcctgggccacaaagggagaccccatccctaaatttttttttttttaaatttagctgggtgttgtagtatgttcttgtattcctagcaactagggaggccgaggcagttaggatggcttgagcctaagagttcaaggttacaatgaactatgattgcactgctgcattctagcctgggcaacagaatgagactgtctcttcaaaaataaagataaaaaagaatttcatcctgtactaggtggcatctcttatgttgactacctttgatttgcttaaggaaattactaagtattgttaagaaaatataggcctgattttctttaccctgaagcactcaatacggttgttcatttgaaaagtagcccagtcatctaactttcagtttggaacacctgtgtgaaaatctgtttttttgtttgtttgtttgtttgttttctttccaaggaatcttagaataactatggcatatttttcctaattaatagccacasaagtagcttctaataccccagcttttgttctgaaggaaatctagatgtctgttttcaatatctccagggtctttcaaagtgaaattttcatattccagatagcctgtagtttgtttaacattatcttaaacattgctttctttcttttttttttcccccctttgaaatggagtctagccctgtcacccagactggaatgcagtggcacaatctcggctcactacaacctctgccttctgggttcaagtgattctcctgtcttagcctccaagtagctgggattacaggtgtgcaccaccacacccagctaatttttttgtatttttttagtagagttggggttttgctatgctggccaggctggtctcgaacttctgacctcagatgatctgcccaccttggcctaccaaagtgaaacattgcttcctraatgtgataattttgcatatgacaacagatagtactttaattttatttttaactcatttaaaccacattgcccagtaaagttattttataaattagattttagttaagttttatatatatataacttataactaaataatatataactacaatgtattatactcaactatatctttgaatgtcacacaggtgtcaacaggcagaggtgggaactgaacccgaagtctgcagagcataaaagtttctgcttttttcacccctccaacctttgaattgcttttggagactatttatggtagataagaattaatccaccataggattaatcagtccgtgagattttgtttattattatttattattattttttcaaatgtgcctttgtaacatttacatttgcaagtaatagttctagagtgcaggagaagtttgtgaattgtgtgtttgcatgcataartacatacatacatatgtacatacacacrtacgtaatcttttggctcaaggattgctttgggcgctgcttcctgccagcagttttggtactttactctgttagtttctcttaacatccttcctgtttatataaattctgtattgtccgtatttggctttgacctggtatttccttgaaactctgcttcctgtacttcaagctgcagctagtctgagatattccttttattctcaatctttgtatcctttgaatgatttgtgatacccaagcagaatagatgtatttttatgtaaatattcctaattgtttggaattttgcctaggagaataattacatattctctcagagcatagcacagcaagactccactatatcttacctttctgctttagactcatttatttatttgtagtatatgaggaaatattctttttagttttatatacattttcaaaactatgaaaacaggaaaaattacctcaagtctaacttctgtttgtagaatttccataaagatgataaaacttttacagcatatttttaaatttaaaacatgaaactacaaaatgatacagtagccatttttgtgatcagatacacatgtccagaacaaacttattacagaaaacttggttaacacacaaaacaaccaatacaaatctctcttcctctatctcttagaggtacccactgttagagggagggtgtgtgtgtgtgtaaaagatatagagattgatcagttatttcatttattctaaggaaaatgaactgggcctccatctggctgtatatacttcctatcacaggactttattttgttccttctcacctacagcacattgcccttctgttctcttttgttagcacctacataatcatcagagaatccttttctgacttcactaaatccatttttcctattaatcctagacactaccttattctgttacaggacctaccacagctttacatttatttgtgtatttaatctgactgtcttactagactataaactttttgaagggcaattctgtgtttctttttgtttacctttatattcctggtatgtracatagtgccagatgcatactagacactccataaatattggttgaattaatgaatacgtttgaaataccagcaaggaatgtacataagcagttcataaawggagaaatacaaatgccagtaaatatatctaaatattttcagtctcatgtgtaatcaggaaatacaaattaaagcaatgacaacatgttttatcttcatgatgttgggaaaattttttaaaaattgtkaatttcaactgtctatttaagtgcacatctattaagagaataatattaaatgaaggtatgaaccagacatactatggaatatttttcaggtgttagaagggaagagttacattatacttcatttagaataatctcattaatttgtgctttacaaaaagaaccccaaaagtgatggtgtatatatgtttacacacatataaatttatggcagaggtactggaaagatttttgccctactgttgatagtgtttatctctgggggagggaacataatagtaggagaggaataaaggagttcctttttccctctgtggacrtgtactttttttaaaaaactattttataattagaatatttttatatagtcgaagtatgaaggagctaaattggttaggaacataaaggaaaagacccattctttatatatggaaaaataaaaccagggatacccaaatcaaatggtttaatttagaactacaagtagttctatattgttggtgcctaaagtgtgatgccggaagaaggaggaggctgaaaaagaagacaaggccagatcagtgagggctgtacattatcttttctcctagcatggtagagccatcgaaaaattttttaagttagaaattgacttgggtaggccaggcgtggtggctcactcctgtaatcccagcactttgggaggccgaggcaggcggatcacgaggtcaggagattgagaccacggtgaaacctcgtctctactaagaatacaaaaaaaaaaaaaaaaaatgagccacgcgcagtggcgggtgcctgtagtcccagctactggggaggctgaggcaggagaatggcatgaacctgggaggtggagcttgcagtgagcagagattacgccgctgcactccagcctgggtgacaaagcgagactctgtctcaaaaaaaacaaagagagaaaaaagaaattgacttgggtaatagatggttagttacatcgttcagtagatgactctgggagatgtgctgttgacatgattaaatagataaataaccttttgtatctgaatacctttggcaggtttgatgaagcctatagatactttcttagaattgtgttttggatgcttaaaataaaatacagagtacacagaagccaattatattggaatgcacttatcaaaatatttaaaaaatatatttgtagtataattatctgtctgcttctttagtaaaatattaaataaaaagacctagtggtgggtttaatagctaattttaaaataatgataagcaataatttaatgtatctgtgttaattgaattttttatgaaccttctgaattttacccatgaaccccagcttaagaactcttgtttgcgggatgagattgggagcgcagagaccagtaaggaaaccagtccatatggagataatgagaagtctcagtggaggtggatcctatgagactttctaattattattaaaaattaacatttttgtattggtaaagcaacgtgtgtacattatagaaaaattaggaaatataaatttaaaaaagaaacatgctctagatggttttgttttttgtttttttggcttgatctcagctcactgcaagctccacctcccgggttcttgccattctcctgcctcagcctcctgagtagctgggactacaggcgcccaccaccacgcccggctaattttttgtatttttagtagagacagggtttcaccgtgttaggatggtcttgatctgacctcgtgatccgcctgccttggcctcccaaagtgctgggattacaggcgtgagccactgcgcctggcctgatagttttttaaaatttaaataatgtatatactgccctttattgctgctttatataggaactttcctcattggttatgcatttagttttatttcaatgataatatcttttgcttaactatttttcctttggttttacaggtttttgattggtcaaggagcacatgtaggggctgtcaacagtgaaggagatacacctttagatattgcggaggaggaggcaatggaagagctacttcaaaatgaagttaatcggcaaggtaaaataaaaagcaacctaaatggaaaaatgttttagaaagaatgtgatacttttccagcaaaaatatttgttgacattgaagggcaatcataatttcatgaaaaaaatgaattcagcttgcaaaacaatagtacagtatgtttctgttttctaaaatattctccactctatcttttaagtatttttaaagttaaaagaaatgttagaagcagcaggatcaggcataaaattatgtggaagtaaaagttttggagcaaaataaagtaggcaaaggggatagaaagtgcacagggtaagtggcacattgcaaagttaaatagtgtggtcaagaaggctcactgataaggggtcatttaagctgagatgtgaatacaatgagggaatgagtcatgatgatctggggaaagagcattccagacaaggggagcaatgaatacaagaatgggaggttgtcttgtatatgcagagaagcagctagaggcagagcagaggaagaggcaggaaggagatgaggtcacagaagtagcaggaggtcatatcaccttaaggccttgtgagccattgggaagactttggcttttaacctgagtgaaataggaagccaatggagggattgaggcagaggattgacatgatttgttatacttttagaaaggatctctctggctcttgtgttgaaaatagattgtaggaagacaaggacagaagtaggagaagggttaggaaataactgacataatccagacaaaataaagtgatttatttttgactggtagtagatgaagtgatgagaagagattggattatggatatattttgaaggtttggccaagaggattattgagtcattagctagaaggtgtgaaaaaaagaagattctaagatttttggtttgaacaaatggatggatgaagttcctatctgagatgtgaagattgtaagaagagtaggttttatagggaaatattagggcttcattttcaggcatgttaaatttgttttgcgtgttaratatccaaactgttgaatatgcgagtctgcagttacaaaatggatatgtaaatttgggaggtgttcatttatagataacagtgattgctaacgggcacagagtttcattactcaagagtgatgagtattctaaagttgattgtggtgatggttacaccactcctcacatttactaaaaaaaaaccattgaattctacactttaaatgctatgtaaatgctgtgaattagatcttaataaagctgtgtgtgtgtatatatatgtatgtatatataaaatatgatccagcttggcagcagtggctcatgcctgtaatcccagcactttgggaggccaaggcgggcagatcacgaggtcaggagcttgagaccagcctgaccaacatggtgaaaccctgtctctactaaaaatacaaaaattagctgggcgtggtggtgggcgcctgtaatcccagctactcagaaggctgagggcaggagaattgcttgaacccgggaggcggaggtcgcagtgagctgagattgcaccactgcactccagccttgagaacagagtgagactccgtctaaaaaaaaaaaaatgatccagcaactccttttctagaaatttaccatatatctatatctatatctatatctatatctatatctatatctatatctatatctatatctatatttttttttgagacagagtcttgctctgtcacccaggctggagtgcagtggcgcaatctgggttcgctgcaacctttgcagtctgggttcactgcaacctctgcctctcgggttcaagtgattctccttgcctcagcctcccgagtagctgggattacaggcgcctgccaccgtgcctggctaatatttttgtatttttagtagagatggggttttaccgtgttggccaggctggtctccacctcctgacttctggtgatcctcctgcctgggcctcccaaaatgctgggattacaggcatgagccagcactcccagcctacccaaaagaatttaaaacaactcaactctttgaaattgaataatttgtacaaacatgggtgtacaaattattcatattagccaaaagatgaaagcaaaccaagtgtcattgatggatgaataaataaaatgtgaaatatatatacagtgaaatattattcagccttaaggaaggaaatcaaacatacgctacagcatggaggactttatggtaagtgacataagccagtgatcaaaaaaaaccaaaaacaaatgattctacatatatgaggtacctagaatagtcaaattcatagagaaaatagaatgatggctgccaggggctggaaggaggggagaaaagggagttgttttttaatggcagagtttttcttttgcaagatgaaaaaagctgtgtagatatgttacacaacaatgtgaatgtacttaagaactgtacacttaaaaatagttaagacctgtaatcccagctaaggggggaggatcgctttagctcgtgtgttccaggctgcagtgatctgatcacatcactgtgctccagcctgggtgacagagtgagaccctttctgaaaacaaaaaaaaaagttaagatggtaaattttatttttatgtttattttactacaattaaaaatttatgtatgtgtgattacttctgcagtacctttgggcaggactcacacacacacacacacacacacacacacacacacacacaaagtgccacatgtgatttttgttatagtccattaggcagtgatcaaacaggtattattagagctgtgttttactgaggtcaaatgatagaggaatggtatgaaatattgatgtagagggccaactcctgctgaaatgtgcttcatcagaaaatagaaactaaggattagaaaggaatagaaggtaaataaattccatgaaaggagatttttattccttgggattaggaaaattcctaatgactgcgggtttgttttgttttgttttcgtttgttttgagacagactggagtgcagtgacacaatcatggctcactatagcctcaacctcccagaccctagcgatcctcccaccttagcctcttgaggagctgggactgtaggcgcatgccacctcacctggctaatttttgtattttaagtagagatgcagttttactgtgttggtcaggctgatcttgaactcttgaactcaagcagtccacctatcttggcctcccaaagttctgatattacaggcatgagcgaccrcatctagccaactgtgggtttgtttaaaaaaaaaactatcttaagcatgaaaactgagaaaataaatacctaaaatagaattgaggtgttataaaaagtgattaaatataactagagcctaaaaaaaacaagaaatgcaatagaaaagtggttataaactggagcctgaataaacacacagaagagctttcaacagccatgttctagacaagtgttttagagtcataggatcttctagaattgagtaaactaaagaataagtataaagcatcacaacctagcaagaacttccctgcccattttgctgtgatgagtgctcagataacagtttcctgtcaaacaatggtaattctttaaagtaaacatttaaggctcctattttttatctgatattagcagttgttatgaactagaaaaggcatggagttgtactgaaaatttcttgcatttggtttccttctgtataagggaaattgctagcgtaactgtaagcggggctgattttagttttaatgattcatttagaactgattaatgtgccagcaaatgttctatgtgctgggtgttaacaataaaaaaagcaagacaatccttcttaaggatttcacagtctagcagaagtgtcaaacgaagagcttcacaatacagtgtgctatgtattaaaatatataggaacagaatgttgtgagagaatagaaaaagctgtagtgaggaaaggtttcagagtgatgacatttagagggagttggcttggcaaagaaaggaactggtggacagaaaaggcggggtatcaaaatgtgaaagaaaaggagttggaaggccaagcacagtggctcttgcctataattccattgctttggggggctgagatgagaggcttgcttgacgccaggagtacaaggttactgtaagctacgattgtatcactgcactccagcctggacaacagagtgagaccttgtctctctctctctctcttttttttttttttttttaaataaaaaggaattggagacatacatagcatatgtggactggaagacagacacattcattgggactggaattgagattcaaagtcagggcgggatttgtaggagatgaggcctgaaaagataggtcagagccagatagtgaaggatatctatttttgtagacattggatagatgcagcaaatatctccaagcaataaattaatttgattggatttggtttttagtataaagctgatggcaacttggaggatgaaatagaatgtaggatatatggtgacacgcattccttgaagaagattctcaaattagtccaggtgaaagatgataagagccaaaacctgttacatttgaaatgaagaacaaggctgtcttgaggaaatattgaagtaaaattagaacagtttggtaaagaattgaatgcagatatgaaggaagaattaagcctaacttactaaagtttccagttgaagaagtgatgattagatgagttcatgtaggaaagtgtgagataagacagaaccagactgagggacttcatgagtatatattgggtttgtagtactaaaggacatctagatgacagtggttggtgcattgttagaacttaggatatgtaaagatgtgaaaagtaaatctaggagaaccataaggagggggagttctgggaactagtagatgagatgaccctggagacgaaaagctaagtgctaacaatgataatagtagtaatgacaatagctaactgttattaaatgcttattatatgccaggcattgagccaagagcttcacatgcatttcttcatttcatcctcatagcagttctgtgaggtttatactactgttaccccatttccagatgagaaaattgaggcttagtgatttacccaagatcatacaggtaggaagtggtagtgctataggtctgtcctaaacagtaagacagatatcttgagcccacattctgtaccactgtaccatactgcattttatttaaaatgtctccctagaaaatacttcatgatgttcatttgatacatataatgggaatgcataaatttatatagcatatcttaattccaaagaaacaaaagtataggggcatctctaacagattttaataattataaaaaagcaccctaaatatatctctagttgtattagtccattctcatgatgctatgaagaaatacccaagactgggtaatttgtaaaggaaagaggtttaattgacttatagttccacagggctggggaggcctcaggaaacttacagtcatgcagtcatgacagaagagaaagcaaacacatcaggaaacttacaatcatgcagtcatgacagatgggaaggcaaacatatccttcttcacacggtggcaggagagagaagtgccaagcaaagacccttttaaaaccgtcagatctcgtgggaactcactcactatcacaagaacagcagcactgggggtaactgcccccatgattcagttacctcacacggagtccctcccacgacttgtggggattgtgggaactacaattcaagatgagatttgggtgggaaacagacaaatcatatcatcccactcctggccccttccaaatctcacgtcctcacatttcataacacaatcataccttcccagcagtcccccagagtcttaactcattccaacattaacccaaaagtccaagtccaaagtctcatctgaggcaaggtaagtcccttctgcctgtgagcctgtaaaattgaaagcaagttaattacttcctagacacagtgagggtacaagcattgggtgaatatacctgttccagatgggagaaattggccaaaacaaagaggctataagccccatggaagtgtgaaatccaatagggctgttattaaacattaaagttccaaaatgatgtcctttgacttcatgtctcacatccaggtcatgctgatgtaagaggtgggctcccacagccttggacagctctgcctctgtagctttgcagggtacagccccactcctggcttctttcatgggccagtgttgagtgtctctgtcttttctaggcacacagtgcaaggtgtcagtggatctgtcattctggggtctggaagacggtggccctcttctcatggctgcactaggcagtaccccagtggggattctgtgtggggtctctgacctcacatttcccttccacactgccctagcagaagttctccatgagggctctacctctgcagcagacttctgcctggacatccaggcctttccatacaccctctgaaatctaggcagagcttcccaaacctcagttcttgacttctgcacacccatagtcccaacaccacatggaagccacaaaggcttggggcttgcatcctctgaagcgatggcctgagttgtacattggccccttttagctagggctggagtagctgggacacagggcaccaagtcccaaggctgcacacagcaagggggccctggacccggcccatgaaaccatttttccctcccaggcctccaggcctgtgatgggaagggctgccttgaaagtctttgacatgccctggggaccttttcccctttgtcttggcaattaacatttggttactcgttacttatgcaaatttctgcagccagctttaatttctccccagaaaattgggttttctttcacattatcaggctgcaaatttttcatacttttatgctctgcttccttttgaacactttgctgcttagaaatttctttcatcagataccctaaattacctccctcaagttcagagttccacagatctctagggcaggggcagaatgccactggtctctttgccaaagcataaaaagagtgacctttgctttagttcccaacaagtttctcatctccatckgagaccaactcagcctagacttcattgtccatatcactatcagcattttggtcaaagccattcagtaagtctctaggaagttccaaactttcctacatcttcctgtcttcctctgagccctctaaactgttccagcctctgcctgttacccagtttcaaaattgcttccacattttttgggtatctttacaactgtgccccactacccgataccaaattactgtattagtccattctcatgctgctatgaaaaagtacccgagagtgggtaatttataaaggaaagaggtttgactcacagttccacatggctgggggtcctcaggaaacttacaatcatagtggaaggggaagcacaatcatagtggaaggagaagcaaacacgtccttcttcacatggcggctggagagagacatgctgaacaaagaggaaaaagcctcttaaaccataagatcttgtgagaactcactcactatcacaagaacagtagcatgggggtaatcgtccccatgatttagttacctcccactgggtccttcccaccacatgtagggattatgggaactacaattcaagatgagatttgggtgagaacacagccaaaccatatcattagtagtggtaacatttctcaaattatctaggtatgaaaattaytgtttaatatttttaagttttttaatcattcttttggcttttcttattccagtacatttgatcaataactagttatgcttaaataaattgcctttgaaagtagtaataattgaacagtagctgtaattattttctttatttatctagggacacattaatttttgaatctgttgctgactaaattccaatctaattttatttattttaatctaagagatttgattatattttaatatttactgctcttaaatcatagtgacagatgttagtctaatcactttgttatacccaatttagttttattatatattattttcattgtttaaaaaccttgcaattatagtaggtgggttaaggaccagttaaatgcattataagatttttttcttttaaaacagaaatcaagaaaagagaagcagaatcatagacttttcaaactgataatgataattaacaccttagtgtttatccctgatctaaaacactttatatgtattaattaatttagttttcagaacaaccatatgggatagatattggcatcactcccatcttacaaatgaaaccagagcatagcatagattgtctaccctgagggagtacagctagtaagtggtggatcagagattcaaatccagccagtctcggttcagtatctgttttcttaacctatcttactaatatccaaagaagctatggctttctcaggatcactggctagttagtcaaagcactgaacttagaaagcaagtctcctaatacatagtacaattagatttttttttcttcaagtttttgatgagctaagcacggtctacatactctaatcggtagtattttaaaaatttaagaacaagagaaaggtttttcttttctaatttaattttcttaaacataaggaattgcccttcacgttaactttacacttggattgtttttatatgtgaatcagatgtgagcacgatttggaagctaaagagggtaattgctttgtcattagataaagatagcatgaaattagataaatataaaagaagtaggttttttttaacttgaagttcaaaggaaacagaatagtaaaagacaataaaaatcagaaygtttaagattgtaatgaaaggagggataaaaataataaaaagctacctgttttaaaagacagtaagagagtaacattaaaaaagcaaatctaagataaatcacttaatagaaaggttactaacattaggcatatcttaaatgggctgattatcttttggtgggaaatttttgatacaagtaaaactgctttactatagaaatggtggcatttgatttttataaaaatcataataggttgtgttcattccatatatagtttatacaatttattgttttcataaggtctatttggaaaatcttgttcaagtttccttcaaatgcggtaatgagatattataatctctagtttgaagatgactttttctatacatgtgtaatcttggagttttaaaaatatttctgaattattgtctgctttttaaaagctgagcttcagttgagtaatgagcagtttagttgtcttggaaaaaatggtaatgtgctaataagcaggcaaaataaaaatacaattcaggtagaggatagtagctggcatgacagcagagaccatgatgtacttggggacctatgtggaggtctagatggttagaacactagatgatggtaagggagaaagactatagatgaagttaaaaatgcactgagaccaagtcataaaaggctttctcttgtatactaaagagcttgagctttgtcttacagaagcagccattgacaaattttatataaagcaatgacatcatgttttattttttccagtccagcagtagattgagggatgaattagaagggactaaagacggaatgagttaagggctggtagcagtagtcaaagtgtgagacataagctatgaactagcatagtgataggggccatttagaagacagtctagaagtggcaactccaaatctggtaactaataggatggtgtattagtcaggcttctccatagagacagaacctgtaggatatacggaaggggatttattaggagcaactgacacagaatcactgcaaagtcccacaataggtcacctgcaaaatgaagaaccagagaagctggtaatctggctggctcaaagccagtagcgtgtttcagtccaagttcaaagccctagaagctgggaaactgacactgcagtgcctgtcacgcctgacagctccccaaggagccactggtgcaagtcccagagtccaaaagttgaagaacctgtagtctgatatccaaaagcaggaggaaaaaaggtatcctcctcctgaagggagagagcaagcagaaagagcaaatcctcctttttcagcccatttctcccaggtgattggattgtgcctgtgcacattgacgatgggtcttcctctcccaggccactgactcccatgtcactttcctctggaaacaccctcaactgcacccagggacagtgcttcaccagccatctaggaatctctcaatccagttaagttgacacaattaacaatcacagatggggtgagagtaaggtaaagggagaaattcagatgactttcaggttgctaggtaattgagggcacttagtgtaggaaaacaagacaggcagcaaatagaatggttggggaaaaatttggttaagattttagcattgagtttgagatgcccatggcatattattttattatttccctagttctctctcctacaggcttagatatgcaactgattacttgatatctctgactagatatttgttaggcatcttaaacttcacatttccgaaattgaagctttaattttttcaattgctcagactgaaaacctctgattgattctcgacctctctttttcttctgtatccaaactaacagcaaattctcttggtaagccttgaaaaacccagaattcaaccactttactgtctgcactgctaccacccttgttcaagttaccataattgcttgcctagattattgcagtagcctccaagtgggtatctcagtatctactcaacttttcatcctaagtgatcctcttaagtcagatcgtgtcaccacgctcattgtccttactactctgtagagaccctgtccttctaaacagaacattcctagcaggctcccacttcagagcctactggtacttccctctgcctggaatgttttcccagtagtatggctgtcactcactttatttcttgtaatgtcatcaaagaagctattttttaccaacctatttaaaataacatcccttctcattaccctttctgtttcctttccttgctttatttttcttcacaaatgaatcatcttctgccatataataagttcacatctatacctgtagcatctaacaatgtacctggcaaaatagtaggtgctcagtatatattaaatgtatggatggatgaatgaaaaatcttgtccaaacagttgtatacatggatatggattataggagaatcttagctgaggaaatgtgtgtgtgtgtgttcttgttttatatttgttcattcattgttcatttagtgaacatttactgatctccctgtactttgctttttttttttttttttccttttctttgaggcaaagtctcactccgttgcccaggctggagtgcagtggcgtgatcttggcttactgcatcctccatctcctggacttaagtagttctcctgactcagcctcccaagtagctgggactacaggcacctgccactatgcctggctaattttttttttttttttgtatttttagtagagacggggtktcaccattttggccaggctggtcttgaactgctgacctcaaatgatctgcccatctcaccctctcaaagtgcttgaattacaagtgtgagccaacgcacctggctctgatctccctttgctttgtatcaggtattctaccagacagtggggataaaagataaaaaggcctatagacttgtggagtaaggcagattgtaaatgcattgcggtgtgtgctgtttattaaatagcaagtagtcaaagccataagaccagatgaaatcattcaggaatttcaagagtatctttctttaattttttttccaaggtgttgagctctttgaaggtaggaattagagggtcctattcatttttgtattcttccctttttttgttttttgagacagggtgttgctctcacccaggctgtaatgcagtggcatgatcattgctcgctgcagccttgacctcctggctcaagcgatccttccacatcagcctcccaagtagctgggattataggtgtgagccacctcgcctggcctctttccacttttatcacctcaacctagggtagtgcttagagtaagtgcttttaaatgaatgaacatttatataacttactaaaattatgaaaataactttaatggtatgaagaatgtgtactatgttggaaaaggaaatgaagggagtttgctagagaaataatctattttaaggtatgatatattttagatgaagacaggacctccaagttgaagcattcagtaaacatttgtacctgctaggctagatttcatagaacagatcaaaacagtagatagaaatttgagacttattcattataattgttaaaaaaaaaatttagcccaaaggatgcttataccttaggaaatgttcaaatttttaaaaaacaagaagaataatcagaaaggaaaaataagatcaaaatagtattgtgaagcaaaaaccaagtaataagtagaaaaagttaatacaaggtctacaatatccccacattttttagtttaaccaacttgttataagcagcccattttaaaaagacatactttcacttttaattttatttaaacttgacatgttttggatagttttatttcccaacatggaacaatttttaagcaaaaataaaaagaactatttttattttatcaggggttgatatagaagcagctcgaaaggaagaagaacggatcatgcttagagatgccaggcagtggctaaatagtggtcatataaatgatgtccggcatgcaaaatctggaggtacagcacttcacgttgcagctgctaaaggctatacggaagttttaaagtaagtattgttttttacagagtttttctattttagtttgtcttctttattcattgttccttttcttaaaatacctgcaaacgttattttgaagcaacataaaagagttctttaatgcctgtttycaggaagaaagagaaaaactactttgaatatgattgcttttgttctaaaattctttcaactctctaattattactattttttaatcagttgtgattttccagtaagttgaayttaagtgtcagtcacctattctctgtgaccttttggcctaataaatcactacagagagtcattttgaggttccagattgataactggtttgtgagtcttaagaacaatgtcctgtgaacataccatcarttttgagagcttgattcctgcagaatatttatttacatgtaacttatcttaaatasagttttcttttttactacatgaacactggaacttagtactattagcacactataaaatattaagccataagcaactttgactctacagggctgtatattgtttagcaaatttgcttggaacaaagcttctttatgttgcaataatatttttacttctgcaatgcaaatattggcaactatatgaagaaaattattctgtgtattattcaatatataaaattattcttatatgtatgtgaaaggaagaccagcrcttagcaaaatctactgcaccttttattaatatattgcttctaattcacttgagcttctaatatcaatctttcttattcccactcattagtaaaagcagtaaagaatatatgagtcacctttcccaagtttcctcctcttgggtgacagaggctcaggcagtcctcccacctcagcctctctagtagctgggactacaagcatgtgccactacgcccacttaattttcatattttttgtagagacaaggttccaccatgtttcccaggctggtcttgaactcctgggctcaagtgatctgcctgcctcagcctcccaaagtgttgggattacagacttgagccatcaccacccagcctcctcttttcaatctctattcaacttcaataatttaggcctttttcctaagaatagtatggcagtgttgcctttttattagttttcttgtccacctgtttctctctaatccaaaacttttgtgagttgccaacagcatttttttttttgagaatagaaagtattaaagagtattacataaaggtaagaattgtttcttaaagcacttgtttctgtaaatatgtatatgagtactgagttatattgcaaaatagtttctggatggcttccaaatgatctttttaattaggttatccaagctcccaaaatcctttattagttcttaggggggatcaggataaattttaaactccttaacttagtacatagattcttcattatctagacactgtcttcccttttaagctaagctaccaccattgcctctaaagtatgaattgtgccagttacatatatctattgaagttctgtcatgatgtcttaatgccttcccttgtttctgtctggatgcttttattcaccatctcttcaacttggaggcaaattctgctctatcctttgaatcagttaaaggtccttaagcatatgaaaaaaartgctcaacttcattcataattaagtgcaaataaagctacaatgagttacacttttacatctgtcragtggcaaagatcaaaacatttgacatcctgttgacagggtgtaggaaaaggcactcttactagtagaaatgacaattgagcaaattcaatcaaagtaacagttattctttagttccctgattctacctctaggaatttgtttttttacagatattcccactcacatgggaagtaagatacgtgctagcagcattgtttataataggaataagagaatgttttaataaattatggtatatgctttcactggcatattctgaaacaaaacaagaatgagaaatctccttacatactgttatagaaagaacactagggtatattatgaaatgtcaaaatcaaggatccaagtatgtatcatttgtatttattgtaaaaaaaattaaaattgtatttgcttatatatgcatgaaatcattgtgtaaggatccaataaaaattaatagtatggttattttgaggtagggcaagctagttggctaaaagtcagcggtgagagagtgatgtccctatgtatcctttcattctttttttttttaactttgtgaacatattacttatgaaagttaaaacatatatgaaataaaaatcaatagaaaagatgtttcaaatgtaaccttcttcacattttctctccctcccaaacacacacaactcctttcaatttgattttgatgcttttcagttttgtactcccattgcatgtctattcatagaacctatccttgagagttggttgttgtttcacttccagtaaaagctccttgaatatagatactgtctttttttatgttgaaaaaatttacctctttttttctcgccacacagacttctaagtacttaaaaatgttgctcagcatatttaacattattattgttcatatttcctaatggggaacagcgtttttctcttacattccagtattgtttctgcctctattaataaggtttctgataatatatatcagtggagatatttctttggacttatatctttcagcttttctttagataatggctcttaaatgttggtctgcaggcaggtgataggcaatgatatgaaaatcatatgggggacttattaagaatatagatcagcagggcccatctctccatatgctgattgagtagtactggggtgagctgggsaatctatttttaaaaaacaagcccttcagatggttccgttacggaggcaggattagaaacagctgtattagatattgttaggaaataccagatttgttcttaaataaataaagggggattatacattagctgtcactaccacctcctgtaggtaaaaagaaggtccttctcaagctcaacatcttggaaagtgaggtaaaggttaactagatttcatgagttgtatttagtgttcgttcacctgtttgtgtggggctatgctatgtgcagtttatagacccatccttgctgtctgtgagcttaatgtctaaataaaataaaggttgttgtcaatatgtagttagaagggcatactaacataatttatgcaactctttgcattgtattaaaatgtgtttctgttttagcttgwtgatgactggagtatctgctttctactgctcagaaaaatagatccgactccttggaatatgttttttgctttgttttgttcttaaaagattgtcattttcctttgaaaattttcagctccttaatttcaaggcaacagaaatattacaaaacaagtttctttgattccagtgtattcttagaacacatttagcccgagattatatattatatggaaacctgaagatgatagttcctgcaataaatcagttttacatacaaagtgattcatcagttttcgattttacattgaaaaattatgggcttttctgtgaaaatttcacttacaagtcatattaacaagaattaatcagtgtcacaccaaaccataagacttagagtcattaggaattaattaaaactgcattattatggcaatgactcaagatcctctttttctgagttttttctgagaattactttgtatttgccatagttaattcattgagggggaaggatgtaaattctgaaaagaaattaattgaaaattgtagttaaattgcatgatagatagcttttgatcatgatcatttatttctagattttaatgattgtctaattcactgtaatttctttagacttttaatacaggcaggctatgatgttaatattaaagactatgatggctggacacctcttcatgctgcagctcattggggtaaagaagaagcatgtcgaattttagtggacaatctgtgtgatatggagatggtcaacaaagtggtaggcgttttaaacgtattttaatactttaacttttagaaatatagttttagaaagtatatttagaaatatagtctcaaaaggttataaggattacattatataattatatttttattaactgtataaaacattttttcagccaactgacttactaattaatggtttaagtcttttcagctaccgtatgaggtggttctggccttgtactgcaaagaaagaagtattgctctttcagtaatcagattgccatacatgtagagtagatttggatacttgcattaatactatgttcttaggaattcagaagctaagaaaacgttgcattcctatgtgaatgttttctgccacccctttgagttggaacacacgtagaagtgcgtttctaattctttagctgatggtcttttagcttgcttatagaattctttaagtgacatgaataatgaggtcttacagcaggtgatgacagtaaatataactataaagttttatgccaaaggggatcattgagatgcaacatcatctagtcttctagttttgtagatgagaaaatagttcagttgagtgaggtaaatgatgtacttaataccacaattacgtagaaggagggagggagaaaatgtcatacaagcgtttttcacaaaatcatgaaaagattcaggttatcaagtttcttgttaaactagacttctctcctctactcctttttagatacactatcagtcaatagccagtcaccagtattcctgctagtctcttcctactctgtgttggtaggtaataagtatcatggagaactcaaaacacgtctcctctagtgggtttgattacctttccatagaatgttccttgtatattgcattttataggataatatcataggttatgtagcagagattcataaaatgacctcatctttattcaaaacagggctaattcttttgctgtttttggagtagagttctaaatatcttattttcattaactgatttaaaaatatattttatataagaaatgtgcaggcatgaaaatcataggaattggtaaaagtcttaaggaaagtaaaaaaatttgggggaatgattggtttgtacttatatacaaatacaaaaatctttgggttgaatttttagttaaaactttcaataatttactttctctgttgtttttcatcataatagttgttttgtaatcagcattagaagacaaataaatattgatactattcaagtaaaaggccagctaattttagcttcgcaagtcgtgttacctctcttttcatgtagaaattccccttcagaaatttttttctgaaaagattagcaggtacctattagcctctgaactctggtctgcattcttctctcccaaacagtgaccttttaccacatgtccattcatatgggcagtgctgataattggttcatttagtaacagtagcctccggatgagaactagatgagagaagcttattaattgaaatggtttccaaaaaggattatttcacttacaagttgaaacatggtgtgtttcccctactgaatcagtattctagtgaaacatacacaatatattgtatgcatgagaaaaatcattttattggcatctggccaacaattgtctaattcctatgctatacaatttatcataattttgctatcagagaaggagtgcatgtaaaattattttgccttatatccttttttaaaaaattactatagtagcagctccttatgtcactctaaattttatttactccttatctgtcattcgatatttcagtagatctttatgtgatagtaaaagaattgtgagccaggctttgtggtrtgcacctgtaatcccagctacatgggaggctgaggtagaaggatcgcttgagtccaggagttcaaggctgcagtgagtcatggttgtggcactgcacagcagtgggcaacagaaggagaccctgctcaaaaaaaaaaaaaaaaaaaaaacccgaaacaattgtgcctcatatttacatagaatttaaaggttttcagccttttttacacatattacctaatgcaattcttttaacgaccctgtgaaattaagttttttggattcaggaacatgatcagagaagtcaagtatattttcctaaaaccctgaaattgttttatctttttattctgctaagttcctctataacttcttttcgttttagtttcctcatcttttmtttttcaagatactattaagctataaaaatataaattttaatcaaaatatttttcttttaaaaatcaagattttaaagactgctttttatagtgaggagctacataatgtctatagcattctaaaggactttgtgccataaatatatccaaatacaaggctttttttttcatttgagaagttctattttaagaccttgatttttaaaattttaatttcataactttgcatgtatgaattagactgtttttattgtctgcattttaaattgtcatacatcatgttcagtcaaaataaattactttgtcttaattatgtaagcctgcctatgtgaatttatattgtcattggataccttccttagtacttacagattgaagattattactaaattgttttaaaaatgatattaaagatgtgcacttaaggtactaccagagtttagatgaattatttagtactagaaaacatgatttgggaaaataatgtataatatagtaagtgtaacaaatatatagaaaatctgaaactttctacatggaagtgggagaaatggtctaaaaatatttagagatttcagtttcatttctttaaattatttgcaaactgtaatacatatttactgtcattttaattcattattataaattatgtgatacagaccttaaatacaaaggtttttatttgctttcttaatttattaaaataattgctttactagaatgtatctaatattgttctttctttaaatattgactagaatgcttttctggttggaatttctcttaccaaattaatacaatggttagcagacaagtttttagattaatataactgtcattataaagatttaaatgaataacaaagctatttctgctattaatggacacaagaattttttttaccctaattccatctgaatttatttttatttttgataaagacaaaatgacacactagtagagacctagattgtattcccactttctcttaatgacctgtatgaccttgggcaaataccatgcacgcagactgagtttcttcatctgtacagtgagaatcattctgatacttgtcccagctacattattcgttgttgtgaagatgaagaggttgtacctaaaaaaaaatttggttagaataagtgagtaaagaaaaatgaagaaactatgaagttagacttataatgtctctagtgtgtttgtgactcttaatagacgtattggactgatttttttttaagcagttacttttaagatagttctcttgataaagttttcatgttctcatacctcagcattgtgtcctcatttgttgcctggttgctttgagtgacactgcttatatactataaatgtgtttatactctatcaatgaagcataatagccttatagtagttaagaaccaaataatgtttataacttcatgactgttagctttataactgtgctgcagattgtttaaagagcatgtttaagttgatgagttaagttgatgagtgtgctttttttgaaattagaaattcttatagcccacattttactctaatttgattgtgtatcagctgctgtttgcaaagtagattcatttatcaagggagaaagtgaaaataaaggttagtagagtgatccaatttcttattcttaaagaggagagttccttgattattaaagtgactccattgcatttaactgctagaaaaatttaattacagttcaaacattttcaaggtggggtagttcattcatgagaagggttgataatgcttaaaatgatatttaaaaagaagtcactgaattatttccacataacataatcttaaacacactttacattaaataaatagcattattaacattttagaactgattatgtaaagcatatgatatagcaaaactagaattaacatgtatttctaatttaaagggcaccttaagttttgagccagttatttgatttcagaactatttattcttcaggaatttaaattttggcttctatttcccaagattgaaatgggaggaaagtttgttaaaactaaaactttttatcttggactgagtgggaaaggatagattgtctcttaaattcctactggtaagactttctagcaagaaaaggcaagtatgataagtattttcgaatcttgtaaatttatatacatactcacctattttgaaaaagcagtattttatatactttgaagatattcttcatagggctgggcacagtggcccatacctataatcccagcactttgggaggtggaggtgggcctgagccctggagttcaaaaccagcctgggcaacatggtgaaactccatctctacaaaaaaatacaaaaactagtcaggcgtggaggtgtgcacctgtggtcccagctactcaggaggctgaagtgggaggatcacctgagtcccaggaggttgaggctgcagtgagccacgatcgtgccagtgcactccaaccttggtaacagagcaagatcctatctttaaaaaaaaaaaaaaaaaagatacctttcatagacaatggctttttattttattaacagacaatgggaaaactagctcagatattggctagcttatagtttgttttgtagtgtttggaaattagctcctttctgaatacatgttaacatcctgatgttggtatagaaacgaggtttgttgtttgtttctaaacggaaaaattaatgtgattttagaagccattatttcttatccattctgatcttgttgtggatataggaatactattaagaaattttaactttctttcagaattatattttttgttgctaaaaacttttttttttctgtgaaaggatcatatactggataacatacaaagaagactgtattctaaataatgaacttgtaagcatcctggaaacttgtacagtagggctattataaggactaatgcaggcagcaggaaatattcttactatgtttagtcagcagctctttgaaatttttctctttcacagtgaattaaaatggattgacatatgttcatgtggactaattttaaaaattaagccatacctgtggctggctgaatgttaaacagcttaaacatatatatatttttagttttattactctaccaagaagttaattaagttttaggaagtcatcaaaaagaaaaagtctcaaaaggttaaattacccagtaattttgcccttaactgtatgttgaagaaaatgaaaacaggtgtccacacaaaaagttgtatatgaatgctcatagcagcattattcatcataggcaaaaaaaaaaaaaaaaatgcagatgtccacctgatgactagattagcaaactgtatatatcatgcaatggaatattattcatcaaaagaaatgaagtgatacatgctataacatgaatgaaccttgaaaacatgtagagtgaaagaagccagtcacaaagaaccatatattctatgattccatttataggaaatgcctagcataggtagacctatagagacagaaagtagattagtggttgccttgggctggatgcagacagtgactactaaagggtatgttcctacttcttagggtgataaaaatatttgaaattgattattttgatagttgtacaactctgaatatccataaaaccattgaattgtacactttaaatgagtgatttgtatggtatatgaattatatctcaataaagctgttaccaaaaaaataaggggagatattctcagcttctgtctcacataaatttcacatacattgccttagagttgtatgtttttacagtagttattgtatcataaccactgtaaaaaatgttatccaacntctttatataaaattatacagaattactgaaggcattttatgatttattgacttttgaccatcaccatccccccttgtttcctacgtagggccaaacagcctttgatgtagcagatgaagacattttaggatatttagaagagttgcaaaagaaacaaaatctggtatgtttgatgactaataattgcctatattacttaccttaataattttgaatttgagacaattacaaaagtattcttgtgatgttttgtactttttggttttaagttatccttaagtttcactaaatgatagtgaaagagaataaaggatggtgatatttagccttttgtgttgcttatccccatttctatttcctccccttctcaaaatgaatactcatatatgtcctcaagaataacgtttttataatttcattagagtgttttacttaaaagatgraatctataaaatctcatatatccaatagcaggtcctagataagcaaggagttatatcactagaaaacagtttttttttttttttggagatggggtctcactctgtcccaggctagagtacagtggcgcgatctcaactcactgcagcctccacctcctgggtctgagccattctcctgcctcagcctcctgagtagctcggactacaggtacacgccaccatgcctggctaattttttgtgttttagtagagatggggtttcaccatgttgcccaggctggtcttgaactcctgagctcaggcagtcctcccgccttggcctcccaragtgctaggattacaggtgtgagccactgcgcccagccagaaacagttctttaagtaaaatatcctcagccagcctaagtggttagtggatctcgactttttcagtaaagttggagggatgtaaaaaatccatcttagccctgcatggagctttttaattgtctagtctatttcattctttattcaagytctttccttttcaggtaaaacttaatttatttatttctttgttttgtcttatttaatgtctgaaaaactactttgttattattttaaactctgcatcttagtaatagtatcttaatagttttcttattttcctttgcataactttgtacaaagctccatagtgaaaaacgggacaagaaatctccactaattgaatcamcagcaaatatggacaataatcagtcacagaagacctttaaaaagtgagtaaaatattcaagtacatttgttatttttgttaatgagttggcatagtggccacaggcatgattattgtggatctgggaagaatgaatatattttaaccttttgtatttctaatcatttgaacactgttttcctttaacagcaaagagacgttgattattgaaccagagaaaaatgcatcccgtattgaatctctggaacaagaaaaggttgatgaagaagaagaaggaaagaaggatgagtctagctgctctagtgaagaagatgaggaagatgactcggaatcagaagctgaaacaggtaaaattaaaagataaatgcattttcgttgaattttgtggcagtgtaaaataagacaagatgagacgtaatttttaaatttttcagactgatttgctacttgtttagayacctgccacactactaaattatctttcagtgaatgctagaaacttacatatagttgtgaatttattattatttaattatctggaggctgttgttcacctctgcattttgccgacctatatttaaagaagttgcagaggcttctaagactccttaggtacagataggttgtgagtgggttctcagcaattgagaaatgctcctgttccttctgaggtccaaacgtccaggatgccggtcccaacagcatcccaaattttccctaagaaatagtaaagtaggaatggagtaaaaactctttcctgtgagggtgtgggggaatttgctttgttttgagaaattttaaagatacagaaaagtataataaacaaacattcatattccaacaacctcgacttaagactttaactactgtgacatttaatcatatttacttcaatttcttaaatgaagttaaaacattatagatgtcttttttggtcacccaccctagtctgcttccctttccttccttcaaaggcaatcactgtcatgagtttttttctgtaatcttctagttcatttttatagtcttacatatgtgtattcatatgtaacatataacaattataatattgttttgtgtttttttcatatggtaggaattgttatacatcttttttcactcaaaagttatgttttttatatttgtccataaatctatttctrtaacttgatctgcattttttttttttagctattgtatagtattctattaaatatgtctgtttccattctgatgaacatttaccttattctcaaactcctgggttcaagtgatcctcctcagcttctccagtagctgggacaacaagcacatgttaccatgcacatctaattttatttttgttttttgtagggttaactattttgctgaggctagtcttgaactcctgtcctcaagcaattctcccacctcagcctcccaaagtgctgggattacaggcatgagccattgtgctcaacctatagcctaaagttatttttatgcagttaatctcctccctgggagacattacttagctctcagtctgtagtcaagtatatcattacaaattaaactatgtgcacaagagagccaagacttgcacccagatctcctaacttgtattttaagtcttttactacttatgtagtataattcaagaactagaagtccaggcatctctttcaaagatttctaggtttttgttcactaaattttttcttcattagcccttgtttgtatacaagtcactgttcaatgttagacaccaaggaactatttaaaacaaacaagagaccttaggccagttttaccactaaccagcaaatcttctgctatcttttggttgaatttccttgattataaaatgagaaaaatcgggctatatgacctggatggttcttaaaactctagtattctattaaatataactaattaccatcaaattgcattgtatttgttcccggtttggaattgaaacgtactaattgctctctactcagtttctcactgagctaactttaaatgttcctttgaagcattgtactatgataattttgttcttcctgttgctagtggcagttgtgccaggaaaatttgactctgtctcaagaattaacccattgtaaacgctgtgtggttcctttcctctcactctcttaatatcagctaggctttatcatactttatttggaaagcttgagaaagcagccatttccctgtagagctacagcttaatttgacaatttgtaaaccatttgttctttctactttttgtaaggttatttccttgggaaactatttgacataaaataactattttgctgaattttgtaaaataaattatttgccaaaacagtttttcttcagtgttctttctcttctcataaagcagataaaaatgagagtgcaaccataagttttagttacctttcaaacaatttacaaatgtgaaagttagttgagaaaatgagaaagaagagtacatttttgcttttagggttctttcttctaggacttttttgttctttgttgaaatcaaatggatagaaagactacagcaatattaataacatttacaaagtaagttggatggtggggctgggtgctgtggatcatgctagtaatctcagtagtttgggagtccaagtctggaggattgcttaagctcacgagttcaagaccagcctgggcaacatggggaagccctgtctttacaaaaaaaayacaacaattagtaggtgtggtagcgcacacctgtagtcccagctactcaagaggctgaggtgggaagatcgcttgagcctgggtaacaggcttcagtgagccaagatcatgccactgtaccccaacctgggcaacagaacaagaccctgtctcaaagtaaataaataagttggatggtggtacatggggtttatcttatttgttatttatatctcctactagactgcaagtgaaggtattttgtcttttcattggctgatatatccctagtacctagggcactacttgaagaatggggacacttattatttgttgattgattctctacacagttaggtggattattttccaagaagatgatattgtgcccatttaactttagactttttaggagtgggaaaacatgctctttgggacatttaaccatactgtttgacaggaatgtaaggtaattattgacaaaagcacttttagatttccttgattaaagaggaaccatcagttttagatcagtaataatagttgtttatccattagaaaattgcatagctactgttaagkttttagttacattscattcatgcattcaagttttaaatcttaaatttctttttattttcttcattttaaaagtacagaagtcagattctatttgtgcrttttattgtcagaagctttgttgtgtatctttattatcttaactatttatttcagcatatatatagagacaagtctagaagctccctgaaaaactgacttgcgaaaaggaatcacagtggggaaagacttttagttaacaaaaccttaaacaaaaatggaatataaaatgattttttcccagccattgagaccaaatatatatggaatcttgactcttaattgtttgtctttaatagataagacaaaacccctggcttctgtaactaatgccaacacttctagtacacaagcagctcctgtagctgttacaacacctactgtgtcatcaggtcaagcaacacctacatcacctattaaaaaggtaagccaaaattgtatttgctgaaaatacatgtattctatttatgtaccacttggactaactcattaaagtaattctgaatttttatagtctgttccaaaaatatgtaagatttcagaatataaatatgtatttatgtttctcagttgaatgagatttcttctgaatcatgtttttttatcctttttgcaattgatattactgttgatattacagttggtagttaacaaatattacatacagttgatagttaataaatggcagaaagataaaaatttttgtaatattaaaatcagtgattgtattagttttttttttctattgaacttttattttgagaagctcaggttttatatcctttatctctattaagtagaggtgtgcatgttgataatttcacacacgggtaaattacaaatactactaccacaagtcaatgagagaactaaaatctaaattttttaaactcatagtacaaagcactaggcaggcaactttggtatgtcagtaggagcatgatctctgaggtcagataaaccagagatgagctcctgactctaccttattagttgttatgaccttgagcaagttacttactatcttccttttgtataacaaaataaagagaaatacagttaatattgtaaggattggttgagatagcctggccagtaaactgagtgtgttttcaaaatgttagtttcatttctttctcttctttctgttctctgtctgttctccatccctctcatctcttctctccaccgaagcagtgttttccagttagtgtgttaatctttttaagactttacgttttcctgcttctctggaacctatctttcttttaacccaaattaacgattaagagtttttgtttgtttatgtttgacctactagtctcttttcaaagatttctcttcacccgtccttttttttatctttttttatcatttccctctctgtccacacatacctttttttttaaccaaacccttgaaaaattgattgcagtaatcataacacttcatgcctaaatatgtcagtatgtatctcctagtacaaggctattcttcattctcaaaataatcacacttaggaaatttaactttggtataatactattatgttattaataactaatatacccagattttcccaattgtcctttgagtatttctgtttgttttttaaaatcaggggtccacttggattgtacattgtgtttagttgcctttgaacttcttattttgttgctcgtttgacattatgtgcatgagtttaaggactgattggtttttaaatcctcacagcatttctgttgtgttgtcagtcttgccaatatttggatttggctttaggtggtcaaaatatagatctttttgaaatcataaactgcagaataaaaaaaaaaatccctgctgttagtaataatccttctctcaaacttcccaaggaaggcagtaatgtaaattattagtggtagaaacgtgttggtttcattggtacatagtttgaatattgagaaactatgaatgacttatcttaccttatatattccaaaactgagggcttcttgaattcagttagaactcatgttcatatgataataattatgtatgcttcagttaagaaattctctaaaagcagtttgtctgcaaaattttgaagactgttaatcatcctataactagcgtcactataaactgctttaattaaagtttattttacttctaagacccccatgtacttcttcagtgaatactaaattcattcctgcatcttttgatctgtttagactataatgttatcagaaattccatctccctggaatacctaggcaagaaactggctatctttttttttttttttctttttgaggcagtcttgctctgtcacccaggctggagtgcaatggcacgatcttggctcattgcaacatctgcctcccrggtttaagcgattctcctgtctcagcctactgagtaacagggatcacaggcacctccaccacacctgactaattatatttttagtagagatgggttttcaccatgttagggtattctcgaactcytgaccttgtgatccgcccacccaaagtactggggttacaggcgtgagccactgcacccagcactggctctctatcttttgggtatttggctaagtaatccctttcctactacagtcaaatgattacggtaaacttcctgtgttcaattttctttttctttttctcacatatagccracatttatggcaatgtagttctcaatttatacctaatgccctaactgaaaagaaatactttataacctctkttagtatagtgggccagtaatctctttgctgtaaaagttcttattcaaaatcactcttgattctgtaattaagctaatataataacatctgcttctaaatttgcatatttagaaactattttattctcagtttcaagcaccataacttactttgaagattatattgtttctttgttcttaaagttttgtaaccaaattttattcaaaacgatcatgtgtaaaaattttgaattttttttttttttttttttttttttgagacagagtttcactcttgtcacccaggctggggtgcagtggcgcaatctcggctcactgcaacctccacctcccagattcaagtgattctcctgcctcagcctcccgagtagctgaattacagacacctgccaccacacccagctaatttttgtatttttagtagagacggggtttcatcatgttggctgggttggtctcaaactcctgacctcaggtgatccacccgtctcggccttgcaaagtgctaggattacaggcatgagccaccgtgcctggcctgaaattttttttttaatgaagagggggagtctttttttttttttttttttttttttgagatggagtcttgctctgttgcccaggctggagtgcagtagcacgatctcggctcactgcaagctccgcctcccaagttcacgccattctcctgcctcagcctcccaagtagccgggactacaggcatccaccaccacacctggctaattttttgtatttttagtagagacggggtttcaccgtgttagccaggatggtctcgatctcctgacctcgtgatccacccgcctcagccttccaaggtgctgggattacaggcgtgagccaccatgcccagccgaagagggagtcttcttatcaatactgtatgacttttaaaacctgttattttcagtgattcttatactcctgtatctaatttagcatattagtattttttaaaattttttcaagtttatctgtaactttagtgacctaacattaaatttccttaaacaggttgttaatttctaattgcatcttaaaaggttttgcaattatctgtttttaggttcccagtcatgactccacttctaatatttagataaagttatcaagttctccagcttcctaccccagtacataaactatgtatgtgtgcacttgtgttcatggcaagacagatcacaaaaatggaagcacacgaaacagttttacatgcttattttcttttaataacttggggtaactatggtgaaagatagatgtgtttactttaattccttaacccttccgctgaaattaaagaactgtttctgtagcaatatcaagctgatgatttgtggagatgttatctataaaaccatcagtttgattttgtgcttaaaattgttaactaacaagtttatataagcctctctggtcaaaataaattttgttgggatctctaaagcagattatctattcttctatatgggtgtacattccaataaaatgtaaatggcattttctttacttgatggtaaaaattcagaatttttatggaattaagtgttctggttaattgaattcaatgtaatagctaataatttaacaaaagactgctatgtgctgtgggtatataaagtagtccaatcgaaacgtacagatgtagcatgatttaaaaggagaagaaattatatttgacttaaggtagtagaatcaggacattttagataaatcttaaagtaggtagtactccacctgagagaagaagggcttgtaaamcttgttgaaagggagagaagaaaaacaatatgagcaagtggggataatatggaatactttcgcaggaaaaatgaattgttccatttgattgatttatagggtgcatatatacaaagtaaacaggaaaagtagagctatattgcaggatgtcttcaactgtaggataacacttttataatttatttgataagtagtagtcgtggaagatgtttgaacaatgccatgagaggattattctttatagaatattattctgacagcagtgtacagatttgaagatgagaggcttattgagaaaaggtttattagaaagtcattgaagttgcccacaatgataagaatatgaactagagaagtgactctgggcttataaaggagaggagatttagagacttgacctctaatttatggatggaggaaaatgacagagaaggtctaacataattgtgaagtttgaaacataggagattgaagagatatacttagtgccattaacagaattagggaactgaagaagagatggtttggaagtaaaggtgttttattttagacatactgagtttcaagttttcagttatagttctagattgtccactctagaatagtgtggtagaattttacctagaatagacaggtaaaattaggactggaaatttaggagactggactggagaataacacatttgagaataagctgactacaattaatatttagcctgaggaagtaaagaccctcctcctaaccccccaggagaagaaagtagaaagagaatatgagagatccaagagcaggctctggaagggctagcacaaggaaagttgtacacacacacacacacaaacacacacagcctgtataaggaacgttacacacacacacacacacacacacacacacgcacacacagagtcagtcaagaaaaggaatggtcagagtaaaaagaaaaagaaggtgaagatagtgtccagtaaaaaaagccaaagaagagagtttaatggaggaggaggtatagttaagtatttcaggaagggtttatttatatatcaagtaaaattaaaaggtgcttttagacatataaagcagtacttaaatccaagttcatgttgggcagagtggaggtatatcagccattacagtgtaacaaatgcccatttcaaaattgatagatagtactgcctcgtttttctcaactctaaaataacagtaatagtagtatttcattgggtaattataaggttgaaacaggataacccatgtgaagcacttagctgagggtcacacactagtaaatatttgttaaatgttagcttcatttataacaataaatgttagcttcatttataacaataaatgttatctgactgactgactctggctgttttataatgggggaaaaaacgtttgtttccaggttttttgtttgtttttttgtttctgttttttgaggaggtgggagacctaatgtgggtgttggcaaactatggctggtgggccaaacctagcccattacctgtttttgtatagcaaactggttggagaaaaaaaataaaaaaaagtcattgtccctaaagttttattggttacagccacactcaatcatttgtgtattaatattatctgtgttccacaaagcctagcatttacagtgtagccctgtaaactcaccaatcaataagcagctgtctcagtacctatcatattgcacagaatattagagttcgcaaactttcttggtcattggagcccctagtgtttggtaggattttttcacagtgccactggcaaaaggaattgcctgtttgtctcattaagtagtttgatggaaatgtgatcaaaatggcagtttgtgcagtgtctatgagatgtcactgtgcttctctcaaaactttaaamtattctacagagcccccgtgattttgttgtgacactctggagcactttggtgcacattttaggaactgaggaatgcttagacactattgatagcaattcattactggaagtaccagaggtatatctttataacagttttgtccatgaagtggccctcaagcatcatcatgggggctttaacaagccctgttaacctgctaattatagcaaatgttggcaatagatakgaaagaaatgatttttaaaaaattattaataccctatgcttgtggcaactagttagttgctgtattcaccaatctatatagttaactgtggttgagtatagaawttctagaagtgaagttgatgaagtgatctaaagataacagaggttgcatttttagggttgttggaaagcccttaaaatagcataaatatttgtacataaaattagtttttattatagttgaaatagttaatgtttggtggggaaatcagtaaatttaaggctgtgatgttaaaaaaaaaagtattataattggaaaaatatcagttactagtttttgttgattatattggacacaaaattttttaaccagagtatatacatggattaaaaacaaaattcatgtgcagtagtttgttcagtcacatgctatattatctactctgtatgccttttaattgctttagaagtttattagatttttttcagattatctcatgctaaaattagaacttgttcccagtgacttttaaagattggatcattacccaattattggggttwattataaaattattttcaaatgaagaaaatattttttgttcataacttcccttttctgttttcatgctttcaatctttgtctctttacctgtcttattttaattggctttagtatgatttcattgctcctatcatgcctgtggtggaatcagtagatcctgcatcatggaggcagggcttgcgcaaaactggcattgttcttgtgcccagtaagggtgaaaaatctatggtgaggcatttctatgtgcaagaatttatattaggttacaacataacaagtttaatataaattggttccaaagatgcatggttttaagtccttatggtgtgctcatttctgttttctgtatttgcatcataatttttctgtgtgatataaagtgtgtagtgtgttttcttaagtctaacccctaggaaggtagtctatttctttaaaatttttagatctttacattttttactaagacattaacctatgtagtaaaagtgttttatcctgaaactgtaaaccataattttaaatatattatctgtaaactkattgtttccaatttaaggactgatcagctttamaaattcttttttcttttcctaaaaaataaaataaacacagtttccaaccacagctacaaaaatttctcccaaagaagaagagagaaaagatgagtctcctgcaacttggaggttaggacttagaaagacgggcagctatggtgcacttgctgaaatcacagcatctaaagagggtcagaaagaaaaagatactgcaggtgttacacgttcagcttcaagtcccagactttcctcctctttggataataaagaaaaggtaatctatttcacagtctggtttctatgaaaactgttatgatttcttttccaggaacatcaaatctggtagattttctgctagttatctttagatctaggtatcaagttaattaaccttaatgaattacataagacaaatgtaatttatacagaattataaatactggaaagatcagatgtatttgcctaaaacataaattatgggactatactccgttaaaggaatctattaycttacttgagaatttataatagaactgtattaaggagcaggcttattttgtttattatgattcaagaaactttctgaagtttaaaaaacataggaacacatttattctagaatgttagtatactcataagttacatttattcagtatctgaaaaaaaataccagatttttcatctaccatattacaagcaactttgtcttaatgagtaaatttaataactattttgagaggtggtattaatactgcattatataggatgtaccacagtttattcaatactagtatttatttctacagcatattcagtgcttgaactattttttttgcccatacagttttctttctatacttagaaatgtttccttatatcagaaattcagatgaaatttctcatcaagtaattctaatatttttgcttttttatcagtttactgtgcagttggtttccaggtattttatgccagcttactaggaatgtatcagagtgtcattgtcactacacactcttagccatatttggataaatataatttaaataatatttgttttgactattttgatgtatttgagagcattgattatcaaggttctaaatagcttatataatataaatgcttgagacctctcagtgaacaatatttgaaagtttatttctctggaagaaataaagatatttcagcttatgacacagtattaatctgttagagaagttttagaaaaagtcattaaaatctggagaaatttttttcctttcttagtaaaatattatctgattccaggctaaaagagaaagaaaactaatttgaacaggctgattattgattgacattaattttagagttcagctaggaattgttgaaatactgtaaactatgatagctatgtaattataattattgaataaccttttcttaatacttttagcattgcctatagtcagtacccaaattaatttttacttatttttttccctgttgtgtaggagaaagatagtaaaggaactaggcttgcatatgttgcacctacaataccaagacgactagccagtacatctgacattgaagagaaagaaaacaggtgagtttattttgatttgctttatgcattcactataaaatctttattatctagcattagagttaatacatgagcattgtaattatgtgcggatatgtattgtgggaagagatggaggatattcctgaaggagaaaataccaggtacatagtcctgaggaggtgcaggcttggtatgttcatgaaataatagcaaagaagatgtggctggaacagagtaaggggaaagtgggaggagataaggtcatgaactagtatgagttctctaaatatttggaacatttaggaaaggggaaagaagaaggaaagcccttacttaatcattttagtttgttttaaatatttttgtttaaatattgtttaaatattttagtttcttcctgtttttcagcttatagaattttatttttttaatttaattatttttatttttatttttattttttttgagacagagtctcgctctgtcacccacgctggagtgcagtggcgcaatctcggctcactgcaacctccacctctcaggttcaagtagttctctgcctcagcctctcaagtggctgggattacaggcacctgccaccctgctcagctaatttttttatttttagtagagacagggtttcaccatcttggccaggctggtcttgaactcttgaccttgtgatccacctgcctcggcctctcaaagtgctgggttacaggtgtgaaccactgcacccggccaataactttttaatatacttttaatcatgttataatatctaatttttttatttttttcccctaagatctcataagcagtcttctatgttaatatatatttttaataagcattttttttgtcggcacataacatactataaagtagatcttctgcggttaaagtaagcatctcccctactttatattttgtgatcaaaaagcatatttctataaayatctgaattttcccccatacttaggggaaaaattataccttagggtatataatcttagtactgaaattactttatcttcttgattagtattcctaagtgtcctcccaaaggtttttactagtttcagcttatactaatatttactagtgtaccgctttcttaatcctattttaaaattatgtaccagaatctgaagggtgttcttttaacagagattcttcaagtttgcgaacaagtagttcatatacaaggagaaaatgggaagatgatcttaaaaaaaatagctcagttaatgaaggatcarcgtatcataaaaggtaataatactattcttaagcggtttttatgtattcatttataaaaatatgaggcaatttgtttggagccctcagtttaacatcattttaaacaaatatgtgtttttattaaatrcgagtttttgttgtttaaaacttactctaaacacagkatatatatttaaagataggtgataatttgttatgcctattatataattaagcttcaaatattatgaaatgttttttggattgttacatatttaaaaggaactcctttagaaggaactccttgactagaacaacttaaacaggccagtgtcttaatggatctagttgtcattgttgatctggaaagatttggcttgccctagaactcagagctatggaaatgccttcagttggaatgttggtagtatcatattgaagaggaaaaaaaagccctataaacaatttctttactaaaagcaaccaaaaagaataagatgtgaacaagtatcatgtaggcattggttacttccgaggtatctgacccattgctgaaataatttccttcaaaaaaatgtcaacgtcttgttttccctgggtaatacaaaaccaaagtgtgtttttcaggctcagcctggcatgaccatatggtgtggaatagtttcaaaaatatgaaatatcagatcatctttgtcttgttgagaaagttgggaggaggcactaaaatgatacactaccgaattaagtgaaatcttctaaactctagcaagttgtagatgcaactcttggtgctggagctggtggtgtatttaggaacacagtttttaaattttttttctagccttgtaatttatataatgtatagacattaactatagaatacacatacaaacacatcctatatagatatgactcttttgtttagttgctcctttggtagaagacaagatgatttgattagttctagtgttccaagcaccacatcaacaccaacagttacctctgcagctgggcttcagaaaagcctgctttccagcacaagcactactacaaagattacaacgggttcttcctcagcaggcacacaaagcaggtaagtcacagatacattttgtgctcaggtctactgtgtgcttatgtatgtgcatgcgtttttgtttagaagattgtggggctctggattttttcatttatcttgttaaatttatttgcagacaaaaattggttccaaaatgaggcaattatgcatgtctgggggaaattttaagttcctgaactatgaactttccttgaattagactgcttaaaatgtaaatttctctctttgacaactctgggtgagctttttggttcataatttaaggatgtctcaccttgcgttttaaaaaaatccatccctgtagtcatgtgttttcagctgctagaaagtgctttcattgtttagctgttttccttttctcttttttgtgttgctgcttatgatgctatagtacctcaaatcgtttgtgggctgaggatagtactgagaaagaaaaggacagtgttcctacggcagtgaccattcctgttgctccaactgttgtaaatgctgcagcttctaccacaaccctgactacaactactgctggcactgtctcctccacaacagaggtcagggagagacgcaggtgtgtaaaggtcataacagtactgctgatatatcttgcccagtgatgaaagttgttttttgttttaaaaaagatcttgtgaggttgatggccatctctccagtagactaataaatgaaataccctgtcagctcagaactatgtaaatttatacaactagcaattatttatatttaggctttgcgactcacctctgacagaattaatgtttttttgtttaaagtcagtgagcaagacagttgttttcttaaacattttagtttctaaggtggtttatttcaaaaaaaattttttgatgaagaactgaaaacaccacacacttagggaaaattagatgcaacatgacaaaaacaggttttatcattcttctcattgtttcctcccattattaagaaatttgaaggatgttgaactgttttgttcctgttgatttggagaatttcttctcttggtaaggaaagacttctgtgcataagtgtaagccaaataattttgagtatgttgaatacattcatttaattttatctctgatacatagaaagcacttattcagattttttcaaagagtctgaatttattttgtgtgcttaaatatttttaaaagattgctcacttctttctgttgctgcctactggcatggaatcatagatgtacaaaggagcttactaactatcttttgggatttccttgctttaccgaaggaaactgagacccagagataatatgtgactattttacttttgtatgctttattggtgtgagggctgaggctagccccaagattgcaggaaaagtagttcagttctttctgctatattatgcatagtccctagctttttttttcctcttgaaaaaaaataaaaccttaggaaaccaaatgtgagctttatttttatattttattcttgcaaaattaaatgaactatgtaactaatttttttttttactaaaatactgaccagattaactttgttttatttctgtcacgtagtacttacatacagagttctttttctctgttgcctactgaagtgcctggcctgtagtagtaatggcctcacagtaatatttgtgtttgaatatatgaaaagtaataagttagtgttaacttttttttctatcattgcatctttagtttttgcctatatttaggttttgtttctatttctatggtgaaatttagtggtacttttataatgccactgcaagtggttagtattttgtgatttgagtaccagtataggtcatattatattttaattatcttcccctttttcctataaacttaagtcagttttaggttgttgtagtgcttctcagtaagaccacagagccaacagaaattagtatccatcatttaatcaaacttaaataagtttgagggctttgctttttttggtggtggggttgggaggggttattgaaaggaagaaggatcagaagttcttggtttcttactccttactctgccttgattcttaaggttagaattatctttgagtcagaaactcttctgttaaatgaggtgtttgatttatattatttttaacttctagaatcttttctatctctagcatagagattcagtgcttttgaaaatttctccagtgacaaaacctaataaatgtctccccagaatcatcagttgtttcagaacaaattatgattcttaacccacagattgtttattctgctaaagagaattgagttttgacttttagaattagtcctaattagttttaatggaagacattgaagattgaaaattaaacgcttggatatatttttaaacaaacagattctaattgcataagaaaaaaatgtggcaacattttttctcgtctatattatagaggttttttgtttgtcttaaccttgtttcaatgatgtttgcagtgatattgtttgtgttttgttccatgtgaaataattgtttgcaatcttgaatacattgttggcctcttctctttgtcttttatttaaatttcgtcagtggttctgaaatgtatatgatttaaaatttgcctaaaaaatgtatatatgttgatttgagaatatactgtggctaaaacaaaaaaagtcaacacaggtataccctttgggttgctcagaaaatggtaagcatctaaggaataaaattatataccctatatagttctaagaaagagatgcagtaggtcagtgtgatacagcaatgataaaggcaactatggggtttggtgggtatattctaccatcttttaatgatcagctctttgcaattaaaagtacataaaatatataaattatttttcttctctatgtcgtattcttagaggtctcctctagataggtaccccaaaggaggagaaaggaactgaatattaggtggtaattatcaaataaaggaaatgtgtttatattacaaattgataagctatatttttatgctaatttgggatgaatgtcatatggaaaattaaaattatctgcaggtgcagattttatgtatttcagttagtaacttttatccccctaaccttcatatgtgaaaccaggtatgatagatttattgactttcatggcaatttgaaactattgaaaaggaatccaggctcatagggagagagtgtagtggttgatagtactatttgccatggtactaaaaaagagccaagtgtcaatgcaagtttctctgttatacactaaatatgaaacatttcactgtagtcaaatttgacagtagttcacgttcatatttagtttcagagcagctcatgaaatgctaaagtgatagcatgcaccctatctgtcttgctatgaactttttttttccaagacaggatctctgtcacccaggctgtagtgtggtggtgtgatgatagcttctgcagccatgacctcctgggctcaagcgatcctctcacctcagcctcctgagtagctaggactacaggtgtgccatcacacccagctaattttttaaatttttgtagagatggagtcttgctatgttgcctaggctggtctcaaactcctggccacaagcagtcttcccaccttgacctcccagcgtgctggaatacaggcatgagcaactgtacccagcctgctataagctttgtttaaccagattaacgatcacatttaggtttcatctccttttattttttcttctcttcctttggtagaagtccaaaaagtaataacttgcatagggccagtaggtacataaattaaatgaatgaatggaaaaaatagccattggacattttccaggctgatgttcttaggagcacttttctatatttactgaatatgccacaaaatgggtcaggggtggaggattctctatttaaatggtcttgggaagtactgagttaagccaagttaatataggttatatctctgattgtatcacagacctttcaatattttattgtgattttcctagagaaggttagaatgtatagcatttccctaatttatgcaatcattttctataacaagcccctcttatatcccagaattaatgtttcttaaattttaataacaagattattagttattctcttattccttttgaattacttgtcccaggaaactcactataataattataaaaacatagtatctgttatatctaaataaaattaaagtcaaagtataatagtgatggaattttcatcttaatataagtatgttggatgtcccattcaagtaaaactccctcttgtaaatttcttgacttagctacaaatgtaattatgtggaaacagcaagaagaaccagttttctgaactaattttaagcaataagtaagagttaattgatgaaattgaggcaactaagatcttgcgtgagaaattacctggtcatcttagrgttaattgtctaaggaggtgaatgctaagaatagtgtcatatattctagttttagagaaacagattccaaaaatttcagggttgtagaaagaaatatgatttccttatatatataaaaagaatgagggctctctaaaaggagttttgaaaaaatggtagatgattctaaggatgtttgaagatatgctatactcgctgaactgagagctttaaaggacacagagaaaaggcataaaactgacagtaaattcagaggtttgttatgattgtatgaatagtgttaggctaaaaaaatgaattacaaattgagaagaatgttaaagctaacaaaagaaagaggcttttttttttttttttttttttttttttttttttttttttgagacagagttttgctctagttgcccaggctggagtgcaatggcgcaatctcagctcactgcaatctccacctcccaggttcaagcagttctcctgcctcagcctcctgagtagctaggattacaggcatgcgccaccacgcccggctaattttgtatttttaatagagatggggtttctccatgttggtcaggctggtctcaaactcctgacctcaggtgatccgcctgcctcggcctcccaaactactgggattacaggcatgagccaccgcgcccagccaagaaagagccttttttaaaagtagcatttgagctgggcacagtggctcatgcctgtaatcccagcactttgggaggctgaggtgggcggatcacgaggtcagaagatcaagaccatcctggctaacagggtgaaaccccgtctctactaaaaatacaaaaaattagccaggcgtggtggcagacgcctgtagtctcaactactcgggaggctgaggcaggagaatggtgtgaacccaggaggcaaagcttgcagtgagccaagatcgcgccactgcactctagcctgggcgacagagcgagactccgtttcaaaaaaaaaaaaaaaaaagtagcatttgaataaagaaaactcactagatcattgcctggggttttgagagggagatacatggagtaaacttaataaatttaaacagcatagaagatagagatacagttgacccttgaacaatgcaagggttaggggtgctgactccctgtgcagtcaaaaatttgcgtaaaacttttgagtccccctaatctaaattaatagcctaccattgactgccagccttaccaataacataagcagttgattagcacatatattgtatgttacatatattatgtactgtattcttactataaagctagctagagaaaagaatgttattaagataatcataaggaagaaaattgtatttactactcattaagtggaagtgggycatcataaaggtcagaattctcttcgtcttcacactgaggaggaagaggagggattggtcttgctatctcagaggtggtggaggtggaaggaggcagaagaggcaggcacacttggtgtaactttcatataagtggacctgcacagttcaaacttgtgttgttcagcagtcaactgtactctggttctataagtgttctctgagaaatgtgagctaggtggtgtaatttgatgrarcgttaatgattgaacttcccaagaaatattgattatcagaggaaagtctttatgttgtgttgcagggctctgtcatatctttgcttgtttgactctttaattatttaacttttttttttgagtctcaattctgtcacccacgctgcggggtggtacaatctcagctcactgcagccttgatctccaggctcaggtgatcctctcatctcagcctcccgagtaactgggagtacaggcatgtgccacatgcctggctaatttttctatttttttgtagcgacaggtttcctcatgtttcccaggctgggctcgaattcctgggctcaagcaatcagcctgcttcagccttccaatgtgctggaattacaggcatgacccaccacacccagccctacttaacttttgacacagattacttgctattgaaaaggtgcataccccgtgacaagaggaaacataggcttaaatttataagaagaaatttagtgaggataaatgccaagtcctgttctttatatcagaaaatcagttacttagragtaacatgctgatttaaaagctgtttatatataaaaaaacactggaattttttagagcactcaaaagtatgaacaataatatgttgtctgacgtgtcattagtaagagcacactgacaagaatgcagggagaccgggcgcggtggcccacgcctttaatcccaacaccctctgaggtcgagacaggcagatcacttgaggtcaggagttcgagaccagcctggccaacatggatgaaaccccatctccactaaaaataaaaaaattagtcrggcgtggtggtatgtgcaggtagtcccagctactcaggaggctgaggtgagagaatcacttgaacccgggaggcagaggttacagtgagctgagatcgcgccactgcactccagcctgggcgacagagcgagactttgtctcaaaaaaaaacaaaacaaacaaaaaaaagatttagaaaggaatttgatacctgtcttccaatatttgaaaatactgtaggtagagaataatttaaaaccccttttagtaggtcattaagtaagatgcttagattatcacttttgggggatgttttcagggctggagaagaggaccttcctcagttaaaaacagacaaaaaatttactccttatccattctgcttaattgggctaaatgaaatccttctatttttttcaatagagctaaaatttttaatcttcagttctctaaatcctttttaaaaatgtggttccatcttaaaattaaattacattattttaaaaaatgtagttaggaagttaaaatgtgatgttaaaatataattattaaaatataactagttccaatctaaaaagaaattataagattgcattattgaatttcaaagaccattttctgaagacttttccttaaaacttactaagatattaaacctgtatgttttattcatatgcattgatagatatttacattcacaggtattgtatttacaactaacgatttttcaatttactactgtagatcatacctcactcctgttagggatgaagagtctgaatcccaaagaaaagcaagatctagacaagcaagacaatctagaagatcaacacaggtatagttaatgtaattaatatataaaacttacataagtagcatataaaatatatatacacacactgacataaaacaagttacctttctctttttcactttgttgtgaaaatattgatgtcagtatatagtgtgagtaaatccttaaaaggtaaaggttgctgtagttattctagtaattctagtgtgaataaatccttaaaaggtaaaggttgctcatagccttttgtatggttacactgctactattgtatttcatctaattagcatatgcctttgtgtctttttgagtattttttaaatccttattcctaatacagtgtctggcccagagtatttggttagaataaattaatcatatgatgtctaataagtatttaaaagttctatgaatatttggaaatcgggggcagagaataggctcgtatattaggtataaacaactaatatgcaagtatgaaraaaatgtcattcaggctggcgatctccttacctccgttttgccattctgattatgctgtatatgatgtatacttttgtgtctttctgctttcccacagttaagaagctccacagtccagattcagctgtctatccttaccattacttagctttcaagctgaactatttgctagggccttaatatactttttctgtctttatacttttcacttcttgaaatctaacctgttcttcaaggtcaaatcttgaaaaatttatcgaaatctcttttaagccttaacaatcatcatgcatgtgtatatagatacatatacacacatatatatacacacacacagacatatatataaacataaatatttataatatacaaacagtacagatactggctattcttctctagtttgaacttgtggggaacatttatatgcatagagtatccagtacctatcgttgtgcttgctaatggtgattcttcatagaatgaatgtaacttgctgtttccatttgcaaaccaattttaaacatgcatatttgacttttaatgcatttgtatgtaatatatctatttctaaaatattccttgaaacaagctttaatgcatctcataattatattgatctttttgtgtgtgcagggagtgacattaactgatcttcaagaagctgagaaaacaataggaagaagtcgttctacccgaaccagagaacaagaaaatgaagaaaaagaaaaagaggaaaaagagaaacaagataaagagaaacaagaagaaaagaaggagtcagaaacatctagagaagatgaatataaacaaaagtactccagaacgtatgatgaggtaacagtatatcaaaagcacatttaagtcaaatggtatgaatagtccttatgatccttaacatacaagagatttatataccaacaaaccatatgcaaaatactgtaaaggattttagctggaaatttgaattactttggcgtgattagtatactactttttctttgaaatgaatttttaagtatttttatgtttttaattgtgtttaatgtttcaaatgggttttgatcttaatgtttcacagacttaccagcgttataggccagtatcaacttcaagttcaaccactccatcctcttcactttctactatgagcagttcactstatgcttcaagtcaactaaacaggccaaatagtcttgtaggcataacttctgcttactccagaggaataacaaaagaaaatgaaagaggtaagaataccaaattttgaaaacactttgctttcttcatataatcctttggattagggtttcctaaataataattcaacagtaaaggaacagcatcctaacttgygattcatcgaacctaaacagaaagaatatgaaggttgagaatgagaaaagtagaaaacagaaatagaatatggcctgctgttgatactaatatttttataacctaatacttcacaaaaatcttcatgtccacctacaacgaaaagttaatatcgaactggtgggtgactatttctagaagcagtttactagtgtagtacttctcagatgctttaagctatttcttgcctactgtgtagatcatatcatttaaatgtttttttgtgaaattgttgtaaactaaaattactaactacatgtaatgctctcactaaaacacatttttatgcttatttcttaaaaaatacatttctttctcaactatatattggcatattgatactcattaccatttcctattattttatataaactttctatttaaattctgagtaattcctactttaaatcagatataagtactaaatataggcatttcatattttaaagcctaaatcttacagtattagtcatgataatatcagtagtaatgtagaataaacagcagaaaataaagttttttcccaatttccagctatatattttctcatgttgatcattgagatgtttcagttctttaaacttctatgtgtgaggcctgcattgtgtttgtaaaaatgttgaaccaacatttaaaattagagatactcacttcaaacttcagatttttgccatttcttgaaaagttggctgacctggcaacactggatctgaattctcacataccaacaattggctggagctaagtagtagcagctgcctaccttccatccccctagatagtcccctggcccattttacccattgtttttacaattaccttgcaaaatattgtcaagatatattgctatattgtggttcattgcaatccttaacagagggagaaaaaagagaagaggagaaagaaggagaagataaatcacaacctaaatcaatcagagaacgacgacgaccaagagagaaaagaagatctacaggagtttcattttggacacaagatgtgagaacctattaaaatacattatttgatagtattcttgatagtattcttaatgtgtccaaaaatacatactaataatttcttatatgccttagatttcatattccttaaatcatcactgtgttttctgagttgttaaataagaaaaattatttttaaggatagttaactacttagattgttggtactacttaaaaggagtggttctgacctaattatggaatagaaataataatgtctgaagctcagagtgcatgtattgattattttataataggtaaactgcttcttgtaaaaacatcttttaagaatttctaaggagtctatttaatttcattttcataaatatcattataagatctacattacagattacttccatctcaaagcatgctaaatagacacagtgctttgcttatcaaattacaacagtcttgtaaaaattagtgttttcctggtccttgattgtaggcctgacattgctattcattgattttgtttccattttctaaaaaataaaccttttattgaagtatggcatgtttagaaacataattcatacatgtatagcttaatrgattagcacaataggagcatatctatgtaatcaccactcagaatgatgaataaaaacagcagtgtagattgcccccatgttctccctctcaatccctatcatcctcattttcaaagtcagctagtatcctgatttctaacaccgtagttaactatgcctgtttttgaagagcatatgactagaactataaattttataactgttatgtttataagatatatctatgctattttatgtagcagtacatttacttctattgttataaaaatattttttaaagaaaatttctaactattctttcactgaaagaacatggaatcatctgtcttcctgttaaactgacccatctctcactatatgttcctctttatctctaatattatatctgaccttaaattctgcttttttgaaaagcttccttttgattatctttgtataatatatcttttctgttattttcaatttatttgtgttttttttaataaacaacatatttaggtcaacttttttctgaacttttttttaattgcagtgtttcagtccattttaattttacttaattactaattacttaattacatgaaacaaataacattgtcatttgcagtttaaaatatataaagagctaaggcatatgaaaacaatagcacaaaaatatgggaaagtattaaatggagttgaagagttttagtatcttcgcattgtccatgctgtggacaaaatatatattcaacttgatgaatcaagagtgcatatgtctatttaaaaaagtttaaaaagagagggaaaatcatacataaatgacaaagaagggaagaacagatggggaaatcggaaaatagttttctatttttcttttgatttttaatatagaaaagttaaacatatactttatagaagtaacataatagtataatgagccctacccccagtattcattttttcagctaaattcccactccatctcccaactcccatattatttagaagaaaatcctagacatctcattctatctacaaatgtctcartgtatattctgagagagaaggactcccaaaaataattttaaaaaataaattttgaaattattactaaaatttcctaaaatataaattggcaatctgtttttagagtgatgaaaatgaacaagaacaacaatcagacacagaagagggatccaataagaaagaaactcaggtaaataccattactttttgtattgagaagtattcatattttttaataattacttttaaattgcgttttattatgtttattcatgcaaagcagttattgcatactctacctacatgctgggtatgcaatatcagtgtttgcctggggatcaggattaaaaggactgggaagggtcacaaaataatgttttggaggtgatgaaaatgttctgagtcttgatcctagcagtggttttatggatatacagaactgccaaaactcaccaaattgtacactctaagtggatgtaatttaatgtatgtcatttaaccttcggagttaaaagaaaaagcaaaaaaagaaatagtacccttggccaaaggaaaatatctaaaggataatcagaagtagtggaaatccagaagtagtaggctcagattttatttctgtagattttatttcaaagttatgttctggagaatataggcatcttttaactttcttttacatatatttagaaatttagagtctccaacagatttttatgttgagaatctaaaagacatttttttcctctcagtactgatgaaggacctaaagcaagtttgaatgacaaggctgcacagccagcaagggttgaaagttcccccgacccccttcctgattgtttggctgtgtagaaagctaaaaaatattcaaaatatttctgttcatatgaggatagagctgaacaacacgagtctaaacctggcactgtctagcatgaaatagcattctggtcatattaatattattttcttcattttgagttgaagttccttaatagagctattacatttctttttagtcagcaaggatctacagtaatgtgaacaaaagttggttacctgtgctaggtgacggtgaacattattttagggccaagtttgcctattttgaccccacaattttattttatctttaggtggccagacaatgaggagtgaattggttctgaggttaaattatttgcaggcctaaagctttaactgttacctaaattttttggttatcagttatcagaactccccaatttacctatgtcccttctttattaaacaagaggggaggaaattagtaaaccatccccatctgacacctctcattgccttatcacgcagactccagcccccaccaggctggagtggaagggagattgtctrgcttttaaagttgtaattttgaagcatattgatgtatactgtattttaagttttactgttaaaatcatatgagatacgttaagatgaagaggaacattgtttctaagacgaaaagtttttttattttcaatttaagtagtttttgtttactttagattgtttagagttcttttaaagtaatgaataacatataaataaatataacaaatataaataacaatatgaaacctaagtcaaactggattaaacaaagaaaatgtattgtactccagttatattctgcagtcctttgtgtcagcttcatcctcaggctgatgtacctcatagggataggattatagttggcttaggatagacagggcctatcactgaactgttgcagccattttgctaccarcatgggccatgtgtcatctcacctaaacctagtaactgctataccatgagaaaaaggaagaatggatgtagataaataaataaggtgcaatgtatgtgcatagatcaatattttctatattcacatagatattatgtgtccagaaaaggttggttagataacagtggttatctagagaatggagggatgaggaattacacaggaactttgtataccattatgtgaactttacaataccatagtcagaaagatatttctgaatatctttctatatattttaatcttttttatctttaaaaagatatttttactttggaaaattaatcttaaaatttggggaacaagggcrttatgctaaatgaaataagcaagttacaaaaagacaagaactgtgtgattccacttattttatttgggtatcatagaaacagaaagtagaacctttgttgccagagctaggaagaggaggacaaaggaagttgttcattggatatagagttttatttttgcaagatgaaaaagttctagcgatcttttgcacaacaatatgaatataattaaaaatactgaactatatactctaaaaaatggtttacatggtaaattttatattacgtggtttttaccacaattcttaaaagtttttaaataatgctaggccgggcatggtggctcacacctataagcccaacactctgggaggctgaggtgggaggactgcttgagcccaggagttcaagaccaacctgggcaacatagggagacactgtctccacagtaaatttaagaaattagtcggatgtgatggtgcatgcctgtagtcccagctaactaggaggctgaggcagaaggatcagttgggccaggaggtcgaggctgtagtgagctgtgatcatatcactgcactccagcctgggaaacagagcgacacctcatctcaaaaatagtaataataatcagtgataacaccatgatttttaaagataatggaatttgagtgatttctcactagactttttattgttaaaatttaaatcagtgaatgtaagtgcagactataaggtaagatgtattatttttgtttgatatgtagacattttagttcaggaatggccattttactgaatttgattatcttgaaaattgaaatttattctttaaaattgttagttgttgttaaaccaaagaataaatcaataaaagaaaacattaccttaaaaaacaatgtaaggagcaaagttaaaattggttttgcagaggaaatttacagactttagtaaaacatttttagtccaaaatagactttaaacaatcccaaaagtaacctagtaattttacagtatctccaaagataaatataatgggaaatcactaatatttaaattaagaagtttaacaaaccattctgaataaattatagaatcagtgagtatttcaatagaaaaagaaaaggctaaatttgactactgaaaaagactactttggcccccagtaagactgttttaccttattaatcatttcacgatttagataagactttctggaacttcagtgtagcataccacttgcttgagaaaattaaatttcctgtcacctaattgctgaccttaaaggtatatagctagatttcgagaaagtaaattttaaacaaaatatgtatatactgttatgcataaagaaccttaggtgttcattcgtttgcttctattgatactacattaaatttacttataatcataggttaatagtttaatgaaagcataaaaatttagtatgcctatgtttttctctttctttccagacggattccatttctaggtatgttttatttattttttaactgacatttttttcttatttttatctttgttaaaaatgtgttgctaggaatttatggattttgtaagtttatagaattatttgataataaaaaacaaattttgatggccttatcattgttactagctttctttgttaaaggctttacttcaagatcactagtcagagcaagtaagatttttccccaaatctctacaacaaaggtattccaaagtttcttaagttagttcaactatctcaytattaacatcagggactgataaaacccacacttggccagaaatgtatttgattaagtattcagaatcttctcttgtagccctgctttagacaaaagagaaccagtgaagacacttttaaaaaagtgtcatctagctcaacccttaatcctagcacttggggaggctgaggcaggagcatcacttgagtccaggagttgaagaccagcatggacaacatcaagactccatctctaccaaaaaaaaaaaaaatttcttaattatccaggcataactgtatgctcctctatttctagctgctggggaggctgagtcagaaggatcacttgagctcccaggagctcaaggttatagtgagctatggttgtgccactgcactcctcactggatacagtgagaccctgtgtctttaaaaaaaaaaaaaaaaagtgtcacctaattcaaaattatccatcttttcagagaacctccactatatccttgattttgatctccattccatttctcttatcattgttaaccacagccctgtaagaccagtaataaatttctgtctactgatgattctattgaattgaaatgcagagccaatggcatctttcagaaaaggtaacctgaatttcagaaccagataataagagaattctcctttaccagtaagatatgtttttcctgcttaggacaaacccattacttgtcactttggatatactttatttcatcaaatctaagacattactcattttaaaacaccattgtgttacctactactgaaaaaaaggaaaggtgctaccarttaaactataatgcatcatcaattgtaagccattttctggttttggaaatattaaaatgtgggaggaartgtacaatttaaaatattaatcattatatgaaaccagttttggcttttaaacatggaaattttgactctcttcctcaattaatggaaattagtagtattaaaaaaataggctgggtgcagtggctcattcctgtagtctcccagcactttgggaggctgaggcatgtgaattgcttgagcccaggagttcaagaccagcctgggcaacatggtgaaaccccatccctaccaaaagtacagaattaggcatggtggcatatgcctgtagtcccagcaacccaggaggctgaggtagaagaatcacttgagcccgagaagtcgagtctgcagtgacctgagatcatgccactgcactccaagctgggcagcagagtgagaccctatctaaaaaaataaaataacttcccacttattatatatcacaaaaattaatcagataacagagggagactgtgacctactcttttgaactgtcaagttatatgtgtactaggatgtatgttgttataattgtaaaagcctataacaaggttttttatttaaattaatcttttgaagatatgaaaccagttctacatcagctggtgatcgatatgattccttgctgggtcgctctggatcatacagttacttagaagaaagaaaaccttacagcagcaggctagaaaaggatgactcaactgactttaaaaaggtacttgggttatttagttatatttaataaaaagttatcttttatgttgagatactcattcaaatattattttaaaaactcataatgaaatgagtattttgaaataacttattttcagttttcggcaagtgatggttaagtagaatgtaaatagctgtttgtttattaaagggaagagaaagtcatccaagatgattttacatttaagtatctcaagtcattgctatgattgagctggaaaggagcgttcaataaatgggtgcacacaaatgtatacacactttgtttcttgttactaggaagcagccaaacagagaagatggcttttcctaagataatatattggtagtttttcataggtaactgaaaaacttggggcagctcaagtgctattaaggattgaagtaattaatgaataaatcgcagaaactatatcttcttattttgtgcttatagtaaacataaagtctgttggagaaggagaaagcttatggcatttgtacatgtccccagttatctggcagctatttgaattacatacttttttaaaagccaagttaggggaacgggtgagggagagaatcattttacattatgagtaagattcatcatttattcaataaagaactgaactatgctaagtagagagattctactcatgggtaaatggagatgaagatactatcttgctcttgtgggcattttccatgtagtggagagagaccttattacacagtcatactaatgactgtataataaataatggagacagttaacttgaagtagaaaagcaattttataaaagtatataacaaaagaaagtagattgatttccttggctgggtgcagtggctcacgcctgtaatcccagcactttgggaggctgtggcaggccatcacctgaggtcgggagttcgagaccagcctgaccaacatgaagaaacctcgtctctaccaaaaatacaaaattaccccaggtgtggtrgcgcatgcctataatcccagctactcgggaggctgaggcaggagaatcacatgaacccaggaggcagaggttgcagtgagctgagaacacgccattgcactccagcctgggcaacaagaggaaaactgttatctcaaaaaaaaagaaagtggattgatttccaaaggaagtgtggtttcagccaaaaacggaaggattactaatagttaacgggcaaaaatgggtgagaaaattattccaaatagagtggaattacaagcacatagacctggtggggggagaatacatgatgcattggaataaataaattttaattatagctagtagagtggaagaaatattcatttgaggcagcagttgtataggctgagaccagatcatgcagtgccttataggccattgtaagatttttcgtatgctaagaacactgggaagccattcaagagtttttaatttgtgggtgraaatggaatggttggcctatgaaaattatgagattttcattttgaaaagttaattttagctcctatatataaaacagattagagggtgatcagggaattagaatagtttagataagagatgatcatagccagaattatggtggaagtagtaaagcagggataaggaagaaggagtgttaagaaagacgaaaagcattagaaaaggggaaggtcttggattttatcctggatttgaaatatttcaggaaatacrtcatttgccttttaactttactataagcaatgtagaagtataatgataaatacagctggtactccgtctcatttttgggaatgcaagagagagtgatgggcagaaaatctcacggactccaaataaagatcacagtgactccttagccctagctgcagttgctgtgcaggtatgtggtccctctttatcagataactgaatcttttttaagataacctgaaaagtccaatttttctgtgaagtcttgatttttgaatactggaactaattttaagactttatatgggacaaacacacttgcataacgaacagtctctgctttgcaaccatgaaggattttttaaatgtatcctttatagctcatatgctacattaagctgttttaatattgcaaagtaatcaatgagaaattttaaagtaataggagagcagaaaagtaatttgttcttttaccctaatttttatagctttatgaacaaattctagctgaaaatgaaaagctgaaggcacagctacatgatacaaatatggaactaacagatcttaaattacagttggaaaaggccacccaggtttgtacccttttctttttgttactctcaaggtaatggttgtgatttatcccatctaaaaatggtattaaaattttttctaatactctaaatagaagtttgataattggtaatagaagataatgctgtttatggatgatttactttttctggagtaaatttaaaaaatagtcatagtcaaaagtcaacttataaaaagccttttaataccaatgttgtggtatgtcaaggttttaaatgtttatttccagaataccaaatgtagcaagtcattaaaacattaaaagcatctatacagaatcatcttatagccatataaaaaattttataatagtttttgtttactacaaatattttatgtttgttcaagtaaagsttattttatattatagtgctggaagaagataattttaatcataactccttttgtaagttccttctatgcagcagtctagagaagataaatttggacaataaaattgggatggccaagcaaaactcacaaccttgtacatatgatctagcaattgtttcccaagccacttttccatttccatggaacattagttctgggagacaggaataggtacatcttctcctcatttccctcctttcaaaaaacaaaaaaaaagctttgtgatcaaagaaactagggaaatactacatattttacatgttaaagactttacagggtctatttatatgctaaaggctctaaggcatcctgtaatttttaagaaaacaaatgtgttcaattttaacctgggactttctagcataaacgtatttctgcagcacaactcttagaatccagctgaaagcatggatctaaaaacagcatatccagatctgtgaatgggactatgtactttttttggtcagtctttacactcatctttttcttaatttttaaaaattaattctaaaaaaacaacaacaaaacaaaaaccaaaaaagttcattctgtttgttgaacttaaacttgttaccagatcctttttttaaccattgttgtgttgtaaagcgattgtctgtgcacggtagctactatgccaaacttctagggttcaggctaacctcaccactcctcaaattccttcatgttaatggaggtttttgtaaagataaacagaaaagtaaaacagaacaagaataggtttcatagtgagatgtcataaaaacttacagtgtcatacacattaaaactactacttatatttaggcttcatggtaaactggaatgtttagcagaaaagttaacagtaaaaatacctaaactgatgttgctgttttttaatcagtgaacttgtcatcatccttcaggttgcattagtatcttagtgagcctgtatacataaaaatataatgagttctctgagcatagcttcagctctagggatttcattataatgttctaagtaaagatgtccactgcagccaggcgcggtggctcacgcctgtaattccagcactttgggagtccaaggtgggcggatcacctgaggtcacgagctcgagaccagcctggccaacatagtgaaacctcatctctactaaaaatacagaaaaaatagctgggtgtggtggtgggcgcctgtagtcccagctacttgggagctgaggcaggagaattgcttgaacccgggaggtggaggttgcagtaagccaagatcgtgccactgcaactccagcctgggtgacagagcaagactccatctcaaataaataaataaataaatatccactgctccctactatagtgttctgtcatggtgactcagctcatctgtgtctccgctacttaatgccttctctgtgttctgctctgctgcctacttcattgtcatgtaattcttcctgtatgtctctcagtcaaaccctgcaagagaggggaattgatagaattagcctgttactacccagtatggagcagcctgttttgttagtgaccatttcataggtcactggacagaaagttgcctgtgggtcaggtaccaatttctgttacctggcaagagaagtaggattaaaaaatatcccagcttctgccttggcaggtactctgagtatcgcatccagtatgctgagttaataatgagaagtataattcataaaagtaaaactgataagcattaaagtaactttaatcaggggttcaactttcaggtatttatcctgaatctactgtgaacttttccaccttttttttttggcattgattgacttcataactattcacaaatacacaaatatttgcgtcagatatttgccacaaatagcagtggcagttttgatagttgcatgaaattaatcttgaagtttaggtctgtttgatactatttagccaagagactctggaatccttgactcttgccctagcccaggtaccctccttcccatatcatctccaaggaagggaaaaaatatgccagcttaccagaaccagtttgctgaataccactttgccaaatgaccatttcaccagatttaaccattgtgattttaacagctttaactggaatgtttaacaagaaagttaactaagtaaaaatactatctaaactgatgttaatgttttctaatcaatgaaattggcaaaccacatataattgctaaaatcttcccatatgaaaaaatctccagtgaaatgctatttttccatgttttgttaatttacatgtgttgttattattttggctatttgatttttttcaggtgcttttgaatgttatttaaaatttttttggtcttgtaaagagtttctatgatttatttttaaatcctcacgtggtgtatcagcctttgttttatatttctagcaattaaatgtttaaattcaaaaccaaaaataaatgagaattaactaarcagtcttattcatatttgaattattattttttttaatggatacagcatctcgctgtgtcactcaagctggagtgcagtggtacagtcagggctcactgcagcctcaatatccctggctcaagcaatcatcccaccttagcctcccaggtagttaggactacaggcaatgccaccacacctgtttaattttcctttttttttttttttttttggtagagacggggtttcaccgtgttgcccaggctggtcttgaactcctgggctcaagtgatctgcccatctcagcctcacaaagtgttagaattacaggtgtaagccactacacccagcctcatatttgaaattctgaactgaatttctcacaagaaccaattggaatattgacttttatgtttccagaaagagtaagcacaaaagcttgaagccattttaaaataagagaaaaagtaagaaaacctagccatgattagttctttaaatgttacacaccataaccgtaaaaattgtgaaagagggatcaaaaagtgacttggttataagtcctagagatactaaaacatgaatactgaaagggttggcataaaagaaaattatgtaaagaaatatttttaaaattaccacatttaacagtgaaattgtgtttaatcaatatgtttttaaagcatattttgtggttagcactcataaagcattcttgttaaagtggtcaaaaaccatttttggtaaattagtaaaattggttattcagcaagttggcttttgaggaattcattttcagcaaattgaccaggaattccaagggagatgtttgtacagagatcaatgtaaataaaatctaagatgccactgtttttttctttttttttctttttttgttttgttcttaaactgtgcctgtgcttaatgtccagagctctccagtacaggatacaacaggtaggctaaaacccaaggtgcttttccatcccttaaagccaagcttatatatcaggatttcatcagctttgagctggtcagatagtacaggaagtggaaaaaatgaaaggcctgagctcaccagcagaagaaagctgtacagctagaatttcttataagtgaaagtggatgtgaaccaattgtggagcatggatgattggaaaagaaacctagagtgtgagccaagaccaagatagctgtgggagaagataaaaaggccagtttactggtctggctgcatggatacagagtcattcaacctgctgatgaatatatttcaatcaaggtcctggaatctgaccattctgattagccactcctgatggtgtaggaaaggaaagaatttgagcttcagaaggaaagctacagtttttttttgtttttyttccacatactcactcaccctcacgcccarctaaactatgaaagttcctggggaaaagtgatagagaacataaaatgagagctctggttaccattctatttctaaacattcattgcactctttattattttaatacaaatcctgttttctctttgctttactyacgaacctgtgttttactccacttgaatattgtgatttaatacctattaaaagagaattactgtggtcacccctgaacttttttgcacttatctcttttataatttcttactttgttgcagagacaagaaagatttgctgatagatcactgttggaaatggaaaaaagggtaagtgtcccacttattaaataattatttttttctttcttgttttaggtaaacaatggtaggttttttgtttttattttgttattatggatgacagttttaattagtttaaatatttattgagttaatgtattttgcagcaacttctttatagaattctatggggtttctctaggtatgaaatgaccttgttaaataaaatttaatttaccacataattcttttaatgaatttaaaaaaactgtcttgccttgattctgaaatgtactatacacattttgatagtgaatttgatatttttgaaatgccgtttatctcttatggcctgtacctaaaacgttttaatcataaatacatttattttaattctttataaacctaaaatactttcgttcttgaaataaagtttctaaatctggaacatcaaattttcaaattctttttaaagttaatttaataattttttaaaattttgagtttaaatatttaacttaagtaggctattttaaacaaaaaaaagattacaagaaaatccttatgccacttgatgtctttctgcaagtttttattgattgtaatacattcacttgtatttctcttcacttattgttgctcaaaggtctaggagtagtcataggaataactgtacaagtttagcctcatcagttgaaaatgtataaatgatccaaaagttaaaggaaaagtgcccaaagattgtttgtagtgtagctgagcagtagctagacttggtagggtttcgaccagagaagaaatgacatgctggtagctatgatcaaagagtaaatacttaggagctattgatataaaaacatttttcttccattctattttaaaataaccaatttgcccttttcaccaaaaaaaagagaaatggttaaaaaaaaagaatataaaaatagtgttataatgtctgtcatttgctagttgtaccttgcaatagctaccattttattatgctttctgcaagttttaaaaattagtgttctgagtcatgttttcaaaatggacataataattgctaaaatattgttttaataaatttaatattattatatcctgttagaatatttaactgttactgaattttatctccaggataggcagaaataataaaatcagttctctgttatactaacggttgagatgaaaggcatggataacaaactgtacttaaagtagtatttatttttcaaatacaatcacaattttaaatatttaatttttcttatgaaagtaatatgtttattacagaaactttaacaaaagaagacaatattaaattatctgtaatctgtcatgcagagatagctgatattttgatactttttttttctaayatacacatgatgcagacacattcatactctgacaagctcacctaacctcctttttctgcttgtcaaatgcagataaattacaaagtagctaatccactctctataatcatggtattaatagtaactgctaacatttattcatcattctctgtatatcaagcaggcacaaaattaaacactttacatgcattttctctaaaccatattttttttccttgtgttttttttttgtttgtttgtctgtttttttaaagagacagaatattgctctgtcacccaggctggagtacagtggcacagtcaccgatcactgcatcctccagttcctgggttcaagcaatcctcctgcatcagcctccagaatagctggcactacaggtgcatgtctccacacccaactatttttttaatttctttttggagacaaggtctcactttgttgccaaggctggtcttgaactcttggctttatgcatcctttcacctaggcctcccaaagtgctgggattacaggcttgagccattgtgcctggccagttatattttttaatgttaatatgtttgtcaaacataagaaatttcatatcattttacagatgtcaatttcattgagctaatagaatcaggcagttgggtgtagttttcttgtcttactttaccactaatttaaaatcttgaagacacctaataaaattgaggctcatagggagattacctctcagaagaaatattctatttctgatattttgcaaagtggtaaagatcaaatatgacactttatgtgctagtattttgagaagtgtgatgatttgtatgaatttgtcatgactgtattatttagtagaagaaagatctatgtattgaaaataatgtttctgtctatacaataatgtttaggcatgccgatgttggaataacatggtacttaaaagacgatcagtaggattctgtctactttttaaaatcacataccctaaaaacattaacatttacagtaaatgtactgcttgactaaatatcagcattatttattaatctgggaaagagtgtcttggaaatagtttcagtgtgattaaactaaatttaaatggtttgtatctgaaaggtgaccggcaagagtcagtatcttctgggcggtatgacctaaccagttttacagctcatcaattactgctgcttgctttttgcataacaccccagaatgcttatcatttaagggagaataaaacagtacactgcaataatgtgttgtgtgttggctttgcctgtcactctttgaaacaagtttaaaataaacgctgcagttgcttttctattacattcactgcattaatgctacacataatgtcaacctaaatacaaagctataaagtcagttggataaataatggctagtacacattgtgagtggaggaaatgagcttctcttacattcctctgaaattgcaaagtacacatattttaggcatgtttgcttcttgcttttctgcttctgtcactgtaatatgattgcatctttgtgtgagttttgtttttcttytctgtacagtcttcagtcttgagtattgattcactstaagttttacatgaactcaaaaagtagtttgaatatgttatgtagcatcttcccagaaagtcaaagctttaaattaagagcttgtactctaaggataaagatcttcatatttatttttgtcaaattttggaaagctctttacatatcactggcatcacatcttttctacactgctcctgattggacctttaattctgaagtatcactatttcacagtatagaagaagacttaagaatataataattatataactaacattggtaccttaaatcgatctaggaacgaagagctctagaaagaagaatatctgaaatggaagaagagctcaaagtaagtaaactatgttacttatgagagagagtgctgtttatgtattaatgtttaaaatactattatagatatggtttacattaattgttctcaaagctgattacccaatttgtgaactgtctatatctggtgcttctctttcttcctgaatccaggttttagtgagccagaagagggtctaaaacccaaatcttaacacctatgaaaagraggagcaaaaataaaataaaaaataaaacccgaattattttgataattaatttgtgtagcacttttgctgttcaggtatagaaaaagttagacaataataataagatgtaggatttattatttattctttatgtttctatatactttcatgttttttggcgagtaagtagtggagggggttactataaaatgttctcctttgaaagtaaaggacattaggggagtgaacaggcagagctgtattttatcaaactccatattacctatagaaataattatgttttgaatgtcttcacaagtagcatagttaattgattacctcttaccacactgtccttcataaaatctttatcacattgtgaattaatgaaccagtgcatagtaagtatrttgtacccayagaattagaagttcaagatttagatatttcattattaaattgtttggtttgttattagaccattattgaatggctttgaagattggagacaaatcttttgtattttgtttgcttatgtattacttagtttgaaatagaattttaggaatacagtgtttacctttctgaatctcttgttcctttaagacgtaatatttttaaaaaattacctgtgattacattcttattatactcttttccattttcttattttttattcctatttctttatgttctgattcctgcagaacctgcaccaaataaagcaaattcaatctctgagggagttaaatgagcgactgctgactgagaatagggccttgacaagagtggtagccaagcgctcagggttctataggcaactgcagtctgtgaacctataatttttagtttcatcatttcttcttggtagagccaggcaggtgtttttatattagtaggcgtgttttgtaagagctcacttttacaaattaatgccattgtgtctggagcatatcatataactaattatgcatggcttcttagaatgttagaaattgtcactaattgtatattgcaattgatgagctacattaaaattagggatgattttggaatttaagttaaagacttatctgtacttttgtaaagcttttgcacattttttagctatacagatattttaggacttaaaatatgactattatttacagttctttactagagagaaaaccaacagtatataacattttacatataattaatatattttgaagctgaagattaagcatgcattatgtttttcaaaataatgtcatttgaagtcagaaccacattagtttatatttaagtttatattacaaatattcaaatgaataaacttaatattactatattttatatcttaaagattctgaacacagataagaacatattggttccacgtaaaattaaatcttcttaaagattttgctttacctagttttgcaaatagaagttttacttttatcaagttagataaactaatacattttgaaaactgaggaaagaggactattttggaaagtatggtttagggaccaaaaatatgagctatttcatttcctagtgaaactggcaaagaacatacagttttaatcatccttagtagagtattcagttaacttgtaatattttcaccccttcatcaatttgtctgtaaaacaacagaaaattgagatgtgttgtttgaagatatgaggctatttgcttcaaaattggttatttttgtaatagttggatcatagatacagactttctactttagcttaaacatgatgcactattctaataatagtaattgcttgttaccatttaataagcatctatctgggatcggacattgtttaggcattttaaactgagctactgtaggtgaatcgtttaaggaattttaataatttagaacaagtctaatttcctcaatgttttcctaggtagtttgactttcttgtggaacaatattaagtattatgattttaggtctgacatacataaaagcaaaagtctttggtttaggtgctgacaggaacctcttttaagagcctatcctaacaaaaacaggcttgtcttggctgctggaatgtggtgtgcttgtgagtcataaaatcaagtgatttagtaaatttcaatggaaaatttggagagaataaacctttcattccagcatttatgaaactaattagctttacaaatccaggtgtggtttttttccttcttcctgatacatgttttagatactagaaatatatataactgacaaagcttgatcatgtgttttgtggtgaaaatataacatttattaagaataatgttttatcttttaatattgaaggtaaaacttgatcttcaatttttctctttatagatgttaccagacctaaaagcagacaaccagaggctaaaggatgaaaatggggccttgatcagagttataagcaaactttccaaataaaaaaaaaaaaagcagcaagtaatggaattgcacatattagtaacccagtggaccataattggcagtcactggaagtctgggaagaatccttggagactgtcattttcggatatcctgccaaatgccctcttatctagaatttttgtttcattttgtttaattttctggggtgtttttgttgttgttggtttgttttttgtttttttttttaatcaagaccattgtttcatgttaatgcagctgctgagaagatttttttttaatgactgagaaaacttgtttacagctccagcatataaggaaagtgttcaaggccagatatgcctcagatatttaaccagtaagccttagttgtacataaatacttttgtgtcaacaaaaactttcagctctcacagaagacagttactcaacattttttgatgtgccacagtttcgagtttttcgatatttaaattttttggcttttcatctaagtttgggtttgtattttttccttctaaactcttcatgtggcagagtcttctatgttttcacagctttttcattacagaaaagaacacttgctcttctgtgattattgtcatgtattaggctaatgctgtgttgtctcccacctggaactgaattgcttggtggaacatatgctttcactgtttgtgcaatatgcatttatttcttatatgaatgctttaaagtcatttgaggttagatcttttaattcctattttctgcttcattggtcactttttttttattgtagtataagatgttagattctgtaatcttcacattcattttagcaggtactgagtgatgctgtatatacaaataagtgtattgttttgatttttagaccaccacatggcatgcttgactatttcttatttcaaatgtctgctaatgcagagtaggctactccatgatagtgttaaaaaacaaaatttgctaacaatgtgatataaagactttaaaagttacacattatgtggagccctatctttacaaaagtttcctactgtaaagtgcttttattttcagttttcayttgatagtactcaaccataattaaagttgcataagataattgctttacatttcacatacctatatttatctgagtgctgtctaaaactgttgtgctagccaaagtaatgctatgaaatcatttgcagaattaacccgtgagttaatgttaaatgcactgttattgccatgtgaagaggcatcgactttgataccaccatcatgttcagaccattttatacatttcagtggcctttttttttttttaaggaaaaaaaagcgcaaaaccaagtacatagtgacgatggcttttatttggacaaatagcttttatattttcattaaaccatgcaaaaaatactacatctttctggcacataactgtctccttaaccactgaacagttcagccatttgaataaattgtacattgtaaagcttatagtagctgattgtattattgattgtattgtatactatattaaatgtgaatttgtaccccttcattttaaaaggtcattgtgttctactgcctattttagattactttggggttggggaagggtgttttggtaagcaggattttaagtcctctctctctcgattggttttatgaagatataaggttatgctcttactaccaagctcaggattcttgattttaaaggtacaaggatagttgtgggagttttatttttggttatatttgaactgtatgaatggtaggtctgaatattgagaatttccatggtcttatgtggaggtaaaatatacagataactgatcagtttgagtgactgcaacatgttctggttgcacaacagttaggcatgctatggtttatatttgtgaagtttggatgcctgtgaagaatgattaaatacatgtttctaatattttagtgttttgtatttaggttatttattctttgtatctaaaactgaacagctactgtgctatattgattttattggtagtattgagcagaccttgtttctgcatgaaactagttgcaaaacccactattttggaaataaaaatgtattttgacatatacaaataaaatgaataaaactattttaaatgtgtgaacttttaatgaagacattttaaattttgttctgagatatttaaattctgcatgggtattttttcactaattgctttacttggataccaatttgaataatttctgaaattgtaatattgtgataatttgcacagcattgtacatgcacatctgtaaatgcaatcttaattgccatatttatgcaatctgtgtaccaatttggacaaatgtttatatattttacataaagctstctgtatgcagaatctgagaactagtttttttatgataataagtgggtaaaaattaataacagtgagtttcagggtagttgctttgtagcacaagatttcgcttccataaacattgttttttttttttttcttaaagtaaacctgtgctttttcttatctgcaaacataggcttagcgatacatataaaggtaatattccattgaaacatacagtttactttaatattagatcattttccaatttagatttgtccaaggttcgacctgctaacacatctataaataagaggcacttttagccaggcatggttgggaggcccaggcgggaggatcacctgaggtcaggggtttgagaccagcctggccaacagggcgaaaccccgtttctactaaaaataaaaaatgagccaggtatgatggtgcaatcgcctgtagtcccagctactcaggaggctgagacaggagaatcacttgaaccagggaggcagaggttgtagtgagccaagattgtgccactgcacttcagcctgggcaacagagtgagactccgtctcaaaaaaaaaaaaaaaaaaaggcacttttgattttggaactttgatagaggactggtagtaagcctaaattaatactattgactaaattaatattgactaaattaatacaacaaggattgaattctattatttctatttccagtacttcacctattcatgctcagaatggtaggttttactgttatttgtcctccataaaaaaaacaagcattttacatgcaaatacttgaaagccaaataaaagctactatagaactctagaggagtattcatataaaaaagtaaagtagatattttctaatccattaggctaactttattcttttgcttaaaagtatattactacttaatcttccctggctaatctgagacagtcatgactcccaatcccaacacatttcccatagggcataataaatggctttgtagattatccttcactttgacattataagcagaacacagagcaaactccactaaaaattattaactattcattagctctatcttgttaatgataacctttgtttgcaaagacaaaagctggctgatggagtctgctttgatgttccatgtttacactgtatgtgtgtggtctctgtatctgaatatgatattcagcagggataatgtacatatgagaactctaaaagtattgggtttagagtgaaatattgattattttcatattttattaatctctgtctaactgaatccatttcttgactttgattttggaaaggttctctggcgttaattgccatacaaacgagtgctctttctcttaggtaagtgatgtggagagtattatattgctgttccttgcctataaaataaccagattacaaaagtattaaatataaaataaaattacaggagtcagaagtgtgagacttatttctataatgtaacaaataatggattctaccttattactgtaacttcaaagttttattaaaagttgtctaaaggttattagaagtaagatcttttgagccaagctatcccaacacgtccccgcttaaattccagtaaatgtctgggtctcataaaccaactgcattttcatttttaaaaagctgaaggaaaaggggaaaagtgtgaagaaatgaaggatattagcagattctgtcctcaaaaatatataactaatagaacatgtacttggtggttgtaggcctggaagagtgacagtggaaaagaagagatttgttttcttcccccctttctcactctcagtttttcttacaggtctgtttcaacagcatatctcatttgatccttaaagtgctccattttacaggtgagaaagctgaggtttacggattatttgttcagcatccaaagcctggtacaacacaaaactcttaaccgatactttgtggtggtggtttttcccaactgaatccaggacttttttttcatataccagttagttgcatagattattttcatgtaattgcgtaagtttcttgagtctatatacttaggcttaaaatatttgattatcttggagaatggcatttcttgattttttttttttttttttttttttttgagacggagtctcactctgtcgcccaggctggagtccagtgatctcggctcactgcaagctccgcctcccaggttcacgccattctcctgcctcagcctcccgagtagctgggactacagatgcccaccaccacatccggctaattttttgtatttttagtaaagacggggtttcaccgtgttagccaggatggcctcgatttcctgacctcgtgatccgcccgcctcagcctcctaaagtgttgggattacaggcgtgagctaccgcgcccggcctcttgattttttttttttttctcctcattctctaatctcacatcctcacccctacacctgctatatttttccttcttagggcttacttaataccactttgccctataatttgtttttgtttttgttttagacagaggaatgctgtaatgctcaagcagttagttgattttctggtgcaaattctaatgatggccagtagtccattaagatttaacatacctgcatgaaaaatttcctttgcattcttcaaaaatagatttttaaaaattggtgctcagagcttaattccttttttattccctagtaagataagcaacgttattagtgctacagttttaacagacttttccagtgaaaaatgtgtggaataccaaatatgtaaaacataaaaattgaatttatagaaactcatagatatgaacttccccacctcccaaaacagtagccaaaatgggcctctataaaacagttttatgacagcagcttgactccttcacttgttactgcacaattcttaggttgtgaccacagcattgctaagcagatgcatctgacttaaacttttataatatatatactatacacatgctctagtagtatactagtttatgtgagtgagtatgctattactttcctcaacagtgaaaaacaaatagaggtacagagtaggagaagcctcacacaaagataacctggcagtacaagttagtgcactagtattcaatattgtccaaattttgcctatatctaaacattatttttacaatttctaaaaattaaagcattttagcaaaatttgaatttaaatttggtaaaatccattaaataactttgcaaaccctacggggacactgatctgtaaacctttgacatggtcctttggattcaatcacatctagataataaatctcagcttcatttgataaaagtcaattacatatatccaaagcatcttgttttaaaaaacatgttattgtttcttcttaaaataccttaaagcaaaattttggaataatttacttggttaccataaacacctaattttttactcagaccagtaagggagaaaggtttaagaggtggatttcagaggacttccttgtcccattggaaagagcaaagtaaacctctgtaactatgctgccacatctgtcctaaaggactccagggacactgacctgctactcatatgaatctgctttgtttatgaaccctagttgctgttaccagagaaggaaagatagggaaaagtggcaggatgtttataggcgtcatatgcaaaatgtgtttgccatagaaaagacaggtggtgtgggctagaaaatgttgtaatcaatacttgataatagctaataattattaagaaaatattataatttgttggaatgtcaggattatcactaactgtggatacttaaagtttacgtaatgcttctcaaaatatcatgaggtcatctgggccatttgtcagccttcggggtcagactaaccttgttacataatgctcttctgcataagaatgttataatctgtgatttgtccttttggctgaagctttagtcctgcgtatctcattctttctttgtgctttactgtccctctagtgtctagtatttgctttactgagactagtagtagaaaaaccagaggggaaaggacctaaattttagtattttctgtgtacaaacgcctacacatatcttgtatttgtgtttttttaaaaaaagttgtttcctttattttactatgagctccaggaaacatcagaatctcattcatctttgttctcaacacttagcacagtgcctggcacgtagtaggtgtttactaaatgttttggaggaaagagtaaatctgaatagttgtggtatgtgttgtggaagaaaaaatctcagctagcatctagatttttaaaaaagctttttaaagctattaaatataaacactcagattcttgcatactttgtctgtcattcacaagctcctgttagctcttatatgccaagcactgctgtaggtgatgggcatacatccaaaagcaaaacaggcaaaaataaagtccctgccttgtggaggctactttcaaatagcagaaagactgaaaataatccattacatgttaccttacatgataatagctaactagggaaaaatgggctgggcgtggtggctcacgcctgtaatcccagcactttgggaggccaaggcaggtggatcacgaggtcaagagatgagaccatctggccaacatggtgaaaccccgtctctactaaaaatacaaaaattagctgggcatggtggtgcgtgcctgtagtcccatctactcaagaggctgaagcaggagaatcacttgaacccgggaggcagaggttgcagtgagctgagatcgtgcaaaaactaggccaggaaaagaattcaggagcgaagggagaactaattagagaaagcctcactgagaatgtagtacctgagccaaaactgcaagaaacgttggacaaaaattatgcagatgtctaggagaccaccatttccatgcagaggaacaaaagcaaaggccttgaggtgcagatattctcatatgttggagaaacagtaaggttaatatggttatattggagtgagcaagaagtagagtaataggagagaaagtcagagaggcaacaggagagctaaactcaggacttcatttagatatttattgaccatatgctagacttgctccctcaaaaaccttatctatatatccttttcccaagaagaatttgtaattcttcttaataaaacccacaaatactgtataactataaatattttttaataaaagaattatataagttgttaaggataattatactagaaaactaagctaaatcacctagaggaaacattcatttaaatataaaacattttcaaagtctccaagcaaccaagctaggaataggaaaattgattataaatgtcattgttatattaaaaaatcatatcagttcattgggcaaaataaacatttttagagcagttctcagaaaatgatttttctcatggattttactattggtctgtacacttaacgtacactgtcctcatttgtctctgcattgtctcagctagaatattgaggtgtgcttccataaatgttgtgctatcgttccaacagggatcatagtaatatcatcccagtgtgtaatattcaccatctttcttgtcctaggagtgtttagcttaattattcctctgcaacagtggttttcaaacttgaatcacctggcaagcttgttcagacacaattttggttgctcctgtttctaagtcagtattgagtgtctggagtggggcccatgaatttgcatttccgtcaagttctctgatgatgttgatattgttggtccagaaactgtatttagaaacttacactaccaattgtcttttttctgaacggaaatagagttcattagtaaaatcacttgtgagaacttaaaatgtaggtattctatgttagtagttagttaaaaaagagatcatatagatatcaaaccttgggtaacacgagtaatagttaaaaaataaaagatcatgtgttcaatcatattacatattccctggcaaaggaaaaatacacctcca

SEQ ID NO: 5679 - DNA, 176930 bp, Homo sapiens
tatatatatatatattttttttttttttttttttcccctggagtctcacacaggctggagtgcaggggtgcgatcttggctcactgcaacctccacctcccaggttcaagtgattcttttgcctcagcctcctgagtagctgggactacaggcgtgcgccaccacgcctggctaatttttgtatttttagtagagatggggtttcactatgttggtcaggctggtcttgaactcctgacctcgtgatctgcccacctcagcctcccaaagtgctgggattacaggcgtgagccactgcatcccgccacattttctaatattaagccatctttacatttatggtatcaacccaatatgtttattatgcatattgtgaaaacacattgaaattggtttaataatactatatgtagaatttatcattttttattccttattagattggtctagtattttcttttctatggctttgtcaggttttggtatcaaaattttattagcttataatggactggggtgctttttttctttttctatgctttgcaaccatttgaatagaggttatttgtccatgaagatttggtaagtcttaccaaccaaaactttgaacttttttgcatatttatttagaaataagaatttaaattatttaatggttttaaatacatttgtattatttttgaattaatgcaattttacaatttattaaaaagtatttcagctctgtaattttgctgtttttcaagttttaaaaatactgagctttgtattatttaaaaattttgcacataaagtaaaattttcttgatgtgtttatcatacatttaaatgtactttggccaggtgccgtggctcatgcctgtaatcccagcattttgggaggccgaggtgggcagatcacctgagatcgggagttcgagaccagcctgaccaacatggagaaaccccgtttctactaaaaatacaaaattagctgggcatggtagcgcacgcctgtaatgccagctactcgggaggctgaggcaggagaatcacttgaacccaggaggtggaggttgtggtgagccaagattgtgccattgcagcctggacaacaagagtgaaactccgtcttaaataaatgtacttcaattaaaatcatacaaaatgtaactgtactgttttgctaaattacattacagagagtttgcatgagtttacacctatttttcaagtatcattatttaaaagaaatctttgtcaacaaaggaaaatgtaaaatcatgtattattttaattttcatcttttattgaattaaaaattaatttattgaagaaagtatttcagccaagttttttaatgttcatagtattcttaggatttaaaaaattctactgaaactgtaattataatctccatattcatagccttcttttctcttttttcattgtcaattttaccagaaatttatctatcttgctattgttctatagaactaggtttttgttttgttgaccctttctatgatttctttgtatccagatccatttttagctttatagttgtatatataacacacatatatttttttccttttccttgtctttcttcactctgttttagatctaagccttttttattttggatgagggagactacagagaaaggatctgctagccttgacctacttctgatgttacccagagtattcatgcagatgtatgtgataagaaaaaggtgaacacagagttactctgtttggggctttcattgcagcctagtccttgcaggaggctgctgcatgcaaacccaaattctctccattcttggaatctccttatgccacctgcactctgaagagtgttattattattactttttactaaattgggctgccccacccacctttgccgctggacttttaaaatagaaaggtttcctaaggagaatgcttttttttcccccctagccaaggggaaaaacactggagaggcacaaataccccatttcaaggaggaagaaaactatgcctggaggcatcatctgcaaaactttccggaaaaggctgagttctctcagggtattgtttcaccaaaatactgtctttgaatcagtctctaccttaatagactggagggaaagtttccaacagatcgttttgctgatagttttgattactctcgaacagaaaatttcaaaagctttttgccagagggaagcgaacagagggaggaagagagaactcttccatgagtgtgccatgactggggaaccttttgaacaaataatagtgccaaaggcagtgacagccaatttttccacccgaaatgcttctcaaattatagtccttggatcactagcttatatcaatagtctgacaaagtctatggtgtccttccagatattaatgtaaaacctgaacttgaaatatccatcacaatgtttcattttgctgaactttttctgagacacagtcttgttctgttgcccaggctggagtgcagtggtgcaatcttggctcactgcaacctctctctcccaagttcaagagattcttatgcctcagcctcccaacagctgggactacaggcatgcaccaccatgccggctaatttttatatttttagtagagacagggttttagtagagacagacatgttggccaggctggtctcaaactcttggcctcaagcgatctgcccaccttggcctcccaaggtgctgggattacaggtgtgagccaccatgcctggcttcattttgctgaacatacatatatatttaaaaattttaaaactttttaagagacagggcctggctgttgcccaggctggagtgcagtggcacaatggcagctcactgcagcttcgaactcctgggctcaagcgctcctctagcctcagcctcccaaaatgctgggattacaagcatgagccactgtggctaagaatattttttgtcatgtttgacagcgccagctgtctttgggtctttacctctgctgaagtcatttgaagaaacaaatctaaagaaatactgcttggcagaggggaggagagaaaggttaggacagaaagcatcaggatgactctccaagaaagggaatgtctgaatgacaagaggactacagacaggagaaaacattcaagaaaatttatcaaggtattctttgttcctgttgaaacctcatcatcaatgttagtgtcttcagaagcccacccaaatatattattttactttgataaaagacaacttggaaccatataaaagactgcactggtaccattattccattttacagatgagaaaagtagctcatttggaacataatgagctaggttttatggattaatctagatgctgaactgaattctgtattgtatttcattttctctgtccttttctactggatgtacatacctacatttaattttagagttatcgatctaaagctggctgcagaagctgtctcatttagacaggtccacgcttgtcaggaagacaggtctgtccaggcagacctttcagtttgttctatatttcatttcaggccacagcagaccaaataaagaggaaatgaagtgttttatagcaaataacttactgttgaatacacatgtcttgtacggacaggcctcccaatttgatgttagaaggggccacagagtagttaagatagtcaaaacagaagcaactgtattccttaagaaggtaagagacaaaatcaacatattaaaaatattcaagttgagtggtaggtaagaaactccttttactttacctttgatttatggggaaaggctaaacatggaaataattaattttaaaatgtctttatattagatatagaagtattggtgttaagaaatctgatagtaagtacagtgtataggaagaaagagacgggaaaattagctaataagtgattttttgacttgagtagagctatggttaaaaatatatggaaacctctttcgagtatatttttttcttaccaatatatactttttatgatactgagattttatagtgaacatttgcctattcatcccaatataatatttcttatagtttggtatcaacccctatcattatttgtgagataagggagtggtttgtattcatgggtatacatatctatacacatttctgcatgccgtacacaaacataagtagcattgtgcatgaacatattagcactgtgcatgtactaaaatttcaattttttcacatagtaggttataaaataaatcatatattcgtaggaaaggtatagaaagcaaagttatttaaagtggatttttaaaaaagatttgaatgattttttttaaaaaaaagattagaaccattgtttttaaaaggaaacagctttagatagtaaattatttacagccaggactcagccctgagcatcctgtgaaaaccacacgagcttggtcaaggttctaagcagtcaccggtgggagatggtcatggtcccgtcacagcataactcacttgaggcttgaaaagtttccgtccagctacggtttgcagtgacctttctcttctgcaaagcccacggttacctggtggccaccaccaacatagccccgcctcgctgtcctgcgtttctctcaatcagatcagtcctgccgagtccccatgccttactgctggtgtgctgtgtcctctgtgccatttcaaggcgagggctcatgaaacttttactcacacgctgctatttttgatatgcggtggccttagctgtggagcgagaggccgataattgtgatcactccggaaatcctgggaagccagaagtgggagatgggtgtkgtgaggtggcgtggctagggagaccccatcgagtgggtgtgttataagacctgggcgaatccctgtggctgccactctcctgagaatgttccctaggccttagtcccgcgccgctcccacccacacctccaggtgtgcagtccccgcccttaattactctcactaaaattgatagtttacacttgcaaagctacactgggaaagcggaagagaaatttataatcgtggatatggagaactaggggagcagacacacttgctttggtttacagatccagtgaagtgaaaaatcagaactagaaacgtatgcaccttcctagcagcaaagccgcttctgcgttcttcgcagcctccagtgcagggcggcgctgggagaaactttgcgccttctggaaagtttagaaagtgagccacgaaagagaggccacatttccggggttttgcgggccccgcgatgttttccagagcttttcgagtgggaagaggagagcgacaacgtgaaaatgccccgtgccggggcgtccaccggagtcctgccagctgtccggcgctggggtaagcgcaggaggggcgggggtgggacccgagctggcggccacgggtctcccgctgcgggtgtgtcgactcgggggcggggcgggggaggctgctgagataatgaatgggaggctaaggccaccccccagccccggccctgccaccaccgtgggctgtcgagccaatgaatggaggagggggcgcagaggtcaggggcgctgggggcgccacaccaggtaaggggtccagcttgggagcggggagggcggactctgggggttcgggtgttgctgacttgtgctacgtggaacaagcagaaaagaaggaaggcggaggaagagaggaggctggcgtcggcgctgctcctctggccctccctctgcgccccctcctcctgccagcgcgccaaagccgggcagtaggggccgactggcggctgacgctccctgagtggcgactccgtctccagccccgctgcggagcgcgggccggatctggggcggccagggcccggagccgcggagccctccccgccgcccggccgagcacgggaccccggcggggtgggcgcagggggcggccccgctctgggcgactgccgaggggcgggcggagggccgggctcggctggcggtggggcgggggccgccgggactgggcgcgcggcctgaagccagcccgggggcggcaggagagggacgcgcggcggcagcgagcgcaggtaagggggccggcgcggcgtgtggggacggcgccccctgggcgcgaagccagaggccgcggcgactgctcggcccgccacacggcgcgctgggctcacactgtcccgccgcggacgggctttgtggttgggggcgcgcgtgcgagtgccagtgagagtgtgggtgcgcgctgtgggccgcggcgcgggtgggtggccgtgcgttcttgcgagccggcctgcaggaggcgaggctcccctggcctcccgcacccagcggcggaccgagcccctggagggaagttgccgcagccgcccgggccgccggccctcctgtcccgcgccaggtcagtgcgccccggggcccgcccagtgacacgtaggtggcctccggttacctgggtcggggtgggtgcgcgggagggcttgcgaggggccctcgaaattctcccaaaacctcgtcccgctggacttgcacctccgaggggtccctgcgcccctggggctccgcacctctcgcttcccactgacgactcggttgtcccccaccaccgggctgaggacttttaactaagtttctgtccagccgcctaacaaacgtgcttaacaagtaacaggaggttgtaaggcaagggagggacctggctttgaaagttgatggttttgaaatcgacggctcctttgacttgcgtaggactcctttgtggtgaatggatttaaagtttattcttgtttttctttgctgccatttggtctttgcaatgttaagagtgaaggcattcaggacttgctgctgcctgctgtctggggcctgaggttgtggctctccgcttctgctctcctctcttcatttttgttgaaatccgtggattttttcataaatgtgggtgctggcttgtttcactatggacgcgtcgtttcctatggggttagatagatattggtaaacataaatattgaaaatgtgatgatcacatattgatgatcacagcgaaatcctctattccttcaggctctaacagtttgtttttcacgtatttgcataagtgtgtttgctcagctaagcataattggtaagccagaggtctgtgattcagagtctgcagttctggttaaggggagactgtacacttggaaaatgcgaagttttttaagaagttattcccttgccggatagaagagtgggtcccaaggaaaaagggtgtattttagaggtatggttatttgaaccaaactaaacatcattaaaatacacagggaggtagaatgtcacctagttctttctgcccttgatttccatatcccagtaggagcgagtataattgccccaaatgcaaaattatgaataataatcagcattgtaagtatattaaggttgcatttttttcttgatacttgtctgatttgaggataaaaacaccaagtggcaagagaaggaggtagcttgaggcaggaaggcacgggcgaggagcgaggagggaaggctgggttgtcatcatccgagcccgcaaggtacaccacgtcccctagcggcgcgacctcagccagtcgggtcagctcagatcctggtctccgtctccccatccggaaaatggaaggggttggtgatcgttgctgttccttccagcttcccaaatagcgagaaaccggtgggaggttatcttattgtgttagagcagtaggaaaaggtaggagggggaagtgagaggtccagagggccaggaagatggaagaaaacmagcaacagaggatgcttggaggagaaaaattcttgagctgggagctcatttcctcttttttttttttttttcctttcctcaagggactcaataatacttcccccacctcagatcaatctcttgttacctttattatttaaagcttgtgagtttgcttagctaatgcactagggtgaggtcaaggtgatccttgcagtctgacttctactaggcatcacttgactcatttgcatcattgtctctcaagggaacagctcctgcccaggtctgtgggcactcagcatggatttcagtctccctgtgagtgatgggaaagaactaacagaggtaagaatgtaagtggcagccctttcgaaacttctatttttgttcaaacctaatattttccaaaaagtgatttgatttttttgttgtttcaaattataccgtaggctgcaaggttttactgaatctattccattagtgacctactggaacgttcaaagaataaaaatctcacttgctcagtgtttttgatacacagtgacattcagtctgaagtaagtgatatttagggccaagaatcatttcaaatgcttagtatggaaagttgcaatctgggcagaatacactgtatcattttcactgggaagctccaagtattcagcagataacagaactttcagaatttagtttgaggtcaagattttaatgtctgtgtttgatgtgtggcctgtcttccttttctttgatgttttggtatcaatatgcctacacccttgaggaacattatttattgtaaaagctgaactgtgatgtaataaaaacttaaacataagctcttggtttaaagtccaatagtcttctctggccttaagtcagcatcatactactgtttggtttcttatttttacatatcatgttaccctcttatttaaatatcccgggccaggtgtggtggcttatgcctgtaatctcaacactttgggaggctgaggcaggacgatcgcttgaagccaggagtttgagaccaacctgggcaacatagtgagactctgtctctataaaaaaaatagaaacattagctgggtatggtggcatgtgcgtgtagtctcagctacttgggaggcggaggagggaggatggcttcagcccaggattcaaggctgcagtgagctgtgattgtgccattgcactacagcctgggtgacagagagactctgtctcttaaaaaaaaaatcttagggaaaactattatggatgtcttagaaagttgagagaaaaggaggtaattctatttcagcaaacaattattgaattccttccatgtggtagatgcaaggatggtgaaaaggaagctccagaaagaactgcaacacaggggggaaagatgcagtgagcctcacggttcataccgaatatgtatatgcagtgttgtgtaactgggtggtagctgtagagtccaagaactttggcatgccagggaatggagaattacgttttgattcaggggacgaatttataaatgtggcttgaagaataacatatcttttaaaagatgaatggtgggggaatgaagacaaagtgagagtgtggggtgatgaaggctggaaagttacgaagggacaaattgtgggggacctctgatgttattttaaggagttatgctacatggggatagggaggcaaggaggaagtattacataacctcaagatgtggaaagacactgagtaacacatattggggcagagtgaggggtgcgatgatggayggaggactgggcttttattccattacaatccgtgtaacttatggctgctacgttttaagacactattgcctgtttactcaaattatataaaggttgtagaataaactaataagtagtttcttcctccctactctccgcaaattgatagtgctttatacttttgagaaatttaatttagtaaaaattaatgatgctattgtgttatagctggaccttgtggagccttttgaacatgtggggttgaagtcattctgcaggcacagagctgtccaagaaaacattttttttcccctctcttttttgtttagggaagggcttgctggttaatgctaatttaaacatgactcttctggcagctggcattcttgaccctgtttatgttatacatggtatttaaccacagtgattgggtatttgcagcacagaagaaaaagaattattattagtttgaaaccggcattaatgcctctgtaaatgatagggcaaggcagtagatggaaggagagagggaagccaagtagcacactcggtactgcagtgagagatgacataaccatgagaattctttaagtttaacttccagtagaagtaacttgctttctatatattttaaatccctagagctaaagcatttaactcattatcttcactctgtgggatccatttgggagaggtattcaggagctttataggttcacacttgctccccagtacctstgtgtcacaggaggatatacactggttttcagttgcatgtcagaggtggaactgacttggatgtctttgaattgctgttgaatctggagatgctagggtacccaggagacagacaggaaaaagaagaggctgggcacggcggctcatgcctgtaatcccagcactttgggaggctgaggcgggtggatcacctgaggtcaagagtttgagaccagcctggctaacatggtgaaaccctgtctctactaaaaatacaaaaaattagccaggtgtgatgctgggcgcctgtaatcccagctactcaggaggctgaggcagaagaatcacttgaacccaggagggagaggttgcagtgagccaagattgtgccattgcactccagcctgggcagacagagtgagactccatctcaaaaaacttaagaaaaagaaaaagaaaaagaaggtggctgaatttctttcaattaccttgtgaattcaatttaatgaatgatcttcccagcagtttgttttatcttctgcaagggaacttatgtttggcatgtttaataaattaagttaattaagttggagaagcccaaggttagtatactttattttaggatacatttttggtaggagaggaggaggggtggcatggtggtggtgatgattttatttaaactctttggcattttttagcaggttagtatgatttcaaagtagtgttgttgttgtattatcaacttgtggggctgggccaaagaatattgtcttaatacttgcatgtccctgtcatctaatcagtgctatagaaactttaaccctgaagtccatgtaaaattgtaattatttttttccagaaatgaaagagaactattttactacattcatggatttaggttataatttattttatttttgtgatactgttttaaaaaagtgatataatgacagggcagacccttaactttagtccagtgctaaaacaaacgtgcaataagcctgcatgaggcagggcaagctgtgtttgttgtattatgaaaataaaggaaaatgttttcaaaaccagcatttttctctaaaagaaaaaattttgactaataatacctggccatgggtgggatttccagctgttggttgaaggaaattttgttcattatggccattatgtgtgctatgtctcttagagtttaggatttgctatgctgagattgctactgtgaaccattcctgttatagcaagtttccctatattcattaacttatgtgtctaaacaatgctctagattagactttatatcgatctgttctactaaattttcttcccctatgcctaggtggttctctttgaccaacccttaactgccctgattctgaaattctgctctaattgaaggatattcctgggtctttggarggagaaatggttcaggggcagaggaaactttttttccccccatctcaggagcacttaactgactgcctgctatataccaggctttgtgctagttttactaggggtgagtgtgaataaggcaggattcccaccctccaggaggagcttacacacgattaacagataattacaattcagtgtaacaagtgttatgagagagaagactttgcgggagcaccaagcgggggcacttgaccctcagcggtgaggtggtggaggtcagggaatgctcctggaaggttaggatctggaaggatcctgggagataaaccaagcctagaagaggtaaaaaagggatcaagaggctttctatctccagtttygctactcctgggtaggtcaaagtgcctctctttttacatctggaaaataagaataagaactgatatctggttggtaattctagttttcatttactatgtgttccttaatcctttatattactctttcttccatattcagtaggcatttgtacccaccctgtactgggaagatagcactgcaggaaacaagatgtggacagaccccttctctcatggagcttgccctctatcatatgacattagtaagagaagttcttttagaatgccttcaaactcaggcatatgtatcttgttattcttccattttaggaacattttctccaaggtagtctcaatactttgaggtgagttggcctttcccttttaaggaaggagaccacagagcccggtaatctccttttcattttatatgcttgaaatattttgctaggatttatctgttttaaagtctagagatagacatagctgtgttttatctgtagccctgccttgcttccatctcattttccctattcttacttttaacccaacttgtgtttgagattctttgctcagtatatagtttgctttctagaataattcaaacctagtgcctgtagaaagtcagacttattttttatttatttgagatagggtcttggagtgcagtggcataatcctggctcacggcagctttgacctcctgggctcaagctattctcccactacagccttccaagtagctgggaccgcaggtgtgtgccgctatgcctggctattttttttctttttctttctttcttcttctttctttttcttttctttttttttttctttttttttttttaaagaaatgggctctcactacattacccaggctgttctcaaactcctgggctcaagggatcctctcaccttggcctcccaaagtgttgggatgacagctgtgagccaccgcatctggctaatacttattttgaagtcaccctgtcatggtgctttgcttcactaatgtatttcacttatgatcttgaagtcactcagggatacaaacacaataaaatgcatcccaaccaggagagggtagctgcattcatttacaaaatttttttttgcaatgattcaaacactatagatgtgtctaaagtaaatgtaaaaatctctctctgccactttaaccttacccatctgatatcagtttgttccatagccttccatagttgtccttttacttatacaaacctacaaaaattaatatttatgtatatttatgtgtgtgtgggataagtgtggatatgtttatacatactcatatgtatgtttgtgtgtgtatctgtctgtgcctgcctccattttcttttgctttagagaggctatacttgaggctgccatcaagagtgagaagtttgaagctggaagagcctgcatgggcccttcttgaactggtgcagcatgtgcagcatgacatcactcaagagttcttgtcagagtgataatgaatgtctggctattgtaaacgggaayaagaaaactatttccagctgtgtgacaaccaagacgacaaaaagcattgcagagaatattattgccacaaggaccctgcttcatctgggtctcagacgacgggaggaggggcattttggagcacgtgtttggcatctgtgaaccttttgttaggtagaaaacaaggcctgaatgaaaggcctttcaaccacttctggagcagagaagataggtagagttactcattataggcaggtttcattgtaggagtattcagtgaggacccccgccttggaagtctgtaatcagcakatgataaggatggtgtgttcttactaagagaataacacaactgaaacagaattgccttttgttaaggggatgctttgccttcttggwctacgattgtggggagaaggattattgtcaactaagtgaggcattcattctgtacccactatttattgtagttccacagagaactgcttgctttactttctgactaggcacagaaaagtaaaggttcaaaggctagggcaagatgactgacttttccagatttagcacaatctgttctctggtcactttgagacgctgtcartttagtttcatgcagctgatatcttggagaacttctgtgtccttacgtttggctgaggacactaaattttttttttttttttttttttttgaggcagagcctcactttattgcccaggctggagtgcaatggcacgatcttggctcactgcctcctgggttcaagcaattctcttgcctcagccttccaagtagctgggaccacaggcgtgcaccaccatgcctggctaattttttttgtattttttggtagagatggggtttcactgtgttggccaggctggtcttgaactcctggcctcaagtgaaccacccgcctcggcctctcaaagtgctgggtttacaggcccaagccaccgtgcctggcctgaggacactaaaattaaaaaaaaattaagaaagtacggtccccgctcttgagtagctcatgaacatggagcgacatggactcaaatgattaagatcaggtaggtagtgatgaatacggtaaaccaaggttcaaacaaagagctgtctgcatatctgaggatggagagggtaagtcagccttagaggagggaaatgacttgcagcaggatgccagcctcaatggtctgtggagctcattccatgcagaagagtaatgaggaagacccagtgagtgacaggcttggggaggagtgcctgaaattgacggtttgtggcaggaagtggtgggaccaatctcgaagcttgtggaggtagaagggtactggagactactgtggacaaaaaagggcatgttgatgccattaccagacaggacacgagagcatgatgattgttgcagtgaggcttgttagttttagacatgtctaaaaccatgcaggcagagattttcagctggtggctggcaatttgagtttgaagtttagctgagaagtcagttggcagtattcaggcataattgctaaatgtagaagtaaatgccagtaaaatgtgtgtgataagctggagagcacttttagagtgaaaagattgatatattttaacaaggacaaggcttatttcaattctttaggttatttttctttagcagattaaagtagttttatcggttatcaagcatttgttgagcgtttactrtggcttctcttgataggtggtcctggggagataggaaggaaatggtgcaaatttcaacaatacccactggggtgaacaaaaaatccctgaaacaccccattccagctattgttatctggaaaaaaatccttacaataattagatggtgatttgacgtctgggggaagttgcagatatagttttaatttactgtaggactagtggcagtgagtctcatattgctgtcatataaaaggtaaaccttccagaagaactttgraaatttcagtagcytaaagaccacgctttgagaaactcgtaaaggtttgtcatagaggttttaaaagtctgatcaaataattttaagctttagttgcctactaaaaagtaggatgcagtacaagtttgtcctttacttggtaaaaaaaaaaaaaagtctttttctaattaagaatttattttcaccttagataattttattggcatgcctttttgcatgcaagatagaaaaaagacaagtttattcttagttttcttttttctaagccattatgattcttttaaattatactcatttcaatttgataggaaaaaacagtatatgctcattttaaaatatgtggaatgtacagggattcatgtgtagttccatcacttaagattgactttcttgctaggcatggtggctcatgctggaaatcccatcactttgggaggccaaggtgggcagatcacttgaggtcaggagttcaagaccagcctggccaacatgataaaaccctgtctctactaaaaatacaaaaattagctggatgtgctctcttgaacccaggaggctaaggttgcagtgagcagagtttgtgccactgcactccagcctgggtgacagagtgagattctgcctcaaaaaaaaaaaaaaaattcttattccattttgggataatttcttgcagttttaaaaatatttgcttttacggaatatttaacagcattctcctttgtatcataagtatgtacacaggccattaaaatctttcatttttaatttctaatgactacatattagtcacactatttaatgtgtgtgtgactgattaaacatacctaattatgtttagtcattccctttctccgcttgcttctttttttttttttttttttttttttgaggacttgtgcttctctgcccatatttcagtgttgatgttcccagagttctatccttactctaaatgatctccatttttgagcttatccacacagtggactgtggtttcctggtctttgtccttctgcctaggacgttctttcctaggtatccacatgcctgctctcattattttcatgtcttaactcaaaggtcaactttgagttaaggctttctatcactacatttaaaattgtgtgacctttcctgtctacccagcttgcctgatattttcttctccattgcacttttcttctgacttcttagatgaggacaggacttaaaaaaattgtatttttattttctgctgtttccccaaaatatttttcttgttttgtttcttaaagaccatgtcttgttctgtcacccaggctggagttcagttgctcagtcatagctcactgtggcctcaaactcctgggctcaaaccatcctcctgcttcagcttcctgagtagctgggactgtgagcacatgccaccatgtttggttatttatttatttatttatttattttttgggtagagacagggtcttgctttattacccaggctagtcttgaactctcaccttgacttcccaaactgttgggattgcaggcatgaacgccgcacctggcctgttgatttggggtggagcgttctgaaattgaggcagtaattaatagcctaccaaccaaaaaaagcccaggaccagacagattcacaactgcattccaccaaagttacaaagaggagctggtaccattccttctgaaactattccaaataatagaaaaagagggactcctccctagtccattttatgaggccagcatcatcctgatactaaaacctggcagagacacaacaaaaaaagaaaatttcaggccaatatccctgatgaacattgatgcgaaaatcctcaataaaatactggcaaactgaatccagcagcacattaaaaagcttatccaccacaatcaagttggcttcatccctgggatgcaaagcaggttcggtgtatacaaatcaataaacgtaatccatcgcataaacagaaccaatgacaaaaaccacatgattatctcaatagatgcagaaaaggccttcaataaaattcaacaccctttcatgctaaaaacactcaataaactaggtattgatggaacatatctcaagataataagagctatttatgacagacccacagccaatatcatactgaatgggtaaaagctggaagcattccctttgaaaactggcacaaaacaaggatgccctctttcaccactcctattcgacatagtattgaaagttctggccagggcaatcaggcaagagataaaaataaaggatattcatacaggaagagaggaagtcaaattgtctctgtttgcaaatgacatgattgtatatttagaaaaccctgtcgtctcagccaaaatctccttaagctgataagcaacttcagcaaagcctcaggatacaaaatcaatgtgcaaaaatcacaagcattcctatacatcattaatagacgaacagagagccaaatcataaatgaactcccattcacaattgctacaaagagaataaaatacttaggaatacaacttacaagggatgtgaaggatgtcttcaaggagaactacaaaccagtgctcaaggaaacaagagacgacacaaatgaatggaaaaatattccatgttatggataggaagaatcaatatcatgaaaatggccctactgcccaaagtagtttatagattcaatgctattcccatcaagctaccattgactttcttcacagaattagaaaaaactacttcaaatttcatatggaactaaaaaagagcccgtatagccaagacagtcctgagcaaaaagaacaaagctggaggcatcacactacctgacttcaaactatactacaaggctattactggtaccaaaacagatataaagaccaatggaacataacagaggcctcagaaataataccacacatatacaaccatctgatttttgacaaacctgacaaaaacaagcaatggggaaaggatttcctatttaataaatggtgttgggaaaactggctagccatatgtagaaaagtgaaactggaccccttccttacaccttatacaaaaattaactgaaggtggattaaagatttaaatgtaagaactaaaaccataaaaaccctaaaagaaaacccaagcaataccattcaggacacaggcatgggcaaagacttcatgactaaaacaccaaaagtgattgcaaccaaagccaaaattgacaagtgggatctaattaaactaaagagcttctgcacagcaaaagaaactatcatcagagtgaacaggcaacctacagagtgggagaaaatgtttgcaatctattcatctgacaaagggctaatatccagaatctacaaggagcttaaaacaaatttacaagaaaaaaagaactccatcaaaacgtgggcgaaggatatgaacagacacttttcaaaagaagacatttatgcagccaacagacttatgaaaaaaagctcatcatcactggtcattagagaaatacaaatcaaaccacaatgagctaccatctcacaccagttagaatggcaatcattaaaaagtcaggaatcaacagatgctggagaggatgtggagaaataggaatgcttttatactgttggtgggagtgtaaattagttcaaccattgtggaagacagtgtggtgattcttcaaggatctagaaccagaaataccatttgacccagccatcccattactgggtatatatccaaaggattataaatcattctactataaagacacatgcacacgtatgtttattgcagcactatttacaatagcaaagacttgaaacmaacccaaatgcccatcaatgatagactggataaagaaaatgtggcacatatacactgtggaatactatgcagccataaaaaaggtgagttcatgtcctttgtggggacttggatgaagctggaaaccatcattctcagcaaactaacacaagaacagaaaacctaacactgcatgttctcactcataagtgggagttgaacaatgagaacatatgggcacagggaggggaacatcacccactgggacctgttggggggtgggggacaaggggagggataacattaggagaaatacctaatgtagatggcgagtttatgggtgcagcaaaccaccatggcacatttatacctgtgtaacaaacctgcacatgtatcccagaacttaaagtgtgtgtgtatatatatgtgtgtgtatatatatacacacacacacactcccatatatataaatatatataattatgtatatataaatatataaaaatatgtatgtatatataattatgtatatataaaaatatataaaaattatatatgtatatataaatatatatataaatatgtgtgtgtgtatatatataaaaatatgtatatatatgatgcccagcacactgaatgtattagctgccattttcattatcttcattggtaagttgaatcatatgagattgctggtatttgactgctcttgacctataaaatggtagttttgtacggttcagtctaatattacgcccttcagatttatctggccagttgcatcttctgcatttcctgagttcaactcaggatttttttctacatttgttagagaatctatcttgttgaagttcaaaaggtgtggtatgcattgtgcatatggtccaagaacatgcttcttacccattttttgtactatgtagttagtggaaataatgccttgactttggctgctttttcctcgtatatttttagtgctattgccaatttttgtctttgtgtgcaccttcttgagcattttaactggaaattgtgatgagttttattgggacatttagttcagtggctttcaaactttttagtcatgacccatagttagaaatgtttgtccatacatttgaatgagacattagttgtatatagtttactacacatagtaaactctgacattttcttttctattttttcctatgataatttgttcattttcattttaaaaagtactggttataactcatacattttgaaaacacttatctagtcatgaactgcagtttgaaagacrctgatctagtctgttgctgtgctgtctaaaatcaggttcattcatttttcaacatccatttgttaaatacagtatcggttattttgctagtagctgggaatagagtgatgagtaaagcagtcgttatcactggtggcatgaagcatagagtctagtgggatggagcatatgaaccaaaaaaaaaaacatcsaaatgtataaatactctgcatgataaattctgtgggggaaaagagcaaaagcgattaaatggggaacctcatctgactttgggggtgattcaggatttccctggggaactgacatttggttaggtctgcagatgagaatgtgttaactctgtgaaggactgagcaggggtgtgtgcgtgggattgcagagtcatggaagaaatagtaacagaagcaaaatagaaaaccggaagggaaagacaggtggaaggcaatcttctttgatgagttggcattttttgtgatacttagtaggccttcctgtttgtggcttttttttcttacttgacaaaagtcaaataggaatgtcaaggattttttgggggagatgggtgttggtgtttgttgaagtagttttgtattagagcaatatagtatattgctaaatagcagggtttttttttttttttttttttttttgttgagacggagtcttgctgtgtcacccaggctggagtgcagtggcgcgatcttggctcactgcaagctctgcttgccgggcacgccattctcctgcctcagcctcctgagtagctgggactacaggcacccgccaccatgcccggctaatttttttttgcatttttagtagagacagggttttaccgtgttagccaggatggtctcgatctcctgacctcgtaatccgcccgccttggcctcccaaagtgctgggattacagacttgagccaccgcgcccggcaatagcagggttttttgaaggcttgctctgtatgaggagctgtacaaagttgtgttcgatatgcaggagaaatagatttggttggattaaaaaatacttttatataatataattaccaatttagtaactatgcataatttgtaagaaattataacactgaagttaagttttttgtaagtgaagatcagatggttgggtgagtatttcattgcttcttgttgatttgaatataatggtaagaattattactgcactaggatttttgttttttttaccttggtaggattttagtgttcattccccccaccctcttttaaaactgaagagtttaaaagaaagattttaaattagaagtccataaagtaagttggagaccacgtgagatgggagaccatgattcaattgccagttcttccattgctgtgcatgatacccttgacaatacccaacctttgaggccctgggagccttgtcttaaaatggaggacttgaaatcagtttgcaagaatcattctcccagtcctattattagtattaagtgcctttatgctttctattttcaactttgctctggctgtttaaagacttggcaccccaccatttaactaacctagtccaacaagctcaggccaaacttgggagaactccaggtatttgcatctttctgtgtctttgtggggtcaggctcaggtggcactaattccttcacattgggcaacactactaatgcttctcattacaacatggaagaatgggtaaagattagaattctcttgagacttttttttttttttttttttttttgtgacggagtctcgctctgtcacccaggctggagtgcggtggcrggatctctgctcactgcaacctccacctcccgggtggttcaagcgattctcctgcctaagcctcttgagtagctgggattacaggtgtctgcccccacactcagctaatttttgtatttttagtagagacagggtttcaccatgttggtcaggctggtcttgaactcctgacctcaggkgatccacccacctgggcctcccaaagtgttgggattacaggcgtgagccacggcaactggcctaaatcttttaaractttatatcatagtttgcagtttgacaacacttggaattaattttttttatcctttcagattcascaaacatggaaaaatatgattatcttatgtttatatgctggatgcttgctttggagaaatatgcagcatctaagttatatatawtccacattttataaaaacccattggatgagggtgatattattttaaaaarattttaaagggctaaggaatcatatggaagatgaattcaattttaatgactacaccaagtttaaggaatattttataagaaatgggcttatgtgaaagagaattaaaggtacttggcaattcagcttatcttttctttttcctcctagctttattgatgtataatgacaagcaaaactgtatttaagttctacttatgatggtgatatacatatatactgtgaaatgagtactattaagtatcgtcaccatgctgtaygttagatccccagaacttactcataactggaagtttgtaccctttgaccagcrtcttccctttcccccatcaactcagcttttcttaccagtatattaaatcatttgattcaaatacatttcaacattatttttttgtaattcaatatattcagtctttcaagttcatttattgtaacgtgaatatgttattacactcgttcttattttttgtttagaaatcgagggaagaaagatgagatgcatgctttttctgtttgtctgaactctgctgaattcctcattcatagtaaaatatttactcaggaagtccaggtaactctggagattttacttagtgtgttttggtgctgattcatcagttgatttttttaatttgttgttaaatatcttcttaagctgattattatatggaaaccagccaggactccaggctcctgatctgagacaaggcaggggcaggtcayacaggcacaggcaatgtttggcaatgtgtaggtccaagtaggtactaggcacaggtgctcaatgctagtactagaaacaggttgggtstgaaggggctggggtcatggggttagggtaggttcaaggtagacaaagccaggaagaggcacagagcatgtagatgcctggyctagaattccataaaaggcattctggatagccctaagagagaagtggtgtagacaaaagtctaaagctcccaggagaaatttattttcagagttggaagcatcagttgaacttcgctgattgttcaagggaatctcaacactcaagcaggggtttagtcaccatgaccttgggacaaagtcccagcttctcttcaagtgtttggtcatcttaaagtagagggctttgaaatcacaaattctcatctgattcagggattaagaaccttgttgaatactatttctctaggagcaggaattagctgaggtctcatgactaaatgtattctttctacaagagatttattataaaacatatttaacatttgctatggactggattttctccctaatattcatgttggagccctaacccccagtgtagctgtatttggagataaggcttttaggagataattaggattaaatgagattataagtgtggggtcctaatctgataggattggtggccttatgggaagaggaagagagagatctttgtttctatacacattcaccaaggaaaggctgtgtgagcaaacagtgaaaagacagctgtctgcaagccaaaaggagagccctcaccagaaaccaaccatgctggcaccctgtattacatttctagcctctagaattatgagaaaataaatttttttcatttaagccacctaacgtatggaacttttttttgagacggagtctcactctgtcgcccaggctgatgtgctgtggcgtgatcttggctcactgcaatctccacctcccaggttcacgccattctcctgcctcagcctcctgagtagctgggactacaggtgcccgccaccaagcccggctaattttttgtatgtttttttttttagtagagacggggtttcaccatgttagccaggatggtctcgatctcctgtccttgtgatcygcccgcctcggcctcccaaggaactttttaatggcagcctaagctaatacaacattccactaatttgggtagggaataaaagtaactctgtccagtagccgttcagcagaaaacacacactatcatttacctgcctaactctcttcctttttccttcttcatcccgttttagtggcagaatgactcagtgagtaaaaatgttccagtgaacacatcttaaagtatttaaaactgttcaacttatttaaaaccaattgtttttatatgaaatactgtttattatcttttaaaatatatctctattattattatttttaatagagaaggtgtcttgcgatgttgaccaggctggtctcgaactcctgggctcaagcaatcttcccaaagtgttgggatcagaggtgtgagccaccatacctggcccttagtgtattcttaaaaacattaaaaaaattatttttgaaatcacattatggcaatatttaaataaacccacttgtatttgcagttccctaatgaatgtatttgttatttagtcatgttagttttatggcctatttctattatgttctattttatggtctacttctacctagaagtaacaaatgtgtgtttttatttctactgattgttttttaacacactgttatataaggcgatatagtctgaatcatatttttartagcctgataataatccattaagctgttaaactgttcattcaaccattgccctatttttacacagttttatttcctttgtacttgctgttttaaaaagtattgtactcaacaacttttatgtaatttccgtagactgattaagagtgagatcactgatttgaaagtaatatcatttggtttccaagtagattttaaaaggtagtttaaaaacttaactttcaaaagtaacacctgtttgtgctcattttagaaaacaaagaaaaatataaagaagaagaaggaaaaagtacccatactccccacctagagatagccattgtcaagtttatgggatattcccttttaatattttctctgtaaattttatctagttggaatcctactgggcataatcagtactttgtcctttctcttaatagtatgcagtaaatggaagtgatgttaattccattcagctactgttatagtgaactcacttcagtaaatatctttgcaagcctatttttgcatttcaggtaatttctttagagtagattcctggtaatataatttgttgccttaaaaggcagggatgatttttatggctagagatagaaatgattaaattgatttccaaaacaatgataatgcttcatactcctaccagcagagtttgagaaaaacttaaagatggaaattagtataagtgaaatgtgaaatgattagagcaatgggaaactttaataataatctgtcctggatgacattgactagacctcattggtggatgttctctccactgtggtcatgtctttcactcatccacagttttgtcttctaacagagaactttatgtttcaagcttcccttagttttatgtcctttaatatgctgtgaaaaagtttttttttgtttgtttgttttgtttttttttagacagagtcttgctctgtcgccaggttggagtgcagtggcgccatctcggctcactgcaacctccacctcctgggttcaagcaattctcctgcctcagcctccctagtagctgggactacaggcaggcaccaccatgcccagttgatttttgtatttttagtagagataggtttcaccatgttggccaggatggtctcaatctcttgatctcgtgatccgcctgcctcggcctcccaaagtgctgagattataggcgtgagccactgcgcccagccaagctttgtttttaactgtatacactgcatcaactgatggtagggtattcctgatgagtatacttctgtgaaataactggttaactactagaaaatggagcaagtgctctaaaaatgaatagcaaagaattaaaaactaaatggtaattatacctgtgctggtttagtgtgtattttgcatatttacccgcataagctcaattttcttctagatgccattgatattacagtcagggaccacttttgtgccttggggaaataaagtgagcttccttaggaggtaatagatttgcaatttcacccattactggaagtagtcacatgtaatccaattaaatttgatatctcattagtgatggaggcccaccttcaaaaaactcagactcgagggatgggaactgaatgaaggtaccatgtgataaatgcaatgttataagttagttgcatgtctgttttcctactaaatatagtgaaatttaataagcataggaaggaaatggggtaagaggaagtgagtgtgaatttaagcagagaccgagaccaagggcccaccttagggtgctattcatgtattagaaaagggccacgcattttgctgttcttcctcatagttgacatgaagaggggactcaatgagctgtgttacccagaaagcccatgaagataaggactaaccaggggggacaactcttcatgtgctgggaggagaactcttcatgtgctgggaggagagaggattttatccatggttctccaaacgttaggtactttaatgtattgagtcgtgtctccaaatacaatcttacaatgaatgtgacaatggggttaaaaaaaactgtattgctcaatataggttaatggcataatgccaattgcttatctcagaaaagccattctgtaagagccaaagcaagacagttcagacaagcagctcactgctggctctgtccaagcatagacattccacattctttgtggagtgctgaattagatacttttcaggatgttycctatgaatattacttcatgcaaaaggatatttttgataagaactgagtagcagtaagttcaaggttattaagctcaatactgcatcctctctttgtggtcagttaagtgtgggttcctgtgctttaagcattgacttgactgagagtagcatgaacaaagatcagcctatgagcacggattttgtggagtctttttacttcagggagtagaaggaagagaaatgaaggctctgacagttgatgcctttggccagagtttgcaagactggaagtctatgtgctaaatgaatttggccccacatacagtttatttgttcaggtcaagtttcaaaagtcagcatagacaggtgggcattatgattgttcctcgtgcaagtgtagtttctgtatcatggaagctaaagatctgttttcattggcacttcatgtatttatgatacctggttggtccctgtgggtatttgtgcttgtgacatttgctggtatatggtcacagtgtaatgatgtatgtgtaagttcagaagcagcatagaggaggtggtgattaatctggrtggggaataggacccataaaaggcttcattgaaaggctgtgactggaaagatgagtagatatttgccaggcatagaatttggacaagggagggtattccaggaaaagccaagtgcatatgcaaagacagctgtgtggattagcattatatgttaggggatttctgagtagatccaaagtgctggggcttaacaagcaaggtgaattatagcctaagccagaagtacctgaaggactcagtttgccgtgcatgaggaggctggccttggggcaatggggaaccatgggaaggtttgaaacagatcattgccatactagatttctgttttaggaaggttattctccaaacacccaggagaaatagttgcaggtagaagggactagaatagctttttaaaaaaagttatttatgaaaacatctttatttttcctccatttcactgacctatataattttttatggtgagacgtttgaaatttactcttattttgaaatatacaatgcattattattgactctagccactctgctgtgcagtggatctcagaaagaagctattcctcttgtctgtctgaaactttgtgccctttgatcaacaactccctatctcccaccccactgttcttcatcccttgcctccagcctctggtgaccatcattctaccctctacttcttggttcaactttttaagattctacctataagttgagatcgtatagtactgagatatcttaagagggcttgagttaaggcagtaacagtgggtttggagggaagaaggtagatacgaaagacatttaggaggaagaattgatgcaacttggctattgaatagatatggtgggtgagggagggggaggagtgatagtgaatggatgacaataccgttgaatgagacgaagtaggagagagtaacaaggacatgggaagtgtatttatattagattgccagggctgccatgaagtcccacggactgggtggctgaaacaacaaaaatttattttctcacaattctggaggctggaagtcatagagaattgtgaggactgttttcttctgaggcctctctctttgccttgcatgtgatggtctcctccccgtgtcttcatgtggtttttcgtttgtacctgcctgtgtccaactttcttcctcttataaggaccctagtcatattggattagggcccactctaatgacctcattctaacttaattacctctttatagaccctggctccaaatgtggtcacattctgaggtactgggagttaggacctcaacatatgaatttctcggggggacacagtttagcctagaacaggaaggatgaagagtttggtacatgttgaatttgcaaaccctatggagtatgtagggtggtggtggtggttctataatgcatttggatgtgtgagaacacagcccagaaaagaactccagatttggtatttaaaatcatgggcatggataaaaattgtcttcaccagtaatacccaaccttggcttattttaagaacacctgggggagcttttgaaacatgccatgtgcagggggctcacttcaggccatgactcagtctttgaaagagaggccagggcagacacctggtcattctaatgtgatccaaggttgagaggatgggtctagtgttaagtgtagagaagagatccgaaagaatggctcggatcattcaagtggtggttggtaagagagagagaaggatgggaaggatgggagtttggggggcttcttgcctgatgtycatcaacttctccatgatggatgtgcaaactggggagttcctttaggggatttaaggcttggaagaggcgccgagagaaatggcagcactgatggcttctctttttgggctcacctgagattagaatgcattcattaatagtgacagctttaccttgtccttaagttttccccacaaggcctctggaggttgtgaatgggagcagaacaggcagtttggagtttaatcatgattgtggtgtcaaagggcagattggcagaaaggagcatgggagrtatcaggctggtgtgaggggagcccagagggctgactatggtatttaggctgggcattgtgagaattgaccttggatagggctggtgaacaggaaagaatggagggagcaggaggctgggtattttggagggctgaaataatgtgtatgagcacaaacagctgcatagatgcatagtttcagctataaagggggattttgaagtgtcacaggcaattctgaatgatgaggggctaagtggtatagtcaattcagaaactaacttgagaggtcagactgttgggtgtgatgaaattgcccttgataatgacttgcttgatgattgagttgtttgcaagagggaatgaaggttggggaaatttactagataacctttaaggtttcttccagcctcaggatttaacaaaatgtcattgttttgtgtcacggctccctgatcaccctttttttctttttctttttggaatcagaatagagcaatctgaaaaatgccatctaacaatcccatttttattgatcccattgtaattgtaaatgtttgacaggttatagcctctttaaatgcccttggaatccattaacgcrtgtttcatagagttcacacagggtaaagtggtactttggtcagaacatgstttgctgaatgtcactgatttgtctctaccacacagctggcttctgaggcttataatgggcaattaggacaggaaggagttacttaagttctttttaaggtaacattaattrgattcatctcttaccacatggtgagggtcatggttattacatttaccattttgggtttggtgtttaacctctttattgtggattggttggtcctggacattttcagatttagttttgtggtaggatgttttgtctgtagtttgcgtgtgtatttagaactggaatgaagtgtactttttaaaactacgaccccaacagcaaaaaggattttacaagcacttttggccttcattgttagagtgtcttcttgttctatgaggaaataaatttgatccttatcctggaattaaaaaaaatccttgaatgtattttttgttgttcttgttgcagcaaatgcagatatcagcgattttcatgacgagtttgcttatttaggggagaacattttctaaatcacgtaaagcttaacattaacagaagaaaatttgaaaattaaaattttaagagtgaaattctagacctttcacaaagttacaggctgaatccagctggtctgtcctgtccagtcacaggaattcccgcttactattaaacgaaattttccttccttcttcctctcctttctctttccttgccttttcctctcctctcttctggcatatttctctcaattgaacagtttcttagttttttaccaccaacctcaaaggatcaagtgtgaatgaagtaattgctttattttaggctctttattttgccccatcagccccatttaaaactctgtctcatcctcctaccacatcccagatattgttttcttctttaggggacaagcttggactggaactgaaagatgtgattaccagggtcttgttctaatcctagctttaccatcaactgagaccaacccagattcaattctgcttttgtggactaccaggatactgagtgtgtatgtgtgtgtgtgtgtgtgtgtgtgtgcgcgcgtgcgtacatgcatgtgtgtgtttgtgtttgttaaaacaataacaattyggcaagcataggataaggyattggttttcactgtttactgtcatcagaaatgccagagatgtgtatttaaatgcagagttttcagcctgctcacagtgttcacaattcagataatttgggaaggatccaggactctgcattttttgtttgtttgtttgtttgtttgagacagggttttgctctattgtccaggctggagtgcagtggcatgataactgctcattgcagccttgaactcctaggctcaagcaattctcttacctcagctacctgagtagttgggaccacagatgtgcaccaccatgcctggytaatttaaaaatttttttgtagagacagggtctcgctatgttgtccagcctggtcttgaacacctgggctcaagtgatctttctgccttggcctctcaaagtgttggaataacaggcatgagccattgtgcctagctgagactctgcatttttaacagacaactggtgggccacatgttctttgagaaacagtggatttggggactttagttattattattttccatctcacggtagcagcatttttcaaagttgggccaatttgaaatgactgttttatcaaactgtagacattttgttttcattataatgtgctctctaaacacctcatatccaaacattaagaacaagtgggcttcatcatattctggactggtcagaactagccagcaagggtactatattgtgttttaggtgtcatccttgaaggatagaataaatcagctgtcgtgttctcagtgaaaagtggaaagaagttktaaaggatctgcaaaatagaattatgagacagaggaaagaaagaaacagacaatctgatctctatcttcatcggccaggtaagatttgaagtgtttaaagaacgggattcagtttggttacaaaagagtagctgggtcccagggatgggtttttcagttaggataatctgaactacatttgagagagaatttctagcaaactgcctgtccaaggatctcatggctggccttggaaggtagtgagcttcccgttattggaagtgttccagcagacatagagaatagattctgcagtgactaaaggattggataagatgtagaactagacctcagaagttttcttccaatgatgagatgctataaattttatgaacaacatacttaaaatagctttaagacactctacacgaattcgaggctgaaataagactagttaaactataatcagtcaattgattattaaaaccaagcacagacttacacccactacatacacttatgctcacaaatgataaatgccaggatagtttggattgcctttgaagtttattatttgcaggtgtagaagctcttaagttttagtttgtagtgtttctaaaagtgaggcattctcttgaactgtctttgatgatttgatgttcatayattatgtctgctgtgaatttggaaagcactgcagaatcactttttcaaagatcagaggaatgtgggatagaataaattaagtttctggctaatatttggtattcttctttagggatatgctttcagagatctgtttctggaaggagaagggaagtcatgacattttatgtgaactcaactgggcaatgtgaggttttcctatcattagctaataatatacatttaaagtcacatggaagtgtgttgcctgtgatctgaatttttattcctaaataaattagagattaaaatctgtggtttccagttcaagggtagggtaccaaaaawawttgtctgatgtgggtttttatgtcattaagaaaggcggcaacagctaagtattattggcttttcccttttcttggttgcactggtccttttcccttatcttgaaaggcggtagtaaatgttgactttttgcctctaattcacctcaatgattgtacattttaacatgttttaagataggtggttttagcccctaccttattttcctggtctcttgcttccactgctctggttcccaagaatcaaaattgaggccagatgtatgttaacatcaagaaactctgactggcgctcttgttctctccctccccagatattaatgcaagaagggaactaggacaccaggaacagccactgttaacattctcctataatttctgcctgttattcctctgcaagacctttatgagagctgaatgtatttttgttctgtgttttaaaattttaacatttaaaggcagtgctttcctgtcacattgtaagtctctgaaaacattgtatataaatatatagatatattgcatatttgttttcaattttaaagtgggattttcttgcacaaaggtttgtatacaattctatggccaactgacctatctatgtatccatatatatatatatatatcctaattatgaaatgagaaatgaaaatatgtaaagtgtaaactatataaacaacaaaaacaaatgagaatttgtaaaatataaaaatcatagtaacttagcatccataataaaatctctattagtgtttgtaagtaccaagtctttycccctccatatttagacatataatttattcaattattgattagaaattataggtaaaaatcatccaaatcatgcaaattctgaaaaactagaaatagcagctgttaacagtattggtatatgtcccttcatatactcaaatacatatatatatgcccagtattattttctattaatttttaaataactttttttactataaaagtgattcatatataattcagaacccctggaaaatataaaaatgtaaacaaaaaatggactgaaatatttccactcaaacataaaccaatcatttttaccaattcttccaaatatgtacacttatgtctgtaaaccccacacttttcaaaaaataaaaatgacacaagtatatattgctttgtggctttttaaaaaatatttaggaatgtatcaaacatttttgtgttaataaatgctcaataaaatttgttttggtatgaatttttttttttaaatctcattcctgactctaaacctcactttgagatttcccatctgtgcctctgtgtaattcgtttgtagtgatggtccactttactaattatctcttcagttgcacttaatcagctgtattactcacctactgaatatctaatttgaaatactgtgtttttatatttctaggaaccctgtttctatttttattttaggaaccctgtttacatcttcttaaaagttgtaagtcatttttaatatattatcctttaatatgtcctcttttacttttaaacttattaaacatttttattttatagtctgtattggataatcccagtatctgtagactttgtaagtctgcttcgactgtttgttctttttgatgactcttgtaaatgttgacttgtttctgtatgtgctttgcgatcccaccccactccccattctcccaatgtaagctcatgtttctaggaactttttctctgggaattctttgagagcttaaggtgaatcagttcagaaagaatttgtgttttcttctgtttgatgcattaaaggcactctcaacccatgtccacatcaggttgaattattagcttgaggtttttgggtggctacaccagcagtaggaattcaggtcatccccagtttattaagggcaagtgtccggatataaattctcaggggcgactctttcctacctagatccatgtagatccatgtgtgagacagtcacattttctgaccctctccctgtgtgacttgggtcagtattttttctattagttcagctgttaagggtaggatgtcccagctttttgcagaggtctttgatctgacttccatttttcacttgatttctgcttttaaaagccaaaactcaaggtcacctgggattattgggatataatcggctgacagactccctagtttattattgttatttttttcttttccgagttgatttcttgattacttttgcttcttgggagattcatgacttttgccaacttgggtaaacatttacagaggtggaggtgtgtgcttatgtatgcatacacacacagcagttttacatgtttttgtgctagaagagttttcactgtattttgctcttagtattctgggaaaagacgtctatagtgtgacttttaaaatagcaggacatattttgtccttcaaatatattgttattaataagattttttttttttgagatggagtcttgttctattgcccaggttggagtgcagtggcacaatcttggctcactgcaacctccacctcccaggttcaagtgattctcctgtcttagcctaccgagtagctgggattacaggtgcccacgaccacaccgagctaatttttgtatttttagtagagatggggtttcaccatgttggccatgctggtcttgaactcctgacctcaggtgatctgcctgccttggcctcccaaaatgctgggattacaggtgtgagccaccgcgctcggcatcttaaattaataccacttctcgaaaccttagggttgctttcaatttcccggatatagttttgtaatgattgtcttcaataggtatgttagcacagattgctgtttcttttccaatgataaacatcttgaagtaggattgctaggtcaaagggtgtgtttgtctggcttttgatacatattgccaaaatcatccttcagggacaggatgagatttttccatactgaaacccctgatcacagtgctcraaagtgcagcaacttcattaaactgaatattataaatttagaaagattatcaatgtgttgggggcaatggcattttatttttaaaattagattatttaatcactttaagttaggcacaattttttcttatgctcatcgatcatttgtatttcataaatttcttgtggatgtttatcaaccatttttctattgggatgctcatctaaaaatttacttgtttaagctatatatttaatacatataattttcgtttttaaactttaagaatgttaacagtttatgatgtgatataaagcattttttcaaatatgcatttgtttaatataatgaagctttgaatgtttaggtagtgcattaggccatttttatactgctgtaaagaaatacctaagactgggtaatttataaagaaaagaaatttaattggctcacaattctgcgggctctacaggaagcatggtgctggcatctgctcggcttctggggaggcctcacaaaatttacagtcatggcagtaggtgaagggggaggaggcacctcatgtggtgaaaacaggagcaaacaagcaccactgaaagagagagagaaagggagagaaggagtgagttagttggggtgaggtgacacatacttttaaatgacaatatcttgagagaactcagatcacttaccaccaagagaatgttccagaaccattcatgagggatctgtccccatgatccaaacacctcccatcaggccccaggtataacactggggattacatttcaatgtgagatttggttggagacaaatatccaaactattttaggtagttacctttatcagtcttttctttggccttatgctaaaatagcctcctctcaatctgtgactatataaacattctactgtattttcttctagatctcttaaggctttatttttcatactcaattctaatgcataaacatttgtttatgtgctataaagatttataccttatacccctgtgaatttatttgagttggcttgcctgtgtacctatttggaggtgtgatttggatcaacccaaattatttgggattttttttgtgtgttgagtctgtaacttttgaatatgtaattaccatggcatggaattggtaatatagatgtttgcacaggcaatggtgaactccaaattcatgatggaacaagcaggtgcgtgtgttaaggaagaaggaataagttaaaggatgtgccaagacagaaagttaattataatgcttaacctttagggatcatttccccaacattttgtatgtttctttttcttcctaatggccattgggaatggaatgtgtgggattgactaggaaggctcttgcatcatcaggattttcagtgacttgagaaagctgggaagattatattaccagcactttgtgtcttgtgtacagccttttgcatgcatgcatgaatgaagaaaatcatttgacaggaaatagttgtgttagaatacttgtgcttttgggcaaaccaattcttcagttcatttttcatttctagtggctatatgccttcattaattcctccttttattgttcaattaccctttattgagcactgtctatattgccaggcacactgagcattaggataaaaaaataattatagtgctggctttatcctcaggaagctcaaagtccagcagttgtctcataactgaatagggtttagtgtgatgaatgttatgacttatgtgcaaggtacagaggtgatggcatatagcagggcacaccaacacactgctgatgatgtgtgtgtggcagtgattaaggagactcctgagacatcagctggacattggaagattgaaagataaagggagttcaccttgtggataggcagtggaagaaggcattttaattgtgaaaacagaatatggaaggcatgaagtaacatgatgttttctaggaactccaggtagttttgttggtaaataatgttaagacttgctagtggatgaggcagaggctggatcaggggaggtcttggggaatgtacaaaggaatctgaagtttgcttcctccttcccaattcttctttttttttttttttttttttttttttttttgagacagggtctcactcgttgctcaggctggagtacagtggtgccatcacagtatactgcaacctccacctcctgggctcaggtaattctctcacctcagcctcccgagtagctgggactacacagtcacacaccaccacacccagctaatttttttcaccatgttgcccaggctggtctcctgagctcaagtgatccacctacctgggcctcctacagtgctgggattacaggcatgagccgtcacgcctggcccacctccctcccaattcttaacaattgaaaggatttccacaattttgttagatcattgcaggaggttaaattggagagagacagagagaaatgaaatgagattagagctagagaacttttttttttttttttttttttttgagactttgtcacccaggctagagtacagtgttgtaatcatggctaactgcagcttcgacctcttgggctcaaccaatgcttgcgctttagccttttgagtacctggaaccacaggcacacgccatcacacccagctatgtttgtttgttttttgtagagatggggtctcactttgttgcccaggcttgtctcaaattcatgggctcaagtgatcctcccactttagcctcccaaaatgctgagattacaggcatgagccaccgtgctcaaccaagaatggatttgaatctattaagttggaatgttggactacattctggaatgggatgcataattaagtatcaccagactataagtgtctgtggaattgattggtatggataagatggcctaaggagagtaagcagaagtagaataggaaagggccaagtacagagcttgggggtaagccaacatttcctagtcatcagaggaagaggatcctgcaaagaagcttgagaaaaggctatcacaaagttggataagaatcaagggagcatggtgttgtgagtagggcaaaattaaaacgagtgattaatgatgcaaaatgccaacagagggtcaagtaagatgaggacagagaaagaacctttttagaggtcagtgatcttaaggttttgagttggggtggaggaagccatggttcatcatataaaaatgtaaaagcaataagcacagtttcttcagtatcctgggccttgaaaagggaggatggggtaggggracgagagagaaggaagaagttggggtcaagggagtactttttctttcttgaataggaaacctagcatgtttatattctgaggactgggaaatgaggagagaacaaaactgaagccacagaagagagaataattgaatgaagtaaactgcagtgcaaaacaagatgtggccaattgaagactaggatgaatgggagagatatcttgcaaagtcattgttagccaaaattggtgacggtgactatcactggaggatcaagacatgcatttcacaaatgtttatgagcacaaagaactatggcagctgtgtactgggtgaaggatggagccttgattatgccctcatggaatgattagtttttcttaagtctgagttgttgggatgaacttcattgaaatagttaatgtgactttgacactactaagagtatgaatattacatgttagttggaatagtggtccaagacatatgcaaataaattcagttatttctgagttatgaattctgagcccaattatttttaccattatatttttgtttctgtgagccatataaatctgagatacagctggaggtttgggggaataattcctaggatatgtggctgcaccatctccccttaactcccacaaagaatggtttggttttcatggtccggctccttgggatggtggaggaggaagcttctgacctggccacactgcattggctcatgggtgactgccctttctgtgattgcagccaccactttttagtccctgatccccaaataatagttcactgtacttatcttaccctccccaaagagaaggagattttccttccaaataagaaaactctttagggcatcctcagggatgcctatgtgtttgtaacacttttagcacccaacatagccctttctcttttgatttgtggttcactctattaagcaaattacattcattgtccctagagaatgggttctaagtagatttgtgtgccaccctgctggtctcactcttgcgggcttttacttgagatgcgagggtgcatgtgttgactctgtcttaccgtggagtgttctggcttgcctactaaactccagggatagggacagccataatcctgccttctctgtttgtgactgaatctctgtggtttaaatactttatataaaacttacacatttcagctgattaataacagctatgcaggaacattcaattctgaggcaattttaatgtagtcgttgataaaatacaaactatcataataaaactgtttaatttacagttgattccacaggatcaggggatttccatttcaaatgggctcctgatgatctgcctggattcccagaatttctcatctgggtatacaaattaggtttcttgtaaccaacacttcatattttatttatttattttttttgtagagatggggtctcaccatgtggaccaggctggtctcaaactcctggcctcaagcaattctcctgcctcaggcccacagactgcygggattacaagtgtgagccaccatgcctggctcccttcatattttaaagagaagttacacctacagcgctttcgacttttgatggacacatctttctagagcatagttcttgcattcctcttttactgaaagttgttaattgctttgttccattagccttagcaggaaaaatcctatctctggagttttaggtcccttggtttatcttaatttcgattaggaataagagaatacctacctattcagctctcaaacagcaatgaatattgcactgtgttcatcctcattacctcccattattagtttacattctgggacactttttctatctttaatgataagttcattcagaaatatgttcccacattgagccatacttctggttttgtgtgattaactttggcaccccatgagtagtgtctgttaaaattaaatgcttgttttgcctcaagagagctagaatacatacacatattaccgtgatttactgttaagtgtgcagattgaggtggtttagaagtttaaaattggtttccgaagggaaatttacaagaaaagtataacagatgaatatgtgattagaactgcattccttttttaagtaaattaaacagttttattatgatagcttgtattttatcaatgactacattaaaattgcctctggaattgaatgttcctgcgtagttgttattaatcagctgaaacatgtaagtgttatataaagtaaaaagagctataaaccaaggagaaagtctgaagatagaactttaaaaaaccactgttatttccaggtaaaatatttaatttccaaagaaggttagcatatgttaaaagctwaatcttgttctgcatttgttggctacatttatatgaatttttatatggaagttcctatccagggtatttattagtcattttggaagtttttatccagggtattgattagttggcatcttatatgttctttcagaagctgtatgtattatttttaaaaatagaattctaattgagcttttaatctgtctgctgaatcaggaacattacatgactttctttggaggggaaggaagccagtggttagttttaggtataaaagagatcttcaagcacggtctttttaacttcytgtttctgtattatttcaggaaatagaggcagctttccctacattagattgttagcacagaataacagtagaagggttcagaaatgaagctaaaaggaaataagagaccagcatgatgctggagttcccctaggccagtcaaattatgttcaggcctttagtccatctggatgttagttctatgtatgatatgaagttggggtgtctgattaggtatatttttccttttgccttagaaccatttttttttccagtccctttatgtccccactgtaatgtcatgtgtatcatttatgtaagactgttttgaaactttgtgtacctctgaatgtctagcctggaacaattgtcacattaccttcattacatggcttttaatatgtcttactcattggtaggtcaagtcctctacttctattctcttaatttgtcttggctattttggtccttagcatttcactggaaatttaggagcaggtttatctatagacttccttggactttgaatttaaataatcattttgattgcaaataagggcagttttgactctttcactccttacatgttatttattgttgtcttgtttcattgaattaactaggctgtctagaactgtgttgaatagtaggagtaatagtgagattcttgttattcctgatattgaagaaaatgcttctaaagagaaccctattcctttttgaggagtattatttaaaacagctcagcatttccatgtgtttgattttagcatattaaaacataggaaacatgcagtgaacaaaaggggttattatgagcttagtgtaccagctgtcttaaggttttcattgttttagaggcatttagttagatttaattctgactccaaaatgaccgacctctctggagactgtattttgtaggagagaataagagtatttccattttaatggaaaagtggcaaagcttccttccacttcgtaatttttgtggacagtattccagcattgtccaacagatttttgtgataatggaaaatgtatttctgcactgtgcacgtaggagagcaactatcatattggacagtgtgggcctagactttggagttctaaccatgccccatttactagctgcacaggttcctgcctggtttcagaaggcttattcttttgggctagcacagctcacactgaggcacgtggctgggggagtagagcagtccttgctggattgcagccatggctctccttttagcctgatgcctttgtgcaagtgagcagctggcaccattgacaagggtgatcctggtgactacctctggaggctctggaccctgactgctgaaacaggagaaaaccctggccccatgcccctaagaagtcacccgatcaaagtggagcctgttgtttccctagtcacaagtcaatactaagagatttggctagtgacaaggaaatttttcatgttagaattcttgtacccagctctttttagaactggactactgttctcccatattcaggaggccatgaaccaaccagtagattgtttattgtgcttgctgatttatgaaaaaacttctttgtacagagcttctgaaaggggtaagagaaagggagaatagcagtgttatggactgaagaatgtgtctccctgaaattcatatgttgaaatctcagtccccaaggcgatggtattaggaggtgattaggtcataagggctccgccctcatgaatgagattmggggccttataaaagagaccctacagtcggtgtgttgactcacacctgtaatcccagcactctgggaggctgaggcagaagatttgcttgagctcaggagtttgagaccaacctgggcaacacagcaagaccctgtgtctactattaataaatattttaaaaaattagcctggtgtggtggcgtgtgcgtgtagtttcagcttcttgggaggcttaggtggcagaatcacttgagcctaggagtttaagtctatagtgaggtagatcgcgccactccagcctgggtgacagcaagaccctgtcctaacatgctcttaggagtttcataaatgtgaccccagaagagctctctagccctgtttccacttatgaggctaaattgagaagatcgcagaccacaaccccgaagaggcctcatcagagcccaactttgttgtcaccctggtcttcgacttccagccttcagatctgtaagaaagaaatgtttgttgtttaagccacccagtctgtggtagctttcatagcagcctgaactgactaagacaagtggatagctgtctggttgttttagaaagcagggctgcatggtgtggggatgctgctgctactcattcctgctcattccagtgttctggaaaatgaggtagggtgggggaggtctgaaccttctaatttatttctagctgttcttttttagcaattaaagcattcgttggacaccagttgcttttaattcagttccatctgcactgtacttaatagatattactcccaggttcttataaatggctggttgttattcttggtttcagagctattttgagtttttgtcttcatttgtattttgactggaaattgggtgtggacatattggggagttggggctgacatcatctttattcagaagtcactttatgaccatgtgcgggatatattaatttcactacagcttttgatcttaataaaatgtctctgggttgagctgactgatcacgaagattttaaactttaatgtttcctaagaggattgatacagccatccagagaataacatagtatataggagttatcttttgacagatcaagttccatttccaaatgatataaaacccacctgtgtccacatccttatgccttcttttgaatctatgatttgataacttaagaaatctatctatgcattagatattgcctttccggtagagctatggtgtgatcttatgctcatgaacagaaaatgaatttaagaatcctcagacctattgtccagttcttttctttaagaagaacttgctattgactttgtcaaaactaaatctgttgccttgggcgacaccctccaaaattcagattcagatggattacactaatagctttatgctacagatcaagtcatataatgtgaaggtacaattgcagctcccttattgttgtagacgcttgccgggatgaagttctcaaacttaacatgctcttaggagtttcattaaacatgtgtgtgtatttttaatgtccaggatttataaatggtaacacctgccctcagttcttttttgcactggtccacggtgtttcagttacagtctttattgaataattcaaaagttctctcctgaaacaatatttctggcagtccttataattgaccaggtggaatgaccttcagtttggatgaaagtccaatttatttatttatttaataaaattccaaatttgccttttctgccaggtattaaaagcacttaaaactttttctaatcaacaatactgaacacttcagacacttatcagagactttagtcttgaattatgtattattttaaattattatttccagttctattaaaggccatgtgaggccactgattttttaaatggacagtttagtgagtggttcttaaagtgtggccccatgagcagcaccagcatcacttggagatttgttaataaatgcaaattcttggatccaccccagacctactgaatcagacatgcagtggggtggggctcatacatctgtgtttgaacaagccctccagtgaattctgtgtgccacatattacaatttgagaaccactggtgtaatgcagtagttaacacacctagctttcaacctagacccactttgggtgcttgttaaaatacagattcttggttctctctcgcacagcatcttatgcaccagctttggagaagacacaggactcagtgttactatattctgcagtaaagcttgctctgctcaccttatatcatattagatcacttactagcaataaatgtagaatataatacgtttgttctagtccaagtatctgtgaagaactctgatttaagataatggcatgtaatcagacatacgcttcagaattaaggagacttaaaaaatacagatgtctagtttctactaaataaaaaactctgttaaaagtctggttttgttttgtgtttaagtttcatgggtgctataccatccaagaaccatttatttttatcttcagctttcattgagagttgataggagaagaaatagccatattaatatttttgtatattttataccatttgataactcttactaggaattagtagaagaaaataacatctctctctctcaatagttaatacscaactcttcattttcccttttgctttggttaccagagagctcagagtaaaattttgcactcagttttgaaatacctatttcccttgcttactttaatccatgactcttgttctttataatcttctgtaacctatctgaaacttatttggaagtagatggggccccaaaactaagtaaatgatggaatatctgccctttgctttgaaatgggcttcttgattgactctttcccagcttggggtcagtgtcttctttatatcatccttcctttcatagacacaatacaattgttggtagcctcactgtgaaagagttaatgtttcccaataccaggcactgacataggcagtaggaaaaatctggttcattttgtttcaaaatacaccataccacgaataagtacaaacagctgcaatttgggcttggggccaaaagaaatcagtgtggtgctatgaattccagctgagaggaggagttcatgtaacttagatcagagatcagtctctgtaacgagaccatcagaccccagaaggggaagggtccttgtatgtcacttcagttacctccatcgctaccaccaaaagaaactggggtagttctttggagaggtggccttttagaaatctaaaattatacccttggagccgcttctctgcaattggctgaacacatcacattttatcccttgcccccagcactgtattactgtaaaatggggaaatctgggaatacaaaagatttagagacttgccacctgctcattttatcgctatgacttggcttaaaacaacagtcgctgtaacctcagccctttggcacacgcttccttctcaagccccaggaaattcttggtcaggtcgcacccacagccactgagtctggttgtttcttcttctcccagattttttagggaatatcagtttagtaaaacttatttttttgtaagcggactccttttgtatcagaattcctttcctttaaaaaatatttttatatttaytattattttttaagtagagatggcatcttgctatgttggccaggctggtctcgaacccctggtctcaagtgattgtcctgccttggcctcggagagtgttggagttacaggcttgagccaccacacccagcccagaattccctttctaatgtcataatgccttatctcttttttggagtggtcatcaaatcccttttcacactagttagaagttttctgtgtgatattctccattctctacatatttggactatcccactgtgtttttctggacatgtaggacagcatctttcaggcccattagcagatagaagtctttcaagtggggcctcacagctgtttttaggtctccggttggtttttaggtcatgtctcagacataggggctttgtggctactttgtggttttactatctcctcatagtttattaaaaaagaggctccttttcccttccattttctactgctttcctgataaaagacttcagccattatttttaaaagtgtccgctattatattttaaaccctttcataacaggaaaacaggagttaaccactcacataagttagagaggggaccccccttttttggtgattttcatagttactaaatcattgtgaacagagaaaagtcacttaattccctttgcttcacttcctgatttcttcaacagagtggtaacatttgagatgctattcatagaattgtatatcaaagaatgaggccagctctttcttggtgctccctcaagttggtaaaatcacgtatgtgacttctcaggaagccagagtatttacatatcctcgacccagctgggaataattcatcctctagtacaatactagttttctttagattcccctctatatttactgttttagagaggtattgccaagagggttttcaatgaggaagaatggtaatatgctgggagcaggaaaggaaatgaaattaagcgtctcattatttttcccatgctgaagtagatattaggattgtattccacaggtcttattttcttccccctccccacctcaaaacttcaggcaggatgtataagtctagacttaggttatatactgattttttttaagcttttatctccagtttaattagaggctggtgaaggaaactgggtttcttatttggctctcaaactttgaaaataaacaaaactttcatatatttgaatagcacattgtgggccaaacaacatctggaagagattagtctcactggtaggcagaagaaatttcataatgtaccatcttcaaagaacatggtacctcgtcacatttctcatgtgacatgtatcctggaaacagaagtacttagggccacattgctggagcatctgcctttgtctttgttttgtgtttaacataaatgtgtctttctaatactatgatatttctttagcttttttgaaaacacagctaaacttggtggtacgatgctgcctgcgctgttgactgtggtctagacttctcctttttcagaagacctatttgacttttggcaacgtgcctcttagagtttgtgatttgtttgagacatcttttcctgtcttctctaaaatcaggcacatatgtgtctggggtagtcatgtactttgtaacagtcacttttagccagatcttggggatgtctattcttatggttagtagtgacacatgaaccctctcttccacttaaaattattttatgtaagatgactgcttctccttctatccctgctccttcctctcctcctcctctactctgcctccctcaaacttatagaaaagttgcaagtacagtaaaaaagtgtgaagaagcttttatctccctaagtcaattaagagtgaattgtttacactgatgcgctaacatcttcaaatactctgtttttctcacaaacaagcacattcttcaacatagtcacaaagcaaccactgaaatcagtaaattcaccctattatcttactatcatctaattatcagatcccattgaaattttcccatattgtcacaacaatatccttgatagtgaaggatccagctcatcatcttgcactgtatttataattaggtcttttctaagtctactttattatggaatagtttctaacttttttcttggcttttatacccttgatctcttgattataggctgttcattgtgtagaatgttcctcagtgggtttgttacatgtttcctgttgattaaattcagatttcaaacttttggcaggaacatgacagaagtgatattctcattgcattttgtcaggtggcacacactgttgatttgctccattattggtgatgttattttgatcacttgattaaagtgatgtcttccagacttatttactgtacagttattattttgcactttatggtaagtattttctagggaagtgtttgagtctttgtaaatatcaattttttggtcaaacttttatttgtattaaaatgaacttacggattcctttttcattttcaaacttagaaataattagaccagtgagtacctttcaaactagtttccttgtcctttttacatgtctgcataattcttttaagtgctgtcttaactgtctgctcaaggtaaccaaggcatcatgtatttccctaatctgaggaacaggcatatctccaaggagcctggcacctttctgtagagaatggtattaagagacgaagatgtaagtgttaggtgtgctcattgttattgggatatcactattcccaggcttctcactgtgcaacacacacattgataactgtttttatttctatttctattgaaaacctctctccttctctcctggattacctctttctttctctcctggttgacccctcacctttcaggctttgacacaaactctgggctaccttcccatggggacatcctcttcacctcacttagactctgacactctgcgttgggctgcccttggagccactgaggaacattctacacaataaacagcctataatcaagagatcaagggtataaaagccaggaaaaaacttaaaaactattccataataatttttaaaaattagtttgtggtatgagaacacatggacacaggcaggggaacatcacacaccaggggcctgttggtgggtgaggggctggggaagggatagcattaggagaaatacctaatgtaaatgacaagttgatgggtgcagcaaaccaacatagcacatgtatacctatgtaacaaacctgcacgtggtgcacatgtaccctagaacttaaagtatattaaaaaaaaattagtttgtggttagtggtcatattttcttgtatgccagagttttccatttaaggagaatgttctttaaatattacattttaaaaagttgtaaaatagcgtttttctttaagacttatgctttcttttaattttttcattgataacatagactacatatatttaaagtatacaatttgatttgttttgacgtatgcatatactctcgaaattatcactgcaatgaagatggtgaacatatccaacactcctcagcttttctcctgttgtttgaaatccttccctcatgtcattctgctcttatactcccaggcaaccacttaattgcttttggtcactataaattagtttgcattttctacagttttatataatggaatcatacagtaagtgttgtgttttgtctggtttattttactcggcttattttgagagtgatagatagtattatacataccagtagttcatttgtttttattgctgggtagtcttctgttttatggatacataacaatttgtccattcatttatgaatggacatttgagctgtttccagtttttggctatttacagataaaactactagaagcatttgtgctcaagtctttgtatagacaactactttattttctcttgggtaaatacctaggagttaaatggcagaactggataattaacttttaaagaaactgtcagattattttccagactgattctatcttacattcccacatcagtgtgtgagagttgcagcttctttaaatcctcactgacacttggtatggttggttttttcaattttatccattctaatagtcatgtagtggtgtttcattgtggttttaatttgcatttttcctaattgctcttctatgcttatctgccatccgtatattatctttggtaaactgtcccaatcttttgcccctttttgaattttgaaatttcttatatgctttggatacaagttccttatggacatatactttgaaagtattttctctcagtttgtggcttgccatttaatttatttaacaatgtcttttaaaaagtaaatttaaatgaagttcagtttttctgtttgttctttatagatcctgcttttgatattttgactaaagaaaaaaaaaaacaagcttttaaagaatttaagttagttttatccagaagtcttactgagagctatagactgactgaggactacagcctgggaggagtctttcagaaaggttctgttggccaggagtggtggctcacgcctgtaatcccagcactttgggaggccgaggtgggcggatcacctgaggtcaggagtttgagaccagcctgaccaacatggagaaaccccatctctactaaaaatacaaatggcacatacctgtaatcccagctacttgggaggctgaggcaggagaattgctcgaacctgggaggcggaggttgcagtgagccaagatcgtgccattgcactccagcctgggcaacaagagtgaaactgtcccaaaaaacaacaacaacaacaacaacaacaacaacaacaacaacaacaamacaaaccagaaagattctatcagactgctccaaaatagtgtttcagctcacagtttatatacaggttcagtgcatataaaatcacatcraagtttgggtgcaagagtctatctagttatagattacagaagtgtaatcactaaccctgtcaggtgttctcttatgtgtaggaaaaggcaaggactagggccatttatcttttaaggaatacagtgactcaggcaagagctggagggtgggaggccctgttctctattctgttttgtcttcaatgcacgtttctggagagctacacgttgtcacagagtcaggggctttgggaaagtatgttgacragcagaaatgagcaaatatgtcttcttacatttgttactttggctcacaggtatcttatctaaggaaactttgcttacgcaaagtacacaatgattttctcttatgttttcctctagaagttttatggttctaagttttatatttaggtttatgacccttttcagttaatttttgtatatggtatgaggtatgaatcagttggttttttcagtttatatttttgcttatggatatctaatagttccaccatgattttaaaattgtgacttcatatttaaaagtggagaaaakgctatactacactgtcttaatcatttattatacttttaatgtctctgacagggacaatagtaatgacccctctttcaattttattattagtcatttatatcttctcaccttttttctcgactaatctggttagagcgttagcaattgtattgatgttcttaaagaaacatcttttggatttgttttatagtttctatataattatctactattttattttttcctgcttactttgattttaattaaattatccttttctagtttttgatggtaaaagatgaggtcatttatttgagacttttcttcttttctattataggtgtttaatgctatggttttcctctttggcactggtttagtgacatcccacaaattttgatatgttttgttktcctcttcatttarttcaaaatattcaattcaaaagattttttaattacctcctttgacttctttgatttataaggtatatacagatacattacttagtttccagcatttgatgattttccagagatcattctgttattgataatttaagtgtggtcagagaacagactttttatgactcaaattcttttacatttattgagacttgttttatggcccagaatatggtctatattggtacagatttcttttgttcttgagaggaatgtgtagtctggtgttgggttgagtcttttcaaaatgtcaaattagatcaagttgactacttgtattgttcatgtctcttatatccttactgattttttctgttctgtcaattaatgactgaggcatatttatctctggctatatttgtggatttgtttatttatccagttactcgtttttacttcgtatgtttcaaaaatctgtaattagatgcatacacttttaggattgttatgtcatcttgataaagagactctatcattatgaaataacctttttttttaaaatccctgctaatatgttttgctctaaaatctactctgttagattttaatattgatacttcagctttgttttgtttagtgttagctgggtatttcgtttttttatccttttacttttaatctatttgtgtcttcatgtttaaagtatggttcatgtagggagcatatagttgtgtcttgctyttttatccagtctcataatctatgccttttaattgagttgtttagaccacttacatttaatgagtgtatatatatgtgttttcatatggttatgtttaaatctatcatcttgcttttgtctattgtcacatttgttctattttttggatttggtatactttatgatttcattttatcttcttgttggattrttagccataattctttattttatttttagtggttgattcagtgtgtgcagtaggctttaatttattgtaggcaacttttaagtgacatcgtacccctttatgtatagtacaagaacctcacaacaatacagtatacttactttactcccctgctttttaaaacttttgtaataaactctattgttattttcattatctttttagaacaactttattgaggtataatttaataccataaaagccagccatttaaaattcaatagtttttgatatattaagagttctgcagcagtggcatgtgcctgtattcccagctattcaggaggcagagacaggatcacttgagcacaggagtttaaggccagcctgggcaacagagccagtccttgtctccagatagatagatagataatgtgcaatcatcactccaatcaagctcagaaaatgtttatcattccaagagaaacctcatatttgttttcaatcactccctatttatcctcttccaaactcctgaaaaacacgaatctactttctttctcatagatttacctatcttggacatttcatgtaaacaggcttatrgatttgtggccttttttgattggcttttcacttagaaaaaaatgcacaatactgcatgttgtagtatgtatctttctttctttttttgttgctgctcaataatattccattgtttaaaaataccatatttaactttatcctttcaacagttgatagacatttggattatttctactttttgatgattctgtaatgcttctatgaatattcttggagaagtttttgtgtggatatatattttcagttcttttgggcatatacttaggagtggaattgctggatcatatgaaaatgctatttaatattttgaggaactaccagattttcacagtggctgcaccttttatattcccaccagcaaygtataagggttccaatttctccacattcttaaccaacacttgttattatgtcttttaaattatagccatcctagtagttatgaagtgtgaatttggcttttgtttccctaatggctaaaggatatccagtgtcttttcatattcttgttagccatttgtctgttttcttagaaaaatatctattcagatatttaatcattttaaaattagcttgtctcttcattattgaattgcaggagttctttattctggatacaagtcccttatgatttgcaaatatttttctttctatgagttgttttcaattatatttttcagatacttatataataaaatggtttttatatttatccatgttattactattaatatttttggtatccttcatttctttatgaggatccatattttcatgtggtataattttctttctgtctgatgaacttctttttaacatttcttatggtccaacgtctgcttatgatgaattctttcaccttttgtatgtttgaaaatgtttttattttactttcacctctgaacattttttaatgtgtataaagttctagattgatagttcccccacttcccattattttaaagatgttgatcacctgtctttttgcttggattgtttctgatgagaaatctgctgtcattcttatccttgttcctctctaggtgtctttttttttctttaatccagtaactttaaagattttattgttatggttttgtaaatttgattgtgcatttttctttgtttcctgtgctcatgcttcattgagcttgttgagtctgtgggtttatagtgtttatttttagccttgttttttcactctccctttttgctttggggactccagttacgtgtacagttgacccacgaacaatgcagatccatttatatgcatatttttttccaaccaaatgcagatcagaaatatagtattcatggtatgcgaaccccacaggtatggagggccaactttatatatatatatatatatacatgtaggttccacagggctgtctgtggtgtaactgcccaatgggttctccttacctactccccaggtggaactgatttatcaagacaggagacttgcaatagcgaaagagtttaattcatgtagagccagctgaatgggtgactggagttttattactcaaatcagtctccccccaaatttggagactgaagtttttaaagaataatttcgtgrgtagggggccagggagtagggagtgttattggtggcactggagatgaaattattgggagttgaaatattatataaacatatatattatataaacatatgtattatacaattgaatataatacctattatatatgcaatatattatatagaataaacataataattgaatagatatataatagttgaattgcatgtaaatgtagttttaataacaaggttgccaagtactgtattactggatgcttacattgttcctaaaattatcctatcatacatgatattgcattaagcatccttgtagcaaattctttgtcctttatatttttcccatagtataaattcctagtggtggagttacatgccttctgattcagcacactttttaggatcttgatggaaaccatgcatatacacacatttccctaatattagcattccagaaaggttacaacagtttcacctataccagaaatacatttgagcgcctattttcctactttgtatacaaacacatcagaaaaccatctttcaaggataactttcttatgttgaggcagttttaaatcacaatcattcaagcactcagtatygattttgattcattctcccaaaggtgcttgaattttaagctacttgaaaccttaaataatggaagatgtctctgttaagagaactctctgctgttgaacactgttattcagggctgaatcactttacttaccacagccacagacttctatattctgactagctatttcgacactttgtttccacccccattggtctcttttcttccctaattttcttcccttcacttcatatattcacattccttctattttaggccatttgggaattactttttttttttagaatagttaactttttaaatttttgttttatttttaatttttgtggagacagagtttcactatattgccctggctggtctcaaactcctgggctcaagcaatcctccggccttggcctctcaaagtgctggaattacaggyatgagccaccatacttggctgaaaattacttctcatgttagaaacatgcacttactcttagaatgaaatatttttcaagactcatctgtggttggaagagtctagcctgcccgaagcttggttatagaggttgtaattgtccttgttctgaaaactacggactgaaaacaccccagcttggcacagtggcgccctcagtagaaatgtatccaccctatagggtgcttctcctgtaagtggaaatcctaattcaaatttatatctgcattgctctaggtccctatgcaaatggctgagggtcatggcatgcacacacaaagaagatcaagagtttagatgactctggaaagaaacagggcagaatgaagtctgtctcttacccagagtagagttctacttttcaagaggatttttttcagtcttctttgtggaatcctcctcatttccccttaaaatgtagatctcattccttctcttcttgctctctgtcttcatgagtgatcacactcccttgagctcaattttctccaactcagaaatctgtagttccaggcctttcctgatttactacttctaagtagagattttctcccattttctaagcattgtaacacaaactagcttgaccttgaggctaaacagtttggccaatatatcctttgccttcatagtgacacttattctaagatagtaatctccataatttgaattttacaattcttggttattttggtaagtgtcaggatagcattcctctccatcaggaccacttctaaagtgaaaactatacagctgggaatacagtctttgaaattaagacrgtgtttacttatataagttttggccagtttctccagcttctagaatacctgacctggcccatcatgacctgataaaatacatgtaaaaaggcgcaattgtgttaattgtgtttctctctctgcagtcagtgtgcgcaggatgggctagttgtatttcttccttggaatgcgttagctctgtgccctgtagaaaaaatgatagacttttagaccaatttgaaaataaaagatctaattgaaaagctggagaagcaaatgaaaagactgatcttatttgtggaaaaggatttatgaacatgaaatatattgtatcctgtgagtacactgaagcaagatcttagggctgacactttgaggaagagaggaaagtagccacagagagaggaaagcagcctgtagccacaggtggcgatggtattttaaaacaaaacataaggtagtcatttggtttctcaaatgcatttctgatttctttgttctgaatctgcatgtgaagcaaatgaacccatagcctccttcatcccagctgaaccatttgcttcactgtcagtgaagggggtagagtcagtggtagggataagtaacccagataaaaagtttagcatggccatgtctctgtcatcctgttttcccctttcctttttctttttgattctttaaaacggaaattctgattttatcaactttagaaatgaaacagtattgattggctcctttctcaaaaggtgaagaatgttctcctttttcttgtgattttctggagttttcatcttagcttattagttacacgtatttcaactgtatagctttttttttttcctattagttaaaactgcattcttttttttttgtcaccgttactatcacaggtattctgtgcttatctggattgacaagctgctcttgccaaaggtttcctgagcacattattttgatttgtcatatgagtagttgtattatgtgtttgaacaaatttttcagggagaaatatatcttaattataccatatgatccagcaatctcactgctaagtatatacccaaaagaaagaaaatcagcatattgaagaggtatcttcactctcatgtttattgcagcactgttcacaatagccaagatttggaagcagcctaagtgtccattaacagaaaaatggataaagaaaatgtggtacttatacacaatggagtattattcagccagaaaaggaataagatcttgtcatttgcaacaacatggatggaactggaggtcactgtgttaagtgaagtaagctagtcacagataaactttgcatgttcttatttgtaggaactaaaaaaattaattgaacatatggagacagagaatagaaggatagttacgaggggctaggaaggtgggttggttaatgggtacagaaatatagttaaatagaatgaataagatctagtatttggtagcataacagggtaaatttattgtacattttataatagttaaaagagtatagttggattattggattgtttgtaacacaaagaaaggataagtgcttgaggtgatgcgtacccatttaccatgatgtgactattacatattgcatgcctgcatcagaatatcccatataccccacaaatatatacacctactatgtacccacaaaaattaaaaataaaaatattaaaagtggcttgtttttgttattgcaggtaaacaaaggcttgattggctgtagaatttttgagtcgttccatatttctgacaaaatcttgaaatttattccttcatcttatttgttggggtgaggttaatggctgtgtccagcccatttttttcccattatgatttgatttattttccccatttgatttttttaatgggatttcttttaatttttaaagcttattaacttaaacctgttttkcacttatcatttacttcatagttttcctggaatttgtcacacttttttaaattatggtaaaatacacataacataaaatttaccctcttaaccatttaaatgtacagttcagtagtgttaagtatattcagactgttgtgcaaccaatctccagaactcttttcgtcttgtaaaactgaaaccccgtacccattacacagcaatttctcattcatccctctcccccagtccctggcaagtactactgtactttgtctctattaatttgactattagctaccttatatatgtggagtatttgtccttttttgactggcttatttcacttagcataatgtcttcagggttcatccatgtcatagcatatgccagaatatccttttgaaggctggatgataagccattgtatgtatataccaatttagtttatgtctgttcatctgttgttgaaaacttgggttgcttctacctcttggctcttgtagatagtgctgctacaaacatgggtatacaaatatctctttgaaagatcattaacagttattttggatatatacccagaggtgggattgctaaatcatatggtaatcctattttaatttttttgaggaacctctatactgttttccatagtgattgtaccatttttggtcccaccagcagtgctgggttccagtttgttcacatccttgctaatacttcttttctttttttgataatggctatcttaatgggtgtcagatgttatcttactattttgatttgcatttgcattttactgatgattagtgatgttgagcatctcttcatgtttggccgtgtgtgtgtgtgtgtgtgtgtgtgtgtgtgtgtgtatgtgtatatacatttttgtagaagtgtctactcaagtcttttgcccaatttttaagttgtttgttggtttgttgtttttgattttgagttgtaggagttaggaaagtttacttttattgctaagtaacttctgttccacttatttttgtcaagtatgccgattatgttgaatctttatgtcctgcgatttatatccataatttctttttaaatttttttatttttattttttattattatactttaagttctggggtacatgtgcacaacatgcaggtttgttacataagtatacatgtgccatgttggtttgctgcatccatcaactcgtcatttacattaggtatttctcctaatgctatccctcccctagtccatcaccccctgacaggccccagtgtgtgatgttcccctccctgtgtccatgtgttcttattgttcaactcccacttatgagtgagaatatgtggtgtttggttttctcttcttgtgttactttgctgagaatgatggtttccagtttcatccatgtccctgaaaaggacataaactcatccatttttatggctgcatagtattccatggtgtatatgtaccacattttctttattcagtctatcatttgatgkgcatttgggttggttccaagtctttgctattgtgaacaatgctgcagtaaacatatgtgtgtatgtgtctttatagtagaatgatttataatcttttaggtgtatacccagtaatgggatggctgagtcaaatggtatttctagttctaratccttgaggagttgccacactgtgttccacaatggttgaactaatttacactcctaccaacactgtaaaagcattcctattttccccacatcctctccagcatctgttgattcctgactttttaatgctcgccattctaaatgatgtgagatggtatctcattgtggttttgatttgcatttctstaacgagcagtgatgatgaacattttttcataagtttgttggctgcataaatgtcttcttttgagaagtgtctgttcatatcctttgcctactttttgatgaggttgttttcttcttgtaaatttgtttatttgtagattctgtatgtccataatttctaattaatctagtaaattccattattgtaagcacatgtactttttcccaagccagacttccatggcaccaacttggttttctgcagtggcacttctgtcttttgtagttttaaatttttagtttctgcagtgatttttttttatttccttaaaaaattttaaaatcaaacttgtaaatgtttataatttaaaaatgtataggtagatactttatttggcaaacaatgttagctatcacttttaccatgttcactatattgttcacagtatgataagtattactccaggtgtcttaggtacattaatcaattcaattcttatagtcatatgtggcagccttactattattatacccattttacagaggagaaatctgaggcaaggagacatgacataacctgcccaaggtcatactggcaggacaaggatttgaacctaggcagttggattccctagcgtactgtacttgtaactactatgcagcactgcctctcttcctccttttcttaaaaraagaaatgtatgtgctttatttgaattctgactcaaccaaccaaactgttaaaagttataagaaaatcaggggattgtgaacttaccgaatatttgatgatatcaagtacctctgattaattttttaactgtgatgatggtaaggtagtttccttataaaagagttcttttaaggacaaaacagctaaatatgtaaacataaagttacttacagcatatgtattatgctgagttatttacagaagaaattaaatgatgcttgggatttgttcctctatattatctttaaatatattcattttaattgatatacatttgtacatatttatgggatacagtgtgatattttgatacatgtatatacaatgtgtaatgatcaaattaaggcaattaacatatccatcacctcaaaccttcatcatttctttatacgggtaacagtcaaagtcctctcttctagctatttgaaaaaatacaataaattgttgtttgctataagtcactcttcagatctatagaacactagaacttatttttgctatctaggtataactttgtacatccattaaccaaactctccctatccctccctgtcccctaggcttcctggtatctagtaagcactatcctactctctacttctgtgggatcaacttttttagctcccacataggagcgagaacattgcagtatttatctttctgtgcctgacttacttcgcttaacatgcagtcctccaggctcacccgtgttgctgcaaatgacaggatgtatgtaatttaaagtgtcaaatagctctgaggcttgccaggaaagaggagtccttgcttgcttcctacaattttaccttccccagagctaccactttcagttgttttggcagcctcatttgatatttgcatttaatctgtaagattttttttaacttctttttgaaaatttttaaaattgtgaatgatatgttttgaaatatgtgctatgtggaattctaaggtttttatttctttttatcttactagtttggaatatttatagatgtaccatgtgcaaagtgtaccattcacatactcccatcctgaacctccttttcttagtatagttaggtcatgattttgactaggccattattcagtgttaataggatgatgaccttgttaatgctgttcatacctgagccatgtagaattctatgaatcctttycctcttctgcaaattttttgttctatttaaactaattgttcttttgatgtttgcttagttttctatgtgctttttactcattcagtcctaaatgctcttggttatccaaatctcctcttgatatactacttcttgagtctttttgcttatcacccaaggatttcccttcacaattatgccaggaattcctttttttctccctcttgtattggactcctgtttcctgtatcacatgcctgtctttttcttagtttcctccctgttttgcagaagaacatctgccaatagaattctaggttgtcaactgccttcctcattgcttcattgtcttctagctttcagggttgctgttgaaaagtccagagactttctgattcctaatcytttgcttatgagcttccctacctgctttttgatattttataggacctttttaatatccttacagttaaaaaaacacaactcatgatgacagatgctgtgtttaatgtgggcatattgaaatcaaatgaaatgggcaggtaggcactcagtgggcccttacagtctacacagttatgaccttacgttttaggaaatattttgagttagtcatttgacttcactccaccccatttcctttactcttttattctggaattctatttggctattagacctgctggactcattttgtagccttctcatttttactgttctagtcttctttacttttttttttttaactctacattttgggcacattccttaaagttatattccaatctgtctactgaattttttttgaattcttaaaaattgacatataaaattataagtatttatcatgcacaatatgatgttttgagtatatatatattgtggaatggttaagtctagctaattaacaaatgcattacctcacatagccaccatttgtttgcggtaagaacagttaacatccactcccttggcattttccaagaataccaygtatcatcattatctatagtcactgtcctacacgatrgatctgaccttattcctcctaactgcaatagatctcctgtctaactgtaaatatgtatcctttgatcaacatcttcccaactccctctccccacaaccaccccagcctttggtaaccaccactttgctctctayttctgtgggaaaaacttttttagattttgaattaccactttttaagcatcctgtttttgtttgaataagtgcaatatattcttctcgatgttactattgttaaacctattcatctgctcagattccagagagaaaaatctttccgtctcaggccttagatgatgtaagactggcttcagatgctatttagctctgataggcggaagagataataagaaagaagacaagcttcagctctgaactgcctgtatctcatcttgttcctccaggtttgggcttcaggaatttcttctattttgtttatatcagactatagggctctctgaagaatgatacatagtttgaaaaatttccccattttatctaaattgttgtatatctgtaatagttttctaaagtttttagaataaatttgtcctttccaggtttcagcattgatggtttcttctttcctyctttattgcttttcattcatctattctgttttggagacgaaggctttaaaatctttacccacgtagcttcccccagctacctctgagaagtctgttttatcttttgcatcactaattttattttttgctttttaaaaatattctactttctgcttcattggttgcttttattcaagttcataattcagattttcttttctggttagcgcagactcttttctggtctcatatttctttctatggctacctgctctatgtgcaaagattctactatgtcccctggaattttaagaacatgagctagaaattttctgttaatagagttttctcttttatatagtatatctatttcttaagtaaatatttgctctgattctagaatcttccccttttctgaaccacaatgtgttctatttgcctggtggatttagatttttctcctttgcttatccttagggaagtcaatgcatattcagtattgggtattgccttgttttctttccttctttccttctttccttccttccttccttccttccttccttccttccttccttccttccttccttccttccttccctccttccttccctccctccctccckccctccctccytccttccttccttccttccttctttccttctgttttaaaattttactttaagttccgggatacatgtgcagaacatgcagtttcttacataggtatacatgtgccatggtggtttgatgcacctatcaactcgtcatctaggttttaagccccgcgtgcattagtaaccctgtgttctttcaagaaacttgtatgagtcactatttgactcaagtccagacaaaggaaaaaggttacatttgtagtagattaatttaccaattatgaattcatattcctgtgaggcctgggaaaagagccagcatcagctccagaagtaatcaaagggaagtttgcctcaaaccaaagactttgttttaggtatttggtgtggcactcagtaattagcaaggtcattgtcacttggcatggctgcccttgccaggagccagctgggagtgtctttttcccaygtgttttctgtggtagtcatcatggccacctgtcaaccagaagtaaatgcagccagaggttacttgcttggctggcctctgaagccaggagcccttttaaaggagttagtgtgttttaaatgtaccccaagtcttcctgggcttagttccctcagcccccatcgctctaaactaggggtatcattatgggtttagtggattctcatttgcttattttctggttgtgcagttgcagtttcacatgaagaggatatcgtgttttagtccttttgtcaacctcccatgttgattctttcaagtatatatttctgaacgtttaagatctatttatagtttccagggctgattcaggatattcctctgttataatcaactggtcatttctttggtaatctggcacaaagaaataagcttatagctttcttatttggaaattgtattttatatatgtgatttgaatcataggggggatattgaggtaatttagacccagtgattgtaaaggaatggatgaatgatccaataaataaatagatgacaaagctcatcttttgcaggtgagaggcattagaagtaattttacggttttgagaagagaaatatagatgagaagagatgcctaggagaatagaaaatggagacaactaggaaagaagagaagaggcagcagtaatgctccaagggcagttggagagcctgatgtcagctgggcaaacccacattgcttcatggttttctgtggctagaacacagttttgaagctcaagcaaaggaaatggagagttaggttggtggcaggttggaagagttgcagaacaggtatccaagtacttggaagagttcagaggggtgtatttcttagtctcactctgttgcccaggctggagtgcagtggtgcaatctcggctcactgcaacttctgcctcccaggttcaagcagctctctgcctcagcctcctgagtagctgggattacaggcgcctgccgccacgcctggctaaatttttttttttttttttttgtatttttagtagasacggggtttcaccatcttggccaggctggtcttgaactcctgacctcatgatccacccacatcggcgtctcaaaatgctaggattacagacgtgaaccaccacacccagccagggatgtatttctttaaaaattattgtgcaactctctagttgacagtctggggctctggtaaggcgggggttcatctgtcaaagtgagccagcttactcagctagatactgtatggcatgattacttagggtaatgtmttttttgtcttgtttagttcccccatgatttgtgcagttttgtaaataagttgagaagtaaatagatttcatgatataattttaagacttcactcccaagggaaaactgatttatacctttgaagttatgtcatttagcccttgtatttggcaaagtaagcatacactattttataaagcgttcttgtaatgtgtgaataggttcaacaaaattagacgtgtcgcatgttttaggagaaggcagttaattttctgtcttattttcttcttgaaaatgtgaaactaacaatctgtcatgtttattaggcatctcaaggaaatgaaacatccaaatgagggttaaatggttaaaattttatatagatgagaagagcacaaggttctctgtctcagggttactctgcaggtcatctgactttcatcctactttctccattttttatctgacatttttgcttaaagattccatgtgctttccatctctttttaatctttgatcacatggaatattggcctatggaaagagtatgaatcttagcataggccctggttcagacctcagctctttcatttcctgactgtgtgactgtgggtatgttgcataacctcacaatacctttcaaagcctcagatgtctcctctgtaaaataactgaatagtatctgcctcaaactgttggggaaatgactgctccaaagctcagcatccagtggcctttcatgaaatcccagtctygcatctttccctctgctgttgttagtartaacgycatatgacatatttgtttggtggatctcatccatttctatttcgctttccttactctaagctaggtgcctctatttaccttttaggcaactctctatattctgaatattgaaaatattttaaggttatattgcttaatgacatagcttggtgaaatgatattggacctgagcatatagtatgcgtccttaagaatggaatcttatgtgcttgattttttgctttttagttgtattattgatatattcatttatgtcacatagarcaagataatgtgaattataaatacataagagggagaaaggaaaaatgaaagtaggagtgggcaaaaaataatgccaggaataataartacatgagaaggagaaaggaaaaatgaaagtaggagtgagcaaaaaatagtgmcaggaataagttcagtgtaaaacagtgcaccttggggttcctgtaattttcttgggtaggtttggcactctagcagtcatcttgaaaaaagaaaggtcctgtatacatatgcttttctcctgggttgtttatttactttcacagtgtgataaacaagtctcatttgttcctaaaactgggactaaggagaatatcagtactgtcacagggcagctgtggaattcggtgttgaatgtcatgacaagataacttgagaactttactacttatttgtgaatgaaaataattgctgtaatgggagaagaaaataggaaggctctacagttctaagcagccagaacctaaagtgattgaaactgtagtatcaaggatgctgcacaaaaatgtagcaattaaaaatttaagcttatagaagttgctgtcaaacctagattatttcttagaaaagcagcacttctgagctcctcatttgcccagtatccctgagctaatatagggtagcaccaagggatgtgggggacaaaggacttggattaaatgtccaactccacagttcctgctgtgcaagacttggatcttgtgacatctggttcattacttttactattatgaaaagtatcatttcccaatagtttaaaaagtgttcaggtatcatcttgcatgttggtgaaactaggaagtatatttacagacaaaagctccttaaaggcaaggttggcttagccttactttttttttttgagacggagtcttgctctgttgcccaggctggagtgcagtggcacgatctcggctcactgcaacctccgcctcctgggttctagtgattctcctgcctcagcctcctgagtaggtgtgtgccaccacgcccagctaatttttatattttaagtagagatggggtttcamcatgttggtcaggctggtctcaaattcctgacctctaatgatctgcccccactggcctcccaaagttttgagattacaggcctgagctgctgtgcccagccaataacgtcttttgaataaaagaaaagatattgttagggagtatgaacatcaccagaaaatgaaaatgtttcttaaaaataaacgaatttttaaaaattattttcttaaaatgaaaaatttttttcttctggactaaattgcaatgtggaaagagtcacatcagcctttggacagaactagggctgtgatttactacagggaagttagcatctttctgagttttcttaatgaacacgtgaataagagatttggttatactttgtgcttatttagcatcctctctttgaggatgtcaaaaggattttagaaatgttctctttctcacacaggtggacgtctgatttatgaagctccccatccacctatctgagtacctgacttctcaggactgacacctacagcatcaggtatcttgcctttctttagtcttaaaagcggtaactaagttccttgaggagatataggcagggaacacattaacttcgttacgtttcatataggcctgggaaccggagttgctgctgtagtcctggttctaccattaaatgtgtgactctagtcccttttcttctctaagcctcaattttttcttctgcaaataggtggggttggacggggtgctatctaatcacttgacggtattatggtagtctacytttatccgaagcttcactttccacagtttcagttacctgcagtcaaacttggtccaaaaatattaaatgaaaaatttcagaaacaaacaattcacaagttgtaaattgcacaccgttctgaatagtgtgggtgaaatctcatactgtccatgtgatttgtccctttgtcctgcgattccacactgtgtgtgctacctgtacattagtcactcagtagctgtctctgttatatacagggttgggtactattcacagtttctttttctttttctttttcttttttttgagaaggagtctctctgtgtcgcccaggctggagtgcagtggtgccatcttggatcactgcaacctctacctcccaggttcaaacaattctcctgcctcagcctcctgagtagctaggattacaggcatgttctaccacgcctggctaatttttgtatttttagtagagatggggttttgccatgttggccaggctggtctcaaactcctgacctcaggtaatccttccccctcggcttcccaaagagctgagattataggcgtgagccactgcacctgacccactatccagtttcaagtatccactggggggcttagaatccactcctcagataagtgggggtggttactgcattctctttgccctctatgtaagccgtcagctctccactgtggattattcaattcctttattatttaatggcaggatggcttttcccccgactcaccctcctcagctctgcaacttgaaactgtcttcccaaaacatctagctgggatgttggattcaaacctatgaaaattcctcaacttaagagtatttggacagatagcacagaagtcgtggcttttagaccttagcttttccctacyggctttctgtttgcattaagctrgtatttgacacttgatgtctagggattcttacctcctttggccaatggtacttcacacccatatgctagtccttttatgctaaatgtgggttttcctgttgttttccaggtacacagcttctcctagcatgacttcgatctgatcagcaaacaagaaaatttgtctcccgtagttctggggcgtgttcaccacctacaaccacagagctgtcatggctgccatctctacttccatccctgtaatttcacagccccaggtaagggcttcaaactagcagaggtctgaggtaatcgtaagtttgtcaaatatttaaactgggtttcaggaagtgtatttgactctagggatcatgtatatctctctcgctatcatttggtgtgtattcgaataatggtgcttttgtgagtgaggtgccatttcgttcaggaagcagctggaacaatgaacaagtgattttagtgaactggcctctgttcataggaggccttggttttcagtgcttaggatgtctgacattataggcatcaaactctaaatcaaagtaagtcagtagtaaaccctgctgcttttcctctcttggcttttttgtgggccggggggtggggtggggtttaatgaaatatatcagaatggatctaattttataacaagttttctgagggctgtcttgttgtcctcctcctatacttactcttttgccttgatctgttctaggaactttgaaacaaaatgcaattccagaaacttctgagcagcaatcgtatgagttatttttttctgtccagtgaagagcagtaatacggcagggacatggtctttgttcagatgattttacagcctgatttaatcaggcattggctggactctttcagattcaccaggcagcagggtacaatgtggaaacagactttggagtcataaggccacagttcacatccctgctcctctgattgcaggataaagagccctagtcatgctagcttctctcagcttcagtttcctctcatgtaatcattcctcacatgatggttatatggataaaatgatggttcatatacatgaggcatacagaggtgctcagcaagtgtagtttcccatttactcttcatttatcttctttctatagtgtgacctcctttcttatttgtgacaatcattttttggccaactttatttttatttatttatttttttgagagagagccttgctctgttgcccaggctggagtgtagtggcatgatcttggttcactgcaatctccacctcctgggttcaagcgattctcctgtctcagcttcctgagtagctgagattacaggcgcccgccaccacgcccagctaatttttgtattttagtagagatggggtttcaccatgttggtcaggctggtcttgaactcttgacctcaaatgatccacctgccttggcctcccaaagtgctgggattacaagcctgagccactgtgcccggcctcgggcaactttgaagaaaaaagcatactttcaagaaagagccatactgattgaaatttgaacttgatacagaacgttgttccacactgtttttttcagtatgattttgcaggctattcaattttgtatgtattttaagtaggggtttgtgtgtttgtgagagaaggagagaaggaggagagggaaaaaggagaacaaggggcatttttccctcatatagtatagtgttttctcctcaacaccatttgggatgtcatcattgttatcaaccttgggattttatcatatgaataaagccctttattcatatcatatgaataaagaataaagtactaaggcctttagtattattttccagaatgtttagtgttaccatcgtcatacgcattcctctttctggtaagtggaccattgtcctttcaacacttcatttactttgggtgtttggtttcccttatcttcaatagacttttttggtgtctgagagacttggagaatgggcaaagagatttagtgcctgttacctgaggtcaccatttcaaagtccactgcagctgttcccatgtaatgactcttcttagtcctttcgtgaagtgagttaggctagtgcgggttttctagacagggcatttccacatcccggtttgctgctgtcatctttcagcatttccaacagcatcttcttatctatatatcttctctgttacacaagctcctatcagctggtgaggaatagaaatacctctaaatgactcatttaattaaaatgtttaacactgcccaaaggagaaagaggttctatttcatacaatcactgggggaaatgtgtactctcgtaaattctctgtgggaaagtaaattggtacagtcactctggagggtaattcaacagtatctattaaaaktatacacttctgcacatgccctgctcctgtcttggaatctacattagaaaaccactcacacrtgagcccaaggagtgtataaggaatgtataaagatattcattgaagcattggttgcaaaccaagaagtacaaaattttgtgaatatccaatagtagaaagacttaatgaattcaggaatgtggacatgattgaaatactattcagtcattttatttatttcttttttttttttctgagacagagtctcattctrttgcccaggctggagtgtagtggcacgatcttgtctcactgcaacctccaccttctgggttccagcaattctcctgcctcagcctcccaagtagctaggattataggtgtgtgcctccatgcctggttaatttctgtatttttagtagagacggggtttcaccatgttgtccaggctggtctcaaactcctgacctcaggtgatctgcccatcttggcctcccaaagttctgggattacagccatgagccactgcgcccgaccactattcagtagttttaaaatgaggatgtctacacagctatatattactccaagatatcgtatggaggaaaaagaaagcaagacgcaaaatagtacttatgggaagataccaytaaaattctaaaacaagactgtgtatttttagggagaagtatatggtacattaatggaaatggataatgaaagtcctagaacatacattcttaacatagttatattgccccaagaggacaaaaattgggttttgggagatgaaaaaaatccctccagarcttatacctctatccaacaaaatcttattccttagtatttagttttttctcattagaaaaaatttaaatgtaattaatttttctccttaaggatcactaatgagaaaaaaatatggccaagaaacactggtttcttgagggaggcacataggctcaccagtcaccctgcttcaatttactaattacctgagcctgaggggaaggtatccaccctcttagtgcctctatttccttacccacggaatgagcatagcattaatgaagccaacctgatagggttattttaaggcggaaatgaaataatttctataaagctcagaatagtgcctggcacatattctgggcacatattgcccagtgcatattagcaagcattgttattattgctcagcaagccttgtggcagggctgggggatacaagaataaataagagaaataagttttgccctgccagagtttacagatatagtgggagatacacagataaaacaaaaagttacaacgctttgtcacccatgcaggaatgcacaaatacaggaagtatgggtgctctgggaggaaagtggagacccaagaaaagatttagaggatcagggaaggcttcttgaaggaagaccactaggctgaggacaaattaatatgagttattttggtaaaggagaagaaaaagcataggtgaatgtcaagtgtcccaaggtatgtgtgtgtgagagagagagagagagagagggagcaaagcatttagaattttgttttggatggttgcactacagtggggcatgagattgtaaacagtgatgtccctagagccacctataccaactcacagaagcagattgttaaattttcaggaatttcgcgagccaattgacttcatgccagcagcttgaaatcagccacatggaatagttatactgcagaaatcggcaagtgctagaattagcataaatgggttaggttataaagttggagattttacagggtctttcaaaccgtattaatgaatttaacattgatcttaaaagaagtctttgttagcttaatggtcccagcctttgaaatagacctgggttcaagttctgactttcgataatagtkttattgagcaagtttattaattaaccttaaccagggtagttgcattattctcaccgtattttgggaatagtggcagcctctgatggttggggaactaagcccacggggaaggagtcagctatacactgggacattaggtcatagagatagatagcttcttctggagagatgcagaccattgggtcacttggttcccaggatcctttggccaatgatgggcctcctaattatatgtcaattcctcacatgtaatttgtacagtgaaatttagtccaaggctgacttgcccttgccccgaagcttctactgatgtcttctctcttattatcagttttgcccaagttcaaagaaggtaaaaataatttagatatagcatcttcttaggcaagcataataagsagctcactcagtcaccttagcctggtattgtctggcacatcaacttgcwttcttttccagtgaattcagggaccttgtaaagataaatccacattcaagtgtgaaaggcctgaaaatccttttctaaggccaaaacaacaattttttagaaaaacttttggttttgtttgttactctattcattgggtaacaaagagcatttttctaatcaaggctgcctaatactacatataaacgaattaataygaacaaatagcttgtgattgtttcaaacaataatagggaagaaagcttgcattgtcacgcctgctgggattgctgtttagttagttgaaagatatgccttgttttttgaagtggggcaagtttgtattctctgctttacccctgccttgactctgagacagatttttgttttctcatgctgagagagcacctagctcttacaaagctaggtgatgaatactaagacgaaactggactagcagcagcaagaagatgccgtgtttgtaaccgatttataattctgctggtccagacactgaaaaagagttttcttatccaaaggaaactcctgggatgtatttgcagacaggaacctgttcatcattaggttgagttaatgtgttcgtatcctgtggatattgggggcatggggatggggtaggaaaccaaacaaacttgcagctctccagagccattttctgtttctagcactgtgttaagcattaccctgtgcttgatcaggttactgtggatagaagttggattaaaagtttcattttcattgttcatgaaagagtcaatagttcagtaccagagtgagcagtttggcttctcttaaacctaggattatattagaggccagaataggtatctgaaaacctaaaagatattcaggtctcacacctgtgattccagtaaggcaagagtcttctttatcagtatttttcatggtgtatcattctgtctctcatttgttacatgaccattttgttattttttaattttcatttttatatttatttgaatttaaattattttattctaaaatattttactttaagttctgggatacatgtgcagaacatgcaggtttgttacataggtatacatgtgccatggtagtttgctgtacctatcaacccatcatctaggttggttttttttttttttttcttgagatggagtctcactctgttgcccaggctggagtgcaatgtcgtgatcttggctcgccacaacctctgcctcctgagttcaagcgattctcctgcctcagcctcytgagtagctgggactacaggcgtgtgccaccatgcctggctaatttttatatttttagtagagatggggtttcactatgttggccaggctggtcttgaactcctgacttagtgatccgcccaccttggcctgccaaagtgctgagattacaggtgtgagccagcatgcccggcccatcatctaggttttaagcccgcatacaataggtatttgttctaatgctctccctccccttttccccmactcccagacaggccctggtgtgtgatgttcccctccctgtgtccatgtgttctcattgttcatctcccacttatgagtgagaatatgtggtacttggttttctgttcctgtgttagtttgctgagaatgatggttttcagcttcatccatgtctctacaaaagatgtgaacttattcttttttatggctgcatagtattccatggtgtatatgtgccatatcttctttatccagtctgtcattgatgggcatctgggttggttccaagtctttgctattgtaaatatagtgctacaataaacatgcgtgtgcatgtgtcttcatagtagaaatgatttataatccttcgggtatatacccagtaatgggattgctgggtcagatggtatttctggttctacatccttgaggaatcaccacactgtcttccacaaaggttgaactagttcacattcccaccaacagtgtaaaggtgttcccatttctccacatcctcttcagcatctgttgtttcctgactttttaataatcatcattctaactggtgtgagatggtatctcattgtggttttgatttgcatttctctaatgaccaggaataatgagctttttttcatatgtttgttggacacataaatgtcttcttttgagaagtatccgttcatatccttcacccacattttgatggggttgttttttctcttaaatttgtttaagttccttgtagattctggatattagacctttgtcagatggatagattgcaaaatttttctcccattctgtaggttgcctgttcacaaccattttggttttaagtcaagaacataaagatattttgatccctccaagtgatttcctgtagctttcattgaagatgtgaatttgggtagattttcaatatcttagttaagagattgttcctccaattctcattcagtgttctgataaaaagtgattgcggctgggtgctgtggctcacacctataatcccagcactttgggaggttgagactggtggatcacctgtcagaagtttgagaccagcctggccaatatggtgaaaccccgtctctactgaaaatacaaaaatcagctgggtgtggtggcgtgcacctgtaatctcagctactcaggaggctgagacaggagaattgcttgaacccaggaggcaaatgtkgcaggttgcagtgagccgagatcgcactactgcactccagcctaggtgaaacagtgagactctgtctcaaaaaaaaaaaaaaaaaaaaaaaaaaaagtgattggtgtctgtttgttgtcttttggaagacacttttttttggacatccttaccaataggtactctcaacaaaatatgtattttcaaaatctgtgttttaggttttatttctgttattagaaagtggattttttttttatcaaagcaactgaatttcacattaaatgggttttttttttgaggctgaaagattcgtctttttggatagaactttgtactatggcagttttcagacattcacaaaaataaaaataacaatctcaatatagccaacacctagattcagtaataacattttgacacagttgcttcacttgctccttttttgggggatgaagtattttargatccctagcattgtcatcttttaaaaaatccccttatgttaatatgcatatctaaaaaataatttgcttaaataaccacactgccatcatcacacttagcaaaagtataaataactccttaatatcacttgatactcaattcacattcaggtttcttcagttgcttttctaaaatgtgttcttgtagttggtgggttatttatttttattttttaaaaacattgattagatcagtttactcttctgcataaaatgattcaatgactcttaaggtttaaaaaggcaattccacttcctctctttattttctaagtgagaaaacagattgaaattataactagaatatttcacaactgaagaatacaaaaatgagacacacagaaggcttcagagtaagggaattcatacaatgtttgcaattattaaattatgagtctctgaaataagggattacagattatcttgacagtgctttctttcaaactaaaatgtgaacaattaattgcagtatgaagtatgtttccagtgccacacgataatttcgtctaacatagaattgagaaaaggtaatgcatgggcgtagacccgggtggattttggttcaaatctagactgttatacaccatagctgggggatcttcagtacataggtctttttcagctttattttttaaaatctctagaattcaaataacatacagtgtggtaacaagtttaaatggcaaaaataactgttaagtgctttgtatagtatcagccttttgatagatacctgacgtatgttagttctttcccttttccccatgattagtctggaagttcttttttttttaaattttrttattattacactttaagttttagggtacatgtgcacaatgtgcaggtttgttacatatgtatacatgtgccatgttggtgttctgcacccattaactcgtcatttaacattaggtaaattctggaagttctttacagggagaaagaggtaaccactacatatggtctgtgtatgtggtatgccagaagacccatcaaaggaaggccacgttggataaacactctatggaaaactccaacgtattgccaggaataaatgcatgtggagataaacattgagacttctgacttcatcttgaaccatgtttctattagaagttaaatttgttcccatattgcaatttaaattcatcttgtgcctccttttgtgtttataaactcagataaggtttgagaagagatattattttggaatctgaaagcccattttgaattttctattcataagatgaaattgtacaggggtacctagggtaaaccacataagacacctttcatgtttgtttatttttctttctaatacatcctttttaattggtttagtcttcaatggttaatggagctactcctttatctttcaaagtgggtctggctttttcccacttcttgcccattagggaactgtttgcccaatctcgttttcatacccctagattctccagctgtctttctttgaacttttgttgcagctttgctgtgaatacacactaaggtgggacagtggcctgctgtttttttccacctgagaaaatcatagagtccaggggatttctgtcttttaagatctgtaccttgccttaataagactgtcatttaaaaaaaatcaacctttccctgctgtgtgaaaatattaatactgccatttggtaattgcataacatcacttaagagctgcccttaagttaaacttatcccatttcatacatgattgtgttaggcaggctcaggccaggagaaaagcaaaagtgggttgatactttcttctcagcatcagagaatatgtttattagagggccatggagcatattagtttctgaaagcatagattagaaataaagcaactttcaatgattcagacaacctttagtagcaggaattccaatcttgaaggaagaagagtagggtgtgtgtgttggtcaactagttggctgatttcaaagtcagaatgtccagcaggtgatatcaaacatttgcacttagatgagtttccaccaccaarcataggaaggttttggagtggagcaggtgtaggccccagctctcagggctttgcctacttagaactctgtttagtattaccttaattgtggttgatcaggttactgcagtaacctggtaaagacagtggaggagaagacccaggaagcatcccagctcaatggcacaggtcatagtgcagggctcacctctgacatgmtggattgtgtagagatgactgatgggaacttaggaatgagctgtcatggtcagatgtagatcccacttatgtaagataggtcaagatggagagacttaaccatagatcattccactgtctcattcaaaactagctggaaaactagggcaacactgaagttacaggggggaattcaatgctatggcagtggaggaagaaaaggcaggagaaacaaggtggcaaatgattgtgaggattatagtcatcagttacaccatggtatttactctttcaaatgatgtatcacaaatatacatgatatggtttgactgtgttcccacccaaatcttatcctgaatcgtagctcccataatcctcatgttgtgggagggacctggtgggaggtaattgaatcaygggggtgggtttttcccatgctgttctcatgatagtaaataagtctcatgagatctgatggttttataaagggcagttcccctgtacacactctcttgcctgyggccatgtacgatgtgcctttgctcctccttcaccttcygccatgattgtgatgcctccccagacatgtggaactgtgagtccattaaacctctttttctttctttctttttttttttttttttttttttgagatagtctcgctctgtcacccaggctgaagtgcagtggcatgatcacagttcactgcaacctctgcctcccggtttcaagcgattctcstgtctcagcctcccaagtagctgggactacaagtgtgtgccactacacctggctaatttttatatttttagtaggatgggatttcaccatgttggccaggctggtcttgaactcctgacctcaggtgatccacccgtctcggcctcccaaagtgctgggattacaggtgtgagccaccgtgcctggccctaaacctcttttttttttaataagttacccagtgttgggtatttcttcatagcagtatgaaaatggactaatacatttactcataggagtcttaggaccacatttggctttttttttttttccccttaaaatggttataaatgaattgctctcagtatctaaaatattaagtgctgctttttaaaaattgtataagtttattgctgtctcttagctcatcacagtaaaaacatagtttatagagataagctgttttgtaataaaaaaaggacaataatggaaggtagtagaagataataaaaactaaaatagatacaaaattccattttaaaaattgaaatggaacaagtttataaggaaatatattgttattagcctttcagcaaaatggcctaatggaaaataatttttcatttttgtcagtatgaattattacattgttttgacctgtcagttcaagtaaggctgcattttagagctggcatttggtttatgaagtttcaagtcttctgggttacctgattaaaagttgcaggagaatagatgtcacagaaatagagttctcagtgttcaacatataaaaggtgatctttttctctttgttttgtggatgagtaaattaacattccctcccatttcttcctctctctcttaatggctcagactgaattcaatttctttctttccttttttaaaaaaaattaagcaaaatgaaatgcttacagggagttataatgcaataacatagccattacccagctttgtaaaatgttaacatttcgatgtaatttcttcaagatcttttgggacttaatacataaaacaagtcagtaattacagataaagttggagcccttttactccttcctaattccattagcctcctctttgcccagrccattaattgatacttatcgtctctctgcatgtgcttgtgaatgtatacatatgtgagaaaaacataaaaaatayatagtaggcttctgcaggtttatttattgatacataatatttgtacatgtttacagggtacatgtgatattttattacacacatagaatgtgtcatgatcaagtcaggctattcaggctattcatcacctcatgtacttattatttctgttragatatgttgggaacacatccatgtgttcctatccatatcaatgtgttgggaatgttttaagttctctcttcttgctgtttggaaatataccatacattttcgttaactatagccaccctactctgctatcgaatgttagaacttactccttctatctaactgtatgtttgtacccattaactaacccctctttatcctcacctccccattacccttcccagcctctggtaaccaccattctattcactatacatgagatcaattttttttaatcctatgttcatagatcccatgcctgggatatttgtcattctgtgtctggcttatttcgcttaatataaggactgccccccactccattcgtgttgctgcaactgacatgatttcattcttttttatgaccagatagtatcccattgtgtatatataccacattttctttatccattcattaattggtaggcatttaggttgaatctgtgtctctgctattttaaatagtgctgtggtaacacatgaatgcaggtatccttttgatatactgatatctttttcctcttctacttttttttgtttatttttttgtttgttttttgagacaggttctcactctgtcacccaggctggagtgcagtgttgtgatctcagctcactgcaacctccaccacccaggctcaagtgatcctcccacctcagcctcccaagtagctaggaccacaggtgtgtaccaccatgcctggctaatttttttttatttttggtagagacggggtttcaccgtgttgcccaggctggtcttgaactcctaagctcaagcaatttgcctgcctcagccccctaaagtgctgaaatgatgccctccctcccttcctcccttcttcctttcttcctttcctcctttcctcctttcctcccttcctcccttccttccatccttaccttctctgtctttctttcttttttctcttttctgataaatagccagtagagggatacctagatcatatggaatgtctggttttagtggtttttttttttttttgtagagacatcttcatactgtttttttttaatagtcactgtactaatttacattcccaccaacactgtataagagttcccttttctctgcatccttgccagcattttttttttttgtctttttaataatagccattctggctggggtaagatgatatcttattgtggttttgatttgcatttccctgatgattaggaaagttaagcgttttttttcatatacctactgggcatttgtatgtcttcttatgagaaagtgtattcatatcctttgcccactttttaatgagattatttgcttttttttttttttaactcttgacttgtttgagttccttccttgkatactctggatattataccttgtcagatgaatagttagaaaatattttatcccattcaaccagttgcctctcattctattgattgttttaaaacatttagtttaaaatagtcccttttgcctgtttttgtttttatttgtgcttttgaggtcttagccataaaatatttgcctagatcagtgccccgaagtgtttcccaatgtttttagtaattttatagtttgcagtcttaataaagtctttatcttgagttgatttttatatgtggtgagacataggggtccagttctattcttctgcataaggatatccagttttcccagcaccacttattgaagagggtttctttcctcagtgtaggttcttgatgcttttgtcaaaaagtaggttggctgtaaatacagggatttatttctgtgttttctattctgttccattggtctatgtgtctgtttttataccaataccatgctgttttggttaccatagctttgtgatatattttgaagtcagatagtgtgatgtttccagctttgttctttttgctcaggattgctttagctatttaggcttgtttttggttctgtatgaattttgggattgttttttctatttctgtgaaaaatgacattggtattttgatagagattgcattgaatctgtagattgctttgggtagtgtgatcattttaacaacgttaattcgttcgatctataagcataggatgtctttccatttgtgtcctcttcagtttctttcatcagtgttttgtagttttccttgaagaggtcttttccctccttgcataaatttggtcctaggtattttattttatttttgtagctttggaaaggggattgccttctttatttcttttttggatagttcattattggtgtgtaaaaacactattgatttttgtatgttgattttgtatcctgcaactttactgaatttatccaacgtaggagatttttggtggagtctttagatttttctagatataagatcatgtcatctgcaaaggggggcaatttgccttcctcttttccaatttggatgcctttatttctttctcttgcctgattgctttggctggaacttctagtattatgttgactaggagtggtgaaagtgggcatgctgtgttgttccagttcttagaagaaaggctttcagcttttccctattcaatatgatgttagctgtggatttgtcatatataggctttattaggttaaggtatgttccttttatgcctagtttgctgagagtttttgtcatgaaagaatgttgaattttatcaattttttttgcatctattgagatggtcatatggtatttattcttcgttctgttaatatgatgtattgtgtttattgatttgcatatgttgaaccatcattgcatccatgggataaatcctacttgatcatggtgcatggtgcatggtgcattattattattattattwtttttttttttttgagacagagtatcactctatcacctaggttggagtgcaatggcataatcatagctcctgggctcaagggttcctcttgcctcagcctcccatgtagctgggactataggtgcgcactactatgccttttttttttgtagagatggcatctcactttgttgcccaggctggtcttgaactcctgggctcaagtgatcctcccaccttgamctcccaaaattctgggattacgggcatgagccactgagcccaacgtggtatattatctttttgatgtgttattagattcagtttgctgatattttgttgaggattttttccatctatgttcatctgggatatagccctgcagttttctttttgtgttgcatccttttctggtttcgatatcagagtaatgctggccttgtagaatggattaggaaaaatcacctccctttgatattttggaatcctttgaggagaattgtgttaattctttgtaagtttggtagaatttggcagtgaagtcatttagtcctggaatttattttgttgggagactttttattactgattcagtctcattattcattgttggtctgtttaggttttccactttttgattcaatcttggtaggttgtatgtttctaggaatgtatccatttcctctaggttttccagtttgctagcgtatagttgtttataatagtctgatgatcttttgtatttctatggtatcagttatactgctttttttttcatttctaattatatttgggttgtcttttttcttggttagtctagttagtagttcaattttgtttatcttttcaaaacactaacttctttggttgatcctttgtattgtcttttaaagtctattttatttagttttgccctaatctttctttctttattttttaaatattaacttttattccctactacacatagtatttttattattattattatactttaagttctggggtacatgtgcagaatgtgcagttttgttacataggtatacacatgctatggtggtttgctgcacccatcaacccgtcacctacattaagtatttctcctaatgctatccctcccctagccccccaaccccccgacaggcccccatgtgtggtgttcccctcccggtgtccatgtgttcgccttgttcaactcccacttatgagtgagaacatgcagtgtttsgttttctgttcttgtgatagtttgctgataatgatggtttccagcttcatccatgtccctgcaaaggacacgaactcatcctttttttatgccctaatctttattattttttttcttctatttatttggggcttgattttgttcttttctagttttttgagatacatttttgggttgtttattggaaatctttctagttttttgatgtaggaatttattgctataaatttccttctttgcactgctttggttgtatcccattggttttggtatgttgtgtttcaattttcatttgtttcaagaaattttttgattttctttttaatttcttccttgacccaatggtcattcagtagtattttttttaattccatgtatttgtatagtttccaaagttactcttgtaattgatttgtgtttttttttttctattgtggtctgaggagataattggtatgatttttatttaaatttgttgagacttttttatgtggtctattctgggaactgttccatgtgctgatacaaagaatgtatattctatagcagttggatgaaatgttctctaaatgtctrttaggtccatttttgtgtaaagtgtagtttaaatccaatgtttatttgttaatttttttcccaatgctgagagtggggtgttgaggtcaccaaccattattgtattggaatctgtctcttcctttaggtctaataatattatacatctagttgtttctgtgtttggtgtatatgtttagaattgttacatcttcctggattgattcctttatcrttatgtaatgaccctctttatctctttttactgttttaatttaaagtccattttatctgacatgtgtataggtacttgtgttcattcttggttttcatttgcatggaatatctttttctgtctttttactttcagtctacatgtttcttcacagatgagatgagtttcttgtgggtaacagtatagttggatcacgtttttaaatccattcagccaggctgtatcttttaagtggaaagtttaatctgtttacattcttggttgttattgatatgtgagggattattcctgtcattttgttaattgatttttggttgtttcatgtatcctttttcctttctttcttaytgtttatcattgtggttttgtggttttctttagtggtaacatatgaattctttctcttcctcatttgtgtgtttgctctaccagtgggttttacacttttgtatgttttcatgatggtagaaattatcctgtcacttccaagtgtaggactccctgaagcatttcttgtaggtatggtctagtggtaattccctcagcttttgcttgtttgggaaatacattatttattctacatttatgaaggataactttgctgggtatagtatctttactggcagttttktttgtttgtttgtttgtttgtttttttcctccttcagcacttcgaatgaatgtgtcatcccatcccattctctcctggcctgtacaatttctcctgacaaatctgttagtctgatgagggttcccttataagtgacttgatgctttttgtttttcttgaggtttttataattctctgtttgtccttgacttttgatagtttgattattatgtgctggagaagacctttttgggttgtwtctgtttggggatccctgagcctcctatatctggatgtctaattctcttgctagacttgggaaattttcagctgttattttgttaaataggtcttctttccctttcatttttctctttgccttctggaacatgtaaaattcaaatatttgatcagtatattgtgtccaatatgtcacataggctttgttcattctttttttatccttttgtttctcttttggtctgcctgggttatgtcaaaagacctgtcttcaaattctgaaattgttctccttgatcttgtctgttgtctgttgttgaagctttttgaatgtattttgtatttctttcagtgaattctttagtaccaagatttctgtttggttctttttaatgatatctgtctctgctaaatttctcatttatatcctgaattgcttttctgatttctttttattgtttaatctgaattctcttataattcactattttttaaaatattattattttgaattctttgtcctggatttcataagtttctttttcattcaagtctattgctgaagaattattgtgctcttttgaaggtgtcatagttccttgcttttttgtgtttcttttgttcgcatgttgataatttgcacatctgatataaaattttcttattccagttttgggaatttactttcataggggaggatgttttcctgaagatgtatctatggtgttggttgtgtaggtcactttggctttgattctgagtatgtgaagtagtgtagtctccatataatttctttggctgtaaatgcatcagtagtgtctgtaatttttttttttttttttgagaccaagtttcactcttgttgcccaggctggagtgacatggcacgatcttggctcaccacaacctctgcctcctgggttcaagccattcttctgcctcagcctcccaagtagttgggattacaggcatgtgccaccatgcccggctaattttgtatttttagtagagttggggtttctccatgttgatcaggctggtcttgaacttccgacctcaggtgatctgtccacctcggcctcccaaagtgctgggattacaggcatgagccactacgcccggactatgtgtctgtaattctttaagtggctttgggtgtggttggttgtggaggctgtggcaaaggtttgctggggccggggatgtcagatgggtcagtcctgagcctcagtagtggcagttgcaggctgagcatgcctgttcttggtgtatgctggtaccagtgtaagaggtccaggcaggctgattcttgagcctccaggcttgcctgagtgggccaggcatgtgggtaggtccttaggtccctctgagtgtcaggtgtggtgtgggagatagcagtattagtgatggggcaaccctgtgggatccaggtggtccatactgtgttgacagtggctgcaacaggctgggagggccagtcgccaggcctgcagttggcacatacgtctgtgtgccaactgaggtgatagtggcagtttgggtgagcccatcctgagatccccaggaagtgtgctcaggtgccagtggtggtggttggggcagggtgatcccaaggcccctggatggcatgcttgagcactggaggtagacagtggagctgggccaggtggacgtgtcctcaggctcccaagtgctggtgctagctgtggtaggcaggggcggggtgatcctcagttctgcagtggaatgcttggtgggggtggcaatggctgtgctktggtcctactgctggggagggcggggttgctttcagtggcagcaaccacagacaggtggttggagagcacatgcttcagccccaggtrgcagctataagcagagtagcctttcctcagggcacttttaagtgtgttgtagccctgctatcgtgggcagcagagttgctgccaatggcagtcagctgtggtggtagatgtaagcagagggtgtcagtgtagcttcagatatgtggagagaggagggtcttgggccccttgggtagatgcagtttggtgggggctgggttctcaaagtggtgctttgctgtagctgcttaggactagagggtgagggggaaggtgggaattggcatgagctctgtctctggagtaacgctgttgcatggtctccaggcagctccctacatcagtttcagggcccttttgggttgaggggctctcctgtggctaggattggagtctggtgggattgtggaccactggaggtcacttcccctttccctacatcgaagagctgttccaggcttctcgccagtcccagaacagcaggctgccttgcttccctcttcttccttgccttaggtgtttcctgtcacttctctgttgaattctagtactcttttttaggtggtctgtttaaagtgtgactatctacttgctatttctgttctttgtggaggaggtgagtaccagatgcctctagtcagccgtcttggcttctgcaagtttttaatattcacaagaataatgtactgcatgcatccttgtgcaaattgctttagtcattagcatatttaaagctatactttgtttattttaactgctttatatctttctggtaatattgtgatttattccttcaccagttgataaatatttgtgttgcttttgatattttaaaagagtggcaattggaattcatgtgtctctcgttaggcacatgtgtgattttttttttaaactagggttagaatcttttgatctagtgtatgaacatgttcatagttagtagtttttgccaaactgtttttcaaagctattgtactaarttttactttcactagcactgtaggactgacctcactgactcttgacattttccaacttggtaatttttgccaacctgatggaaataaattggatctcactgcagtttgtaattaattctctgattccctgtaaatgtaattttcttttcttgtgattattggctcttaaggttttctcttctgtgaattgcctatccacatcggtgcccctttttctgttggattgtttgtcttttccctttttgacttgtaagaagtctttacatttcactgtagagaaagtctttcttatgtgtgtttctaaagtttctactaatttagtttttcttttcactcattagattttgcagcacagaagtcytaaaattttgattagtcaagttttatcgatgctttttggtcatatttagaaatattcccctcttcagagcttataaatatattttttcattttcttcttaaaattatattttattatatgtgtattttcatattgcctgaaacggatttctgtgtttaaaataaatattcagtttttaagtattattacatgaatgaacagatacgtcattttctcaattgatgggtaaaatcatatctctcatatcaagttataatatgtgtgtttcaggctctttattctgttccattgggctatccatgtatttctatgccaatatcacaatgtcctaactaccatcactttaaaatgtagtattcaataacgcatctagttattagttttctagttgtcttgggtattgttgttcttttgtgctttcatatcaatgttcagggagtctgtcaagttccatgagaaacccttttgggattttaattttatcatgttaaatttatatattgatactgggaaaattgacatctttacatctctattcacaaaaatattttatttcttcatttatttaggtttgcttgtatgcttttgtaaagtcagacttattcctagatacgttagagctcttgttactgtaaatgtgttctttcttgaaataataactagaatttttttttctggtatttttataggagcagttgattcatatggcttgatgattaattcagaaaatttgttaaactctcttaatacagtttgtttataggtgtcttgcattttctgtgtaactgattatattatgtgtggttaaaaataaggttttttaaaaatttccagtttttttttttttttttttagacagagtcttactgtgtcacccaggctggaatgcagtgatgctatctccgctcactgcaacctccgcctcccaggttcaagcaattctcatgcctcagcctcccaaatagctgggattacaggcatgtaccactatgcccagctaaatttcgtatttttattatagtagagatgggattttgccatgctgtccagactggtctcaaattcctggcctcaagtgagccacctgcctcagcccttcacagtgctgggattacaggcatcaaccaccacgcctgtccttgtttctgtttgaaagtgaatgcttaaatatgacattcatgtcatatttaaatatgatatgaatgttttgaaagtgaatgcttaaatatgacaattagtgtacatgtttgatagctacttttcaataagttagggaaattaattatcttctaatyatagattgtcagaatatcatgaaagtgtattaaaaattgccaagcacattttccatgtcttttgagatgatcattggctttttttctctctttcaatttgttagagtggttaattatgtaaccacattttttaaatgttaaatcatctttgcattctggaggaaaccctatttagtcrtaagaaattgatatacatacaacccatttagtcatatatacacacaccccatcttctgtgtgtttgtgtgtatcttgaagatacatatttgatttacttgcattttatttagaaactctcatttatggtcttaaattagattaactcataattcatgttgttcttactctccttgtttgttcttgtaagatgattctactggcttcttatggggtaaccaaataaactgggaaaataagtaatagcaagtaattttaggtaggcttcagaacaaatggaagtagaatgttgagccacagtaacatgtaagatgggagtggaggcactggagagaaaacatatcaagggaagaggattaccttcagacttctagtcaagtgtgcatgttaaaatattaagactaagcattaaagaatagaaacaatgtataactcttgaaccaatagaagtggaaaagggagaatgcagtcagttccgttttgtctttaatcatttattatctgacattcttgggtctaatcctgctgtgaactgttctggggattctcacatgtggcatcctcctgtgtttttttccttttggaagatgagtttatattcagtgaggctggtttgagagaatcccgtgtggctggctgtgttgaggtctcgtcctccagagaagtttggtgtttgctagtgttaggyggtgagtgggaggagcatggggatatcaccaactcaggaccttggtttgtgttaatttcttctcctgagggttctcagacttgacaggtagtctaagttcaaatcccagccttgtgtgatttatgggactagagtcatgatttcttaagggactctttatttattttccaatctggagcctgagcttgacaaaacttccttgttcttcccagtgcaagtagggatatctttttttttttttttcttgatctacacacttaccaatacgaagatcttagagactgctagcttggtgggtgggtctcaattccaactcactgcctcagtcaagcccaagggctcatcttctgtttcccaatagtattaaagccctgtcctcatgatctctgacaatctgctgcctggacagcctttcaccttggtttaagttccctcttagcttagcagtgcatctaaggactatttattatactttatccagcacatcttagtgtttttagtgaatttttccattccttcctcttaggactgacacagaattctctttggaaatttgacaagtatgatgatgtgtaccttttctcagcatggtagacaatgggctataatagataaaaagtacttttattaacttacaatttatgtgttgcacagtttctttttgcatatgtgtatatcacattgatatacattattattttataagaagtagcattttatgtactttttcagataaacctcctaaaatttactagttgcatattcttcagcgattttaagtattctagtttaaaatcatttttagtggatatcagtattgttttgtggcccattttctagttattgtgacaaaacatctcactttttaaaatgtccaatttgaagctctaagaagggtgaggacttttttcttgttaatagagacttaatggaatttaattaaattctatgctgtctcttttctaatcttttttggagaaagaaaataggcctgattattttgaatttaagaataagaatttaaaaagtcttagaggtcatccttaccttaatttacaaatgagacaattgagattcagaacagttttggaacttattgaaaaacaaattagctagttgaaaatgagaatcagaaagagatctgctaaaccaaagctacaaatcaggcccccgccccggctcactctattgtattttaacagaagtggaggaagtaagttggtttgatttatatcttattactagttctttatcagcatagattacagtctcccttagagtatctcagtagagtacatatttacattcatatctaaatactaaatcacattggtgtaattactagcatgtgagtttatgccaactgttccttcttcctcttggccaatgagtatgtaattgtctttcaagagatggaagaacacatcagatgtactgtgagtggctccatgccaggcacttgggtgcatcagtcgtactcctagaaggcataatgcagtgccatgcccaacctggtatcctataaacgttcaagaatgtgtgcatggrtgaatgaattgcatggtgaaggtaaacaacatatgtgactctttagcgtttaggcttgacagatttgttataacttattttgagatcacacaataaggtgaggtaaatttctgagatttgtaacatctactctatagagcagccagtgagatcacttccctcgaaccctatcatcctaagacaaaataattgatgggtgagaaaagggcatgaatatgaacttctcttttcagttttgaggacaactgaatttgggaataatgctatcttatttatgtttttgtttcttgggcagggkgaaattctataacttcgtattacagagaagtttctaattatggtgatttggattttataatgagctttttggaaaagtacttattggactttgtatgagtgtatttttgttcttcccaaaatttcttgcaataaatatgagctactttctaaagatgaaaaaatcatctataatctcacctacataaattttacaaaattgtcattctatgtattgcttatgctttcctcctattttgcactctgtttttctccagtaatacaaaaagttgccattctgctttagtgtattwttcagttcagtggtttttgaatcagcatatttaactttatttttgaaaacttgtcacatttaaatcatctcatttttacttgagtaataagagaaaattaatatgtttacattctgcttccccatttcaagtttttatctatacagtaagtaattttaatcccagattattattaaattgctattttattaataggtatagcttctttcaataattatttttgatatttgctttaagttttataaccctatgaagaacaattatttagaatcatgttctgtgggttttaatgcttgctgccagggtcttgtatttattgtgtgtgtgtgtgtgtatttatttttttcttttctcaagagttaaatactatatacactttctctacgaaggaagtgtagatgaaatgtagatggcattctttctgaatactcacatttctgtgactgttctttattgtcctcgtatgaaaacatcaatgtaattggctatgtatctcaaaaaatttctctgtataatgggtctgttctgattctctctgtctttagatatttgacttgttattttttttctctaaactcttacaatttttctttaccattgagatcccaaaatctcatcaagatacacctacattttagttgcttttaattaactttgttttgtaatctacataaatttaaatcactaatctgagacctttctttttaggcaattacttgtcttctgtttggagctgtgtttttcaggttccttctaatctttcttggacccctggtgcatcttgaatttttttcctatatgtgccttcttttcttttgttcttgtcatctctgactcttttctgagtgttgggtgaatttccttagtcttctacctgccatttcagttttctggaatttttatacttcctttcattacctgcattgccatttttaatacagaaattgtttttcagtttgttctgataggcacaataatggcttccaaagatatccattacttaatcctcagagcctgtggctactaccttgcatagagaaagggacttttcagatgtgtttcagttaaagatgttgagatggggagtttctcctagatttttgggtgggctcagtgtaatcacaggggtcatcaaatgtggtagagtgagaaagaagattgagtgtcagtcatgtgagaaagacctgactagtcattactagcttttgaagatgacaggtagccatgagccaagagatgtgggcagcctctagaagttggaaaagacaaggaaacggattctcccctagagctyctggaaagaaacagagctttgccttcccggtgattttagtcctgtgagacctattttggacttctgacctctaggactgtaagagaataaatttgtatatttatgctgctaaatttatagcaatttgttaaagtagcaataaaaaactatttttgtgatgtttttactgatttcttttgtcttcataatggcttgttctattttcaatgttactatgttaacaaaacacattgaggacacaaatcagagatgtcccatcatttaatctttttctctttctatctcttctttttttcccctcccatacatctgcttcagtgggaggtgatttcttctttggcgagagataagtggccacctcctttgattacatttttccccattatgttccataattatttttctgtcattatagccctgactatcttattggcctatagtccaattgcagttaaattggattctctctgaaccatgtaggttttctgcctaagtctgtcggctcctgaagaagtaggaaagcccattcacactgcccttcttactgccattggaggtgctttcagggtctccactgcttattcttttgacctgttgctttctgcagacaataagagaggaggtttaattcctctatcagttcagtcctattgtcataaaactaactgaaattcctctcacttcttctcaggcatattataccctcccaatttttaattcctggtgtattttctactctttcaatatttagctgctaattttcatgaaatatagmgttcttatccagaatcctcttagtataggattttaaatctgaactagaccttatgtataagttagtccaatttcctcatttcacagatgataaaattgagtttcgaaaatcatttaagttttatcattaaatatgtatggtttttatggtattacagtcaattgttgagagaaaagaaatggcataggacagggcacttttctctacctttagagaaaatctgtcagttttactcatctttgtacattgtggcttaaagagataatttatacttcttaattttgccatccttaactttatcgtttttctctgtgggaagggctaagaagctgcatatatctctgcttaactttgttgctacttggtgttcagaagttggaatgctgggaaataatatacgcttgatatttggtttaaacatttcttgattcagagaaggtagatggttatagagactaatgaaaagaacagacttttatatttgtcttgacaaagttttaaatatcctttgcagaaagaaaatttgtaaagtttaaacatttttggaaatatctttaatttattaaggaaatcaatatgtatttagcatgtagtccatagaacagttggatactatacaacaatgaataagcaagctagaatctctgcgtttatagggtttcatagcctagtgtagaggggatcaacagataattaagcaattatgatacagtgattccctggaccagcagccttggcattacttgggaccctacctcagatctactgaatcagaagttcttgcgggttatgtcagcaatcagtgttttacaaactctcaggtaattctgatacaagaaaccactgttttcactgttgagaaccagagttgagagagagagcacagcacattaaatagagctgaagctgagagtttggagtcattaatatcttgagttgaggctggagaggcaggtaagtaaggtctgataagatgattgaaaagtttagacttttatctaacgtgcactcataagcccttaaaacatgtccagtggggaaacagcttgatcaactttgtcttttttttttttttttttgagatggagttggggtcttgctttgttactcaggctggagtgcagtggcatgatcttggctcactgcaacctccacctcccgggttcaagcgattctcctgcttcagcctcctgagtagctgggattacaggtgcccaccaccatgtctgactaatttctgtatttttagtagagagggggtttcacyatgttggccaggctggtctcgaacttctgacctcaagtgatccacccactttggcctcccaaagtgctgggattacagatgtgagccactgtgccctggactgtgatctctttaagaagcagacaagtaaagagataaataattatacaatgtattaagtataatatttgaagcataatctaaaagctattaaagtctagataaggaaagagactttagatgcctgggtaagtcagaagactaaccacttaagtatttcacgttgttcttggaagttttagtgtacaacctatggatattcagtagaatatttgatcaaaaatagtggttaaaagtgtcatatgttttgggtaatttattagattcaaagcaaaataaaaatgaaaaagtagaatgtgaaccgtcttcaagatatattttttaattttaggggtcccaggtaaacttagagcttcaagaagaatgacttactctatgtgatgtatacttttctaatttctagtttgttacttattttctaattttgtttaaatatattattatatataattacatattataattatatataattatatattatatattatgatagataaataaacatatattattctgttttaaactgtctcaatcctttttaaagtgattattataaatwttgtaaataataagcaaatatattcttatcaatgatgttgaagaataagtaaacatgttataaagcattttcactccacactttaaaaaatawgctgcatctaatctaagtatattttacttgtagaacattgtcaaagggtcacctactctttggaggttacgttgggtcctccaaaaagaaaaaaaattctcaaatgtcatagattggttgacaagtcctattctgaacttaaggagttgtgggggtaggcagtgctgaccacaggaatgttgagcagcaaatgctggctttgggcaaaaaacctttgatgcacagtgacttgtttgaaatgtttggaatgatggtccttgtgggaacctgcattacaaaatgtctgtcccacatggaacatactgtgtgagaatagaaatgcagaataatagggcaatgataccctatctagaaaccaactgtgtttacagattccctaaataacaggtcaaatagattttactatggtaaatattccaattgcaatgttctgcaaaatttttgtctgtctcatgtattttaagcaagatttcttggccatgtggcttttgtagtagacttcaatgacataaaaccactaagcagagaccttgtcatttatttaactccaactgcctttaatcttaaggacagtaatattgtgagaaaccttggagtttcaacataatcacaagatggtatgcaggatcaaatgttcaaattatttgcttttgtttttctgttgcatgtactataaaagtcttgtgttatctatataagctttaaatttggacctgtgccttctttttcatcatcttttctcctttttcttttagttcacagccatgaatgaaccacagtgcttctacaaygagtccattgccttcttttataaccgaagtggaaagcatcttgccacagaatggaacacagtcagcaagctggtgatgggacttggaatcactgtttgtatcttcatcatgttggccaacctattggtcatggtggcaatctatgtcaaccgccgcttccattttcctatttattacctaatggctaatctggctgctgcagacttctttgctgggttggcctacttctatctcatgttcaacacaggacccaatactcggagactgactgtyagcacatggctcctkcgtcagggcctcattgacaccagcctgacggcatctgtggccaacttactggctattgcaatcgagaggcacattacggttttccgcatgcagctccacacacggatgagcaaccggcgggtagtggtggtcattgtggtcatctggactatggccatcgttatgggtgctatacccagtgtgggctggaactgtatctgtgatattgaaaattgttccaacatggcacccctctacagtgactcttacttagtcttctgggccattttcaacttggtgacctttgtggtaatggtggttctctatgctcacatctttggctatgttcgccagaggactatgagaatgtctcggcatagttctggaccccggcggaatcgggataccatgatgagtcttctgaagactgtggtcattgtgcttggtaagttctgtcttgactgtaacttactttatagattctcagtgactaacataaaccacattattttatgtcagaggtaaccaacagtatgaatattcaccaggtaattcaccaggaattacaaggggatgaggcacctttatattaaatgtcagcttatgagtcttcctaaaattatagaattagcgttagggaaacatgggtcccagtggtgcagtataaatgatgatgatgtaaaagatgtcattgaagagtttggctrtctaatattgaaaataccagaattaccagtcaaactcattcatttttcttacagcctaaattgtgaaacttttgcattgtggtttctgtattacatattttcagacagaaagtgcttttgtagaatatgaatatgcttccatatatagttatttttgttagtctattctgtaattgttgctacattataggtagtatatcaaggttttatatagatttactgaacaaaacagattggaattaatgatattctctgacagtcatcttcatgaaaacttccttattttctattaattttctatttgtagtagtggaggttaattcatatttcaaggtgaagagcaagatttgtagactcaaataccttctgcttttaaataagcattgtttttcttggatgaaaaattcatagtagtgatcaagaagaatatattcacttatgtgtgtagaaggtagttaaagagcacctactatgttctacgctctgtgctggctccatgaaaaggacagatacagacatttcctttggagctgagagtagagtgagagttttttaaaataattacccaatggaattatacattctccatagactatattcaggttaacgtttgatcacattaaaaaatcttttttgaaaaccttttatcatttcatctttccctatggaaattgaaaaaaaacattttatcacctcctctttccccacagaaattcaatggaaagttcctataattctctgtgctccaatttatatagcatttttgggtgaatgtaacatgggattatgtggctcctctgaaactctgggaattaccttaattttagccactggaaggagacagggtcctgctgatcattatataaagtagtattcagattgatgcataggtctcgtctgttttggttaggatgactgcatcatggacatcattttcagctatactcattgttgaccctcttgtagacctgtgagaatagcaactaagccttgggatcactgacacacctaaaaccctgcctaactaactgaaacactgaggaccccatcacctcagatatgagattgtcttattgcatccaatgaagattagtagaactacaaaaatggtttctctgtatgtttattaacaggaccttaagcacacctgtgccacaaggccacattttccatgatgtggataaaacacatctttgtttaccatggatgctatttttgtatgaaataaaacatgagacattaaataacatgagacttttttcctgtattgactcaaatatttatttgctgatgacctaaatgttggttgacattttttatatgcatgaactttttctattacgacaagtgctactcatagtttgcagaattgccagcagcaaatgactactgaacttggactattaacctgccaagttcttgttttaattttgacctttgtataatatcttgtgtattccagtgtgcaatgtactgaatgattcacatacttttgtgcctctttgggttgtttttcaggttgaaataatcattttgaggctataggagctagtgtttcagtgtacatttgccctaaatgccactttcccatgcccaactactaccactgcacaaccactaactttaaaataacagaaataatatttaaactagtatactccacaaagatcgaatgcagttgacatctctggaataaagagcatgatttttaaagctgtgagatggaagaactttcagaacatggaaaaccccgtcacggtgataggtgaaggtatttggtgaagaaagatgggaataagattgtaatataggaaacagaaattaaatggaccgtagcctttttgagaaaagtagcaagaataagagaatgggcaggatgtgggcagggagtggttggaaagtttagaatggggaagtcacaatcctaacagatgtttttcaaggcgtggtgcctaatgccattcctacagtatgctcccctatttgaattgtaagtgtccatccttagataggcacggttacatgggagacatgggttggtcttgtcataatgtaggcaaaccccaaaattggggctcagcctgggggagttcttggctctgcccaggaaagaattcaagagtgaaccaacagtgaaagaaagcaagtttgttagcgtaacagtgtacagccaartgaccactccaaaggcagagcagggctatctcataggcagggtagcacagaacagcactaatggattgctggctagttatatttatacccattcttttttctttttctttgagacagggtcttgctgtatcacccaggctggagtgcagtggcatgatcttggctcattgtagcctggacctcctaggctccagcagttctcccacttcagcctctcaattagctgagattacaggtgcataccaccacacccagctacccagatttttttttttcttttttcttttttttttgtagagatggggttttgtcatgttgcccaggctggtcttgagcttctgggttccagtgatcttcctgccttggcctcccaaaatgctgggattgcaggcataagccaccatgcctgggcccccactcttaatgctaaatataattaaacaggttattcatgaacttcctggaaaaggggtggggagttcctgaaaccatgtaaggttaacttccaagtcattgccattgcatttgtaaaccgtcatggtgctggtaggaatgtctaatgcaaatgtattatgattcctggtccttgctggtttggattggtttctttgctacatcctgttttgatcagcagcgttgtgaaaacaagtcctgctggtctcccacttcagtaggaacaagaattctggtctactcgaagttcttctctttgtaaattagtccattgataatctggttattttactttagtttgtgtacattkggtttttagtatttgtcttcactgccagattgccaggtttgtgagggcaggcaggattgtaatgattgtttgttttctccacgttgccacattgcctgtcacggctatctggtacaaagtaggtagtcaataaatgctgagggaatgcatgtgatgacaaaaccaagtttctctgccttcaaaactgaagaccagagccgtagtgaattcactacagtaaatgccactttattcagctatgtgggagccaaacctagcgacacctttatgttcyatgccttctaaaatacaacagcctggaaaactcctggctacaatgggtgctcagtaaataatatgtttgttttacttccatttattctgggaatgattactcagtttccattttcacttcatcaaaatgatccctgggttttagacctattcagtcttcatgatcaaaagaagaatttgttggtcagcaactgacttgttatgagtcaagttatattaaaataaagtcatctttgagattaataatgggcaataccaatggctggtttttaagcatgatcttgtattaagctgcttttgagtgagtactggatcttaataattatttttagttgtgaaatacttatytggcataaatcatgtgctaccttagaaattagtatttgtaaattacaaccctatggcgtataggtactgttattgatttgttatccttattttccagttgataaaaactgaggtaaggagaggttaggtaactctcccacagccacacagctaggaagtataggaacggggattcaaggtcaggagctgggattcaaggttgggcacttgggtttcagaacccatgtgtttktcccctccatgttattctacttccctttaatcaaaacaactagcmgcacatgctgtatttagttataacatttgaacagcaagcagtgtgtgctattaaattgaaacactgtgatctcatttgtttctgttgaaactgcctagctgtgcygactgggctttgtttccctgggcagagaaagcttttaagggagcaatcttttcttccttttgcttctgatgaccctcatttcatccacccttttccactgtttcatgttgcagcagcactaactgatggcttctgattgagggaggattttgttcaaggtatagttaacttgaaggttcattgccctagcataaagtcatgtaatccctccctaggcttgaagtctccctacttgacattttaccaagaattccttctgagtcgtttccactattgagtcagagtggccgtcaagatgttcttccttatttgaccatggcatgtcttgaattataagtcctttcctttttggctgtattctttgtgatgacacttctgtccaggatacttagagaggaggagatccagaatttgaaaagagaaaatcatggttaagatgtgaagtttttacatctgagtcctggggagagacataaagtaaaatgaatccaggtgtggcttacctctttggggaagaagagggagacactgtttttctagtttgttctggttggaaacgatcaccatggaagctaaattactccttatgtctkacattctctgtactagggtcagtatgcggccctactcttcctgtgttgtttatactcttacatcaaggagttacattttcctcattttacgttgagggaactgaattaggataggttaagtracttgtctaagatcattctttttgtaagtggcagaactggaaatcagctgtcagattcttgtagaccatgccttttggccacaggacactgactcttcacataccatggtgactgtcaccagtggtgacgaaagtggcaggagtcagataagtttaagaccatagttttcttattcactctgatgaaagatttaatttggctrctgtcctattagcaaatctatatgtgcttctcttttcagtttacttcaacaagcatgttgttgagtgccaattgtgtgctaagggataagagaaaaaattctttacagagcttatgatgtagtagaggagactaaaaaagagctgcaaagcactcgggttcatgtgctagtagaggtatgggcagagagtgatgacgagtggagtgatgggaggggctcccagaggaggcaatcttgagctgagtcttgctggatgtagaggagcttgcctcactgtagcattgggtggaggagaaggtgaccagttcatgagcaatgatgatcacctttgaggaactgaaagtagtcaggtgtgattagcacctagtaggtatgccagatggagttttgacaagagggtcaaaacctttataacatactgagaagtttgagcttctgtctgtgggagttgggagacgatgaagggttccccaagatcaaatgaacaccaattccttataggcagagtcctcacataatgtatcatccaaactgagatgcttttgggartgaaaacaggcactaactgttgggaatctgggataacaggagtaaatcaagactgtttagggcaacctaggatgaatggtcaccctcctccaaggctctgctctctgtttgttcttttttttgttttagagccagggtttcaccatgttgcctaggctggtgttgaactcgtgagctcaagtgatmtgctcacctcagcctcccaaagtgttgagatttcaggtgtgagccaccatgcccagccaatatttttttctaggttctcttttagtttttcaaatgcagctctcaacactggacttgtattgctgtgtataattggctttttttttttttaaggctggagtcggtccagatttagaattcttagaacttgaaaggatccctaaaaattatatcatccaactcccacatcttacaaatgaagagaccgagacccccaggttaattgagaacttcaggtcttagttagctcmtgatccaagccaggatccaagtttcctgacttccrctaaggtgctatttttactgcccctgccttgttcagtcccatccacactttccatcwtcatctttttttgggaacttcagccatgtatttatgtggctagccaggattaggtgtaaacattgtggctgtgaaggtaactggttctcaaaggaagagtttccttgaataggtcttcttataaccaattggtaatctccctccctaattaaaccttgaaaaaagttatctgaaactgaatcgcttgtacattattagcatcacatatagtagcttttcacatatattagcatcctgttagctttcttgacaacagcattatgttactatttttcattccacttggtttttatattaagtttgtgctctctctctcctctcctctctctctcactctctgtgtgtgtgtgtgtgtgtgtgtttgtgtgtgtgttcagttatattcactgagtcagggcacctctggaatctactctttgacaagaactatctggatgattctgggcaagttactttccctgtgttaattttttccgtatgataaggtgaccaatttgatttccaagattacttaggattctatttattctgtaaataaaattataaggacagtaactactgtggatcaaccatgtagagctttctagaggaaaacttgaaaggggactgggacaaaaataagggactatgattcttctttgtatgaacggtgcattccaccttcttttttattttttaaggctagtcaagtagaacagtgggagtggagaaagaacaaagaaatctgtaattggttataatcaattagttgtacacgtccctgcactcagaccagccattaccttctctmataataagcttttagatgcactatcccccattaaagggagtggcgagtgtataaaggatcctctcaaagagatgaatctgggggctttactttcctgtgggagagccatgtggcaggaagggaagacttcccaattggtcctgttgctaggggcagggaatggacacagagtctcttattccctggccacaggtgaccggctacacattctgttactctgaaggggaactaaagctaccccatgtctcctcaggtcccagtggcatccctgtaaaggcctctttgaggaagaacctgagcgaatatccatgagagcctcgattgtttggccagccattaggctgcttggcaccatgggtggtggccaggagacagtccttgcaaaagtcccacagtgcttcccagaccccacatcctgggcttgggtcaaaacagaaaacaactttcaaacaccagctctttatacccttttgttgcccatctccattcaaatattttttctcagaagaaacgtttaaacagaaacagaaaccaaaaataccacatgaacctaacagagttccttttgaagtgtggayagaggaaccagaacatgaagctcttattttaggtctgttgagagtgattcaggccttgtctggccgagactcttgttcatccaaatatgaatgttggaaagtcatttacttttccttgtcgttaaaggtaataaatgatgcaaagatttcttaaatgaattgtggtgaccactgagaatcactgtttcctaggggttgagagtttagatctggagtaagataggccagagtttgaagttcacatcctggctccttgcttacgagttscatagtcccaaataactgacttaacctctctgagtcttggtttcagaattaacaaagtaagaatcatagggcctttctcaagtggttgtgagcattagatgaactgatttatgtaaagcacatacatgtggcttacagaagacacttaatggtagcaagtattatcattactcttaggttgtgtcctcatgagaattcccctcctttttctttccctttctcttttttgacacacccacatccattcacatctacctacacaccaagtccacgtataatttgatgtkcgagatggtgcttcatttctatgacatagtatgaaattactattgtgttccagcagctgttggctcgaattatactctgtaaatttttatcccgaatgaatggcctttgcttttactgcagctttgcctacaccctacttgttgagcctcagccctatgtatgaaaaatcctgttagcatcacaggaaatgctaatagttctgatctgctgactcttcagagttggttaaatggtgttgactattaaaatgaactttggaatgtaacaggccactttgtcaatgtctataagaaagtcatgagctccctcagatggatctgcagtacttaaggcacagctgaaagcccaggcatcatctagggcagtggtccccaacctttttggccccaggaatcactttcatggaagacaatttttccacagatgggttggaggaggggggatggtttagggatgaaatgttccaacttagatcatcaggcattagttagattctcataagaagcacgcaatctagatccctcacatctgcagatcacaatagggttcacactcctatgagaatctaatgccgccactsatctggcaggaggcagagctcaagcagtaatgcttgcgcatctgctgctcacctcctgctgtgcagcccgattcttaacaggctatggactgttactggtccatggcctggggatttcgaacccctgatctaaggcaccattctgttattctgtttccttttgatcagcagtgaagggccatgtctggcatgtatggaagaaatgacgaatggctgggktcatgagacctgattgctgttctctagccggtcctagcttcacagtttgaccacctgtgaatcctttagtctgggattcatcgtcatttacttacaaagaaaatgctatttattaataactcctaatctctcactgctacctcatgaatctctgtgaagaatcatcatggcttttctatgatgccagggctttatcttacttcccagcacctagaataggtcctggcactctagatatttgctgaatgactacatgaaatatacctcttgttctggattgggagttttacaggttgcctagttacaatagtaatatacccaggtagccaaaaattcaatgcgatttgatagtggatctcattcaaagggatatttgccataaggtygttataattaagcagctacaactcctgcctctcaggactttttttaaggctaagttccagtgaaaacttcccgcattgccaagtcaatcctaagccaaaagaacaaagctggaggcatcatgctacctgacttcaaactatactacaaggctacagtaaccaaaacagcatggtactggtaccaaaacagagatatagaccaatggaacagaacagagccctcagaaataatgccacatatctacaaccatctgatctttgacaaacctgacaaaaacaagaaatggggaaacaattccctatttaataaatggtgctgggaaaactggctagccatatgtagaaagctgaaactggatcccttccttacaccttatacaaaaattaattcaagatggattaaagacttaaatgttagacctaaaaccataaaaaccctagaagaaaacctaggcaataccattcaggacataggcatgggcaaggacttcatgtctaaaacaccaaaagcaatggcaacaaaagccaaaattgacaaatgggatctaattaagagcttctgcacagcaaaagaaactaccatcagaattttttttgcaaacttgttaataatagtttattttgtcagcaaacatgcattgaagtcttctagactctctgttaatgagtatgactgcaaagatcaacaaaaatatgtatcctgctttcaagaagctctcactgtagcagataatgacagataatttaaataagtgcaatataacatggtaaataaacacaatataatatgacaaaacaggcaaagtgctatgtgaatgctgtatttcaccgggcaatgtctggaaaagacttcaagatgaaattgatgttggaatttcatcttagatgatgtatagaagtttgctaagtaagcctaggcaaaggaattatttctattagatattctttataccctgaattgaatraaatattcaattacttttcttgtattgtaattagtatttcacttagctatgacaatagccgttgttaggcatgtacatcttgtataaatccttagagtggaaagggaagcttccagaattgtcagacaatatttacttagaactttctggctgcattttgcactggcataatattcacctttttttttgtttttgtgacggaatttcgctcttgttgcccaggctggagtgcagtggcgtgatctcggttcaccgcaacatctgcctcccgggttcaagaaattctcctgcctcagcctccggggtagctgggactataggcacgcgccaccacgcccggctgattttgaagttttagtagagacggggtttctccatgttggtcaggctggtctagaactcacaacatcaggtgatccacccacctcagcctcccaaagtgctgggagctaccaagcccggcccaatattcactttcttaattgactagagatagcaatttgacatcatcaaactggttatgaagtaaatgggttttgaatggttactgacctataaggaaagggattaatttatttttatttttatttttattttttgagatggagttttgctcttgttgtctaggctggagtgcaatggcgcaatctccasctcactgcaacctctgcctcctgggttcaagtgattctcttgcctcagcctcccgagcagctgggattacaggccaccacacccagctaattttttgtatttagtagagatggagtttctccatgttggtcagggtggtatcgaactctcaatctcaggtaatctgcctgcctcagcctcccaaagtgctggattacaggcgtgagccaccrcgtccggtggaaagggattcatttctatatgtcagattaacatcctatggagaagaagaagggattgacagtgacgtgtatgtgtttcaggatctgaaagatcattgccaggaaaagtcgacacctatacctgaaacataacgagaatataattttctatggtgttttacagtctgtaatggcctggttgaggtttcagaatgtcttcaggtgttttttgttattgttacagcagtagaattcacaggcagctgtttcatctggaaatgtatagttctgtttttgaggggtttacgttctttgcaactcgaagcatcatttctgatttcctgatacagattgaaaaaatgagaatgaacataggaggcacacatatgaattgccraatttagccaataaaaataattgcatgggatatacttatactaaaaaacaaatacttcttttttatttgaaattaaaatttaactgggtatcttgtgttttatctggcaactataacacacacacacacacacacacacacacacacacacacacacattattggctgggaaatacagcattttagatagcaatcaattctatattacatggattttctcctttgtcttataggcttccatattatcctggagttcaatttaactatacaagaagtttcacttatttactatttctgcattttattttgagttgccttgaaataaaggattgtattcagtttatagaatcttgttttctcagaaattttgcttgcttatgaacaggtaatgttgtaaacttctgtgtcaaaattgaatttttcccttctgttacatagtctttgtcatgctctttgaaaaaagcattttaatgaaatttgtttttttcatataaacaatttttttcttctgttggtacctttgatattgtttttctttgaggcctaactagagcctgtgcctctgagaagctactttctgttcatgtattttagtgaagatgatagtgtctagactgaatgtggtcatggctttacttaaaccctggcagggctcctgcacccatagaggagttattataatgatccaaagcaaatatgaggttctaatasggtgacacagcaataacaggrtctttttgaagaaatgggatttaatctggcattgggagactggaaattcatggcttcacttatttattctgcccaagtagacttttgttgacacaaagaacactgcattttaagttgggttttccatgagttcattctaaacaggtatttctgtgcttcaaaaagcttctcatatttatattgcaggcatgaactcattcactcaagttattttcctttctcttgggagagagaaggtagccacttaggagcctagccttaaagaacatgcagaaaagatggatgaagtgaacagtccagaaggttttgctgtagccagcaagtgattcaccattttatgctgaagggattgggtttgctaaccttgccaagcacgtggtactcctttgtatattggtccagtctgagaggaaaggccaagctataaattgaggagctggaatcagtgagtttctgaactaaagcaaaagaggctstatttagacattctttaaaaggtgtgtgtgtgtatatgtatgtgtgcgtgtgtataaaacgatcagacggtagagattagagcactggctttgtttaatttggcaaattctaatgttctagaagaaaagtgaagatgttttaattaaaaacactatttctaaggcaccatacatatattctagagtaccagtagatgagaactacttatttagagtggcagagcatgctatagaaacaaaatatgagtaattctaactgtagttatgttatattagcrtagtgagatagtaacattaatagaattccttagtggaatttcttaatgcttcagttcaatctaaattagtattaatactttaaggcaggaaatctgtccgaaagcatttgtaaatttaaaaagcattgaaatgagaagcagaaacaaaaaatattcatttctatgtattgctctatctatattatataactgatttactaccattaaattataaaatattacatgttcagtgtattgtccttctgcagttactgatttataactttaatagtaacagatgtagctttattactaggaagcttattgagatcatgggacatttwgacccattgttttgattaaactttgaggacatttttgtactatctttataaatatggatatttaaatcagaattacagtaacattgatttttattgagaagacatttctagagtatatattattaattcactttaatcccttcaacatatagcacagttaaaatatttctagtttgctacgagtttcagatatagctaaaattttcatacgactaaaatctttgtgtatgtcaaagatttgtgtatgaaggcttaacttattgattagttttttaacataccaaattgcagtaactaaaycatctactattgtgagttatttttcctctcacgtttacttttccttrgccttattttacagctaaattttataaaaaagatttgattcatttttgaatcaaatcaaatttattctaatatgtaataaactttattgcgtgcagtttggctgttttcagttttgttttcaatttttcctacttttcttaacttttcctaggtcaatatttttagttctgagagtttctaaaaagaaaatataataataatggttaacatttgagtgtttactagttttcagaactcattaagtcctactttgtcccaaattgagtataactttgagcaagaatcttaatctctctgaatttcagccccttcatctgccaaatacagaaaatatattttggtgaggatcrtattggataatgaatgtgagagctctttttataggaagtgccacacaaatgtaagttatgaatgttttcgcagctgctacttatagagcagtgacccaaattaaaaaaaaaaaaaagtgtggaatgctaagtaaaaaatgtgatgtagtgtagttgcaaaggcgttagctgtattctaattccagatttgccacttactcgttgrattgactttgggcaatccacttaacctttacgacaacttctttatctgtaccacgaaggacttcgctacgtcagtgtttctccaggtgtggtccaagggccaccttgcatctgagtcacctgggacacttgtttaaaggctgatttttgggcctcagcccagactattgaaacagaatctttgtgttgggattcaggcatcagtacttacgtcacacaaaccttcaacaatgaccgtgtgaggagttgccggctttggtttaaattacatggcattcaacctgtccttgctcaattttaaaacccttttcaccttttccactgaaatgggcacatttttggtactgtgagtatccgtgattgccccaggcatgtgagtttgcacacttgctttacaggggagaggatcagaagggaaaaggaaaggaaaggagagttaggggaaaaaaaaacacaaaaccactcggacaaaattcttggctcttgaagagctatgaaagaaaatagattgtttcacactaaatagactttcctctcaaaatatttgaaacatccacactaattagttttatcaccctaggaaaatttgtcacctgtaaattaatgtctgaaaatcacctgatctactaaaaggtatcttgagaaattatggggtatctaagaatgtttcaagtaggcatatgattttatattatcctgaggagaaaccatttgtttcccccaagaatgaggatggagcaacaatgtatatttatttttgcattaacctaatacaattgtatgtgtctgcatggaaacttttgtagaaaaagggtaaatcaatcatttgcttgttcataggctttaatttcttcctgagtcagcatggtataatctgaagagcttgggagtcggactcacatgtccttgtgtgcaaaaacccagttctgggctgggcgtggtggctcacgcctgtaatcccagcactttgggaggcctaggcgggcggatcacgaggtcaggagatcgagaccatcctggctaacatggtgaaaccccatctctactaaaaatacaaaaaattagccgggcgcagtggcaggcgcctgtagtccaagctactcaggagactgaggcaggagaatggcgcgaacccgggaggcagagcttgcagtgagccgagatcgcaccactgcactccagcctgggtgacagagcgasagtccaactcaaaaaaacaaaaaacaaaaaaaaaccagttctgatgacatgttaattgtgtgacctagagcagtatatttgacccttctgagcttctattcccatctataactgggtagagtactgtctcccaaatgaggagattgytgagaaaattagatttgttcaagtgcttagcatgctgcctggcacatgctgcggtgaatgtaatgttctcatactttacctgtggctcacatacatgaaagggccacctgtggcctgctgtgattagtggttggagctgccttcccaggatgggcattccttgaagttatctagcttcttttataggcctgtataatgatgagtggcattttcccattctctgcctgtacaaggtgatctgaaggttctatatggggattccactcgttagtttgtatatttatccagaaattcatcctctagtcattcattcaatcaatgatgtagaatcccagcaggattctataaactgtcmtctatcaggattatgagactatcaggaatatgatgttcatacaatcttccaaagccaggcttgaattgtctatatgggagcaatgataagtggtttttcagcatctgctcaagcatcttggatacacggaccaatgtatcccccaagaggccagacaatctttatatatatggactattttatatatatataattaaatatatattatgtcatatatctatatctatatccaaaatctcaggaaaaaactgtattttggggtgccatccactaagcctatttgtctccttgggtgccataaagagcactgcaactatatacaaaccaattcagcgtgggtggcatattgcctgttgtgtgatgggaaaacaaataccaaaatgtataatccctattcacttacaaatatgactaaaatacagggagaatgggagtcagactcatggcagatgtaattatgaagcaaatctggccgtgacatgccaatgcctatagtctggtaggaaggatggcacatatacatagataattattgagaaaggcaaaaggtgacaaaagtaccataaaagaagtacaaataaagctgtatgagaatttagaggagagagactatcttgttggaagtaaaatcaggaaagctttatgtaaatgaattttatgtatgacttggctgttgacatacaggtgatgtttagggaatgaagtattagactgcatttaccttgttaagtactgaatcttattttaatcacatcacatttcctctttttttttttctaagagatagtgtattgctatgttgctcaggctggaattgaactcagtgggctttagtgatcctcctgcctcagcctcctgagtagctagaactgcaggtgcatgccaccacacccagcttactctttttttgattagcaaactaatgcatattcattaaggaaaaaaaagaaaatcatttagaattttaccttycataattaaccaaaatattaagttgaatatactgtttctttctagtcctttgctaattaatagtttattcaattcatataatgcataccactttatagattctttaaaagattgtcttgagcatttattatgccattaagtaatctttgaaagtgtgatttttctacccaaagttcrgtacattcatatgatgaaatatataatcattagacatttacgttttcttttttttttttttgctattataataacattaagataaatatctcttatgattccttcctcacagagtaatgaatcataatgacttattgttaaatgttcttcagaaagcttgtgccaatttatcacaaggggattgggagtcttttgtcacattcatgacaatattggattttttttartggcactatgttacaaccatttgtgttatctttattcatgatgataaacattagcaaacctaaaaaagagatggaaactttttaaggatttagaaaccaagataaacaaaaataggaatgtatgtggccacataaaaatatatgtactcctttgaagtactttgttccatgtgaaagtctagtgtatatttacttctttagaaatctaaaggcctaacagctgaaaaagacagcgtggtgattaacagtgttacttttgaagtcccaacttcctggattctcatcctgacactactgcataccagcagagtccgcttgagcaatgtatccaatggctgcaagctccagtttccttgcgtgttaaatgagagacacagcagaaacagtaaaacctcaaaaggttaagtgagattattacacaaatgtttcctgacttagcggtggggttacatctccataaatccatcgtaaattgaaaatattgtaagttgaaaatgcatttaatacacataaccttggaacatcatagcttagcctatcctaccttaaacatgctcagaacacttacattagcctacagttggccaaaataatctaacacaaagcctattgtacaataaagtgttgaatatctcatcgatttattgaatactgaaatgaaagtgaaaaacagaatggttgtatgggtacccaaagtacagtttctaaggaatgggtgtatcacttttacactgtcataaagtcaaaaaatcctaaatcaaaccattgtaagtcagggaccgtctgtataagatgccaagtttataagtacttggtaggtactattataaaatacatgatacataacttgttttcatcagattatcatattgccatgctgaaatctaaagtccctgaattaatcctcattgtggcagatctttattatgtcttgagcaggaccagaccacaagggtcaggacccatgatgcttctaggactcagtggggcaagtctcctttgtattgagtggtgttgccatgtcaaagcatggacacagagaggagaatatcacacactggggcctgttgggggttggggggctgagggagggatagcgttaggagaaatacccaatgtggatgatgggttgatgggtgcagcaaaccaccatggcacgtgtatacctatgtaacaaacctgcacgttctgcatatgtaccccagaacttaaagtataataataataataataataataataataataatataawaatawgaccttgaaaacagatatgcaactcactgctgagatcctttacttttctatcttccctagacaactttaatccctaagtaatattcccatgacgtctcagttcagtgctcatactgtctcagtttttttacagtgccccaaagctaaaagaaatacctaacagtttcatttattaaatcaacttaataagtatattcaacttaattagttaattcaacttaatacgtatataggtcctgataaattagtagccattttgtaaaacaaaaccatataaattgaaagaattatcatttttatctaatccttcatatttactaaggtatgtatgcacctgttgggcactgcacaacttttcaaaacttgaattcagattggaaaccaccatcttcattttctgttccacactgagttttatgtttacacttcatttttattatagcagatatcatattgcaaggacatgatgtcattgaaaggaatgtaatgccatttaatgttgaagcgctgaactactttatgctcgtagttcagagggtgtctgagagatgtcgagtgttagctgccctcaaattaaaaatatctagtagcattcctctgaattcactgtggcaccccaaggttcctgggggcacagtttgggaaccagagycttacagtatttctggtttctggctttacttcagttttgttttctttcatctcattgactcttcttccccagttcctacttttatttcttggttccagctctctggttactttctccgctgctcaggtccgctctctgcatactcaccatcaagcagcagcagtctctgtaacttctggacctttgcagacctagatgcagccccgtaggctctgatgtggtttggtagctggctgtaggtcaattgatgtgttctaaattctacaggacttcttcagttcacaactccagggagcattaygtccatcataacctgccctaatggcatgcctttcatgtggctggccattagcttctgtctgtggcggtctccctgcaatgtgggtgggcttgtcctccacatcaggtctcctagctcactaggaacactctgctttataacaacaagaccacctgtatgctgagaccacatctcatcgctccttttcttggagtatcaacccggaaaatgtatttgaaacagttgagtggttaattgtggactccggattaacctgcttaattttttttatcataggtttactacttactctttaacttcctgaaacttcagattcctcatctgtaaaatagagataattgacttccttcatgtgagaatcaaatgaaaagttatgtgatgccctttagtcaatgtctgacatttattaaatgttaactgttactatatttttctgacagtaatttcgtaatttacttttaactattttaatgtctttaggaacagagtaataaactactggctcttaaagtttagtttgtcagttcatgagaggaaacataaatattgaaaggaaaaatacattcatataatttcctttaattaaactgagataagatcttgctctgtcacctatactggagtacagtggctagatcacagctcactgcagcctcaacctcctggtctcmagccatcgtcctacctcaccctgttttttgttttgttttgttttttgttttgttttttgaaacagggttttgctctgtcacacaggctggagtacagtagcgatccttgcttactgcagcttcaaactcctgggctcaagggattctcccactttagcctcgtgtgcagctaggactatagtcaagygccgtaacgtctggctaattaaaaaaaaaaaaatttgttgttgttgttgagatggggtctcattatgtttcccaggctggtctgggactcctggcctcaagtattcctcccacatcagtctcccaaagtgctgagaatacaggcatgggccactgtgcctggccacatttggtttatatatactacaatatctttgtagacatattatctgtgatgatttttatgaaattgtaggtatgatagtgcagatagtgttttacccattttagagatgrtaaaacagattcagagagatgacgtgaattactgaaggaaattaagtatttgctagaccccataccctaacctaggacttgtagtttcaatgctggtgctcattacttgctattttgttgcctttagtatttcaaaaggtaaaaacaaaagaggaagggaagaaaaaaaggaaaagaagattgttattctctgatgtctttttaaacaatgaaaatttgctatttctgctgtgtctagtatatataagtattataatgattttaattagtgcataaaaatcacaacagttgaaaaaaattgccaatgctctctcattagaaataatttcaaaagataaattgcttatcgaccttacttgaactatgcatccaaagcattgtattcatcactcagaaaagtataatgtaagcattggtaagtttgatttccagttgacagaaaaatgcttcagaaaaagagacaaactttcccttccccccattcyctacttttccaaatattcagatgcctaaaccttccacccatgctagagctgttgctgcctaaccaccttctgggcacaatggcatggaaatacataatcagggtataattttgtgcagggcagagagaacatgctattatggaatcaagtctcagctgaatagcctggcctttggctgtgttttgatctcagtgctaaaatggaaatgaaacgttgcctcctcctttgtggcctatacaaagtttgctgattctgtgctcatttggtgattttcatgcccaagtaggtgaagggagaacaactacgtacatagatgtgcagctttggggttgaaggcattgatgtgtgtgtgctgagtcactatgacaatctaaagaggactctctggtggctgattagaaaattgtggaagttacaggctgtctgggttaaacatttcctggtttattggaggcagatttccttgggccagcaagcattgaaactcccacagtggtgtcatgtgatggttctccagcgaagcaytttggatatggtgacagctgctttagtttaagtatctggaacatctaatgtgggagaacttggctaagtgatgtgagaagttaagagaggagtctgaagtttccgttacatttttttctgtttagtggattaaaaggcaattcccatgcaaattgtctctgtctttaggtgttgtattcattttctatgctacatcgcaaattgtcacagacttagtggtttaaaacacacccatgaattatctctcagtctctgtaggttaaaagtccaggcatgcttagctgggttctgtgcttggggtctcacaagctgaagtctgcgtaccagttgggttgcattctcatgtggaggctcgactagggaaggatctgcttcaagttccttaggttgctggtagaattcatttccttgtgactgtagaattcatggcaacttgcatcttcaaggccagcaatgggcggaggcagggggtgggcagagggagagagggagggagagatagagggagagagagagaaatctgtacttcttccagtctctggcctctgtgagagctcacttaagtcagtccaactgacccagggtaatctcccttttgagcaatttattgtcaatttaattacatatgcaaaaccccttcacttttgctatttgacagaacctaatcaagggagtggcatcctataactgtattctatggctagaagcaagttacaggttctgctcacacaccaggggaagggggactacacaagagtgtgactcattttggaacatcttagggtgtgtccaccatagatgtaccattttgagtacagatggaaaaaaaaaaaccagcttttcaaaaatgctgttttaaaggaattgatgttgttaggttgaaggctaaaggatggaatgttatgtatttaaatgtatacttagtttttaaaaagtttktgccaggaatattagtcatctgttaaagaatgtatcatctagtactttctttttgaagttttctttaattttggctacagagacattactcttctctgagtctcatatctctttacctgttccttcacttccccttccttcatcccttctgtttgtttttgaaatgctgcatctctaacctgacagttccttctgtccactcacctcaaggatggctagaaatcttatayccagaccgcttacttcctgaacacagtggcatggaaacacataatcatgatgtaatcatgagcctgtacataagccagctactctgttgggttcaggttgtaacctgagtgtctgcagaatggcctgtgggtgagagaccttagattgtttcaatctcactgttaaaatataaatgaaaatttattttctttttggtataggaaacatgctggtttcattcatgttgggtggttcttatgtccaatagcagtcttacataaacagtcttacagaagtgtacagagtatgtgcctgtttatttatacttaatcttttatttaaaaaaggatttggctggtgcagtggctcacacctataattctagcactttgggaggccaaagtggatggattgcttgagcttaggagttcgagaccagcctgatgacatggaaaaaccccatctctacaaaaaaacaaacaaacaaacaaaaaacaaaagttagttgggcatggtggtgcatgcctcttgtccsagctacttggaaggctgagttggaaggatagcatgaggcctgtaggtggaggctacagtgagctgtgatcgtgccactgtactacagcctgggtggcagagcgagacccagtctcaaaacaaagtatttaagacagcttaaaaagatgcattcagttcagaggacaaagttgagtttaaaataagcaagaaaaaggagggaaagggaaaaagaaatctaagaaaatgacatggagtcaggtaaagacatactttctagcagttaatgaagatgtaaaacacaataacgttcatgatttggtggccataaagtaaaatcaggagaaataacccttctaagtactgagtccaaagagacatttctcatttgggtattgctctgtgwtggatgcatcagctatgatgtgatgttctggagagctctacattctttatggcacattcagtaccatgtcccataaagtcatgccatatcatttctcagtgaaggttggtggtctgtaaccaaagtgcagttcaatgaaagcaattctgtggggcttaaagatatagcccagtcatgtggctttctaatatattggttggctccctcaagaatcaggtttagcatagtgtttcttagtcttattaaaaacgtattgccctgcccctgaaaagcttaagaactttattattattattatttttgagatggaatttcgctcttgtcatctaggctagagtgcaatggcacaatcttggctcactgcagcctccacctcccaggttcaagtgatgctccttccccagcctcccaagtagctgggattacaggcatgtaccaccatgcctggctaattttttttttttttttgtatttttagtagagacgaggttgcactttgttagccaggctggtcttgaactcctgacctcaggtgatccacccgccttggcttcccaaagtgctgggattacagccgtgagccgctgtacccggccaagaacattttaaagtttttttcataccttagcttatatttgaaaagaagttattttatcttccaactacaaagttatyacaatattgacaatatacacactcagcactagttaatctgccctcaacaaccttaaaaaaaaaaaaaagactttattttggcctatccaaaagaatgaattatatagttttccatgcatattgttacagttattttttccaagtttaaaaaatattatctttgttgctgacatctggatataccttttttataatttctagttaaagtgagtggagtttttttagggggtggtttgggagtaattagcattctctagagaaaactggaggactttaaaaagacatctgcctcattaggaggctgttccacctcagctacaagacagaagaggaaaaaaagtatggccaacccaagggtttctgcataataataataatggtcttcctacggagggtctgagtgatccaggccacctgggtctgagtcacaaagcctgcatgcaatacttattattcactaatttatttctggttataaaagtaaatcgtatcctatgtcaatgttttatagtatacagaatcatttaagtaaggttacaaaagtgattctgaacttgaccaccaccattttgacatacttccatccagtgtatttttttcttgtgccaatatagcatagtggctaagaacaaaggcctctggaggcatccagatttagagtaagatcccagctccgtcattcctagctgtattgcccagagaagtttcttgacctctttgaacctcagtttcctcatttgtaaaatacaggcagtcccatctcgtaaggttattgccagggactacatgagaagtatattcaatgaggttattagcacagtgccaattatatgacagacctcagtagatactggctattgcatgctacatgtgtgtatacatgcatttaaatgtatatagtagtattatataattgatatcatactcaagkttcccttatcctttaaatttaacrtctaacattttaccataaggttatatcactgtatacttacctgtttgtttgattttagtcattcatgttattaccatgattttcatattgataatttgataacttatattgacagaagtgagaagtaagacactcagaagtaagcaagagaggaaaagaaggcacactcgttcaatttttcttctttctcagggtagtcagtgtttcrtttttgatgataacgtatggaaaaatagctaaaatctacatctaaggaatttaaaccattcatatccatttacatcttcataattccagaaatttattctaagaaaaatgagtatgtacaaatatatgattgtggttatatgtgtacatacacatgtggacatatgtatgtgtgtatatatacatgtacacattttgaataatatgttcacagattaaattctagagatrgaattacagatacttttttgttgtatattctcttttttgagagacagagtctcactctgtctcccaggctggagtgcaatggygtgatctctgctcactacaacctccacctcccaggttcaagtgattcttcttctgcttctgcatcagccttccaagtagctgggattacaggcacatgccaccaccccggctaagttttgtatttttagtagagatggggtttcactatgttggtcaggctggtctccaactctttacctccagtgatctgcctgcctcagcttcccaaagtgctgggattacgggcatgagccaccatgcccgacctgttgtatattcattttcaaatattctacaatatgtacttcttattctcatcatcataaaatagcaataaatattactgtttttaaaatgaaagaagataaagaaaaactatgaatcataagcacactttagagagtacaattatacagggagtttaaaaaccatcaaaattatccttaaggacaatgtctgcatcttaaatgagagacctcctagactgcaagtgcatgcagcttgcacaaaggggccctcactatcattctgatcattaaattctttttttttttaacttgcgaaatctgttttattcaagtttctttcaagccaagtggctagaactaaggttaggtttcatttttgagtatgagattagcagttgtcttagctcgagagctaaaacattaattttgaagcaggaaaggtaaaacacagaagtatcatctcagcaagcaaaataagctttttttccccccttgagtctttaatgaagaaaggaagtgaaaagagataaaaagaggcctgtctctgcatactgtactaggcatcttccatgtcagtatcagcattctgccttcctcgayaagactctcagcctgggaaagaaggaaaccaagaattatcctcacaaccagaattgttctagagattttgtggaaacacatttattaaagactgatatagtttggctgggtccccacccaaatctcttcttgaattgtagctcctataattcccatgtgttgtgggagggacctggtgggagttaattgaatcatgggggtgggtctttcccgtgctgttctggtggtagtgaataagtctcatgagacctgatggttttacagggggaaacccctttcacttggctctcattctccctcttgcttgccgccatgtaagatgtaccttttgccttccaccatgattgtgaggcctccccagccatgtggaactgtgagttcattaaacctctttttctttataaattatccagtctcaggtatgtctttattagcagtatgaaaacagattaacacaaagacatttgtgtacacagtgataaaatggtttaaaagttagggagacagctacataagacaaagggaaacaggattagaatcaggcaaaggagtttgtaagttcttgggtgtggagcttgctttctcctgggaagagttgccttttgagatgctgtcatcctttgaggacaggaaccaaaggaaaaaagcaatgagggaacttctttttgtcccaaatcgcctgccaaaaataagtcagtgatgcttgtcaagcttggacgtgtcttgttcatacagtctggtaatagccagctttcttgtggaaaaatatagcaggcacccattgaacttcttagatgttctctcctctttgagcatgtaacctttcatctacattctacaaaatagccactttgatcttcctactcaacaatttaaatggatccccactgcctaagaaggaaagcagaaatctcttaccctaatgttctcgtccttccaaaatcacattgcagcctgtcctttagtcttattttccataactccacttcacttggtttgttccattcagaatgtgctttttgtttgtgggcatacttaattaggcttatctgctggtctactctgattattacatagttttgtaatatctaaagctaaaaatggatatatatatatatacttattaaaatgaacttgatacacatgtgtgtgtacatatacatatatatataaatacctttcatcaatacttttgcaaaactttcatttagagacttttagaaacaaattgtgtgtatgtatattatgacaggttggcactgattttaatttcttttaggataatgaacctttctgatttggctgacttgtagtagtggtaaatactacctgttggaaacctgtatttaatctaacagatgctctaaaagtctgtactttctatgcagcatggtctggcagaaaaacacttttggagtcagacagctcaacgcctcagttatgtaaacaagaggtatctacgtagatacatagctagattcctagatagatggtatctattatatcccagatggttttctaggtcagggaatatactggaagatctggatttgaatacagacttcagtttgaatggagcttgacaagtcaattactttcaagtttaagttcctcctctgggaaatagcacaaatagcacacatgacaccacttcataggatgtgctraagagtaactggcttaatgctgttaacctcccaaccttgttcgtatgacagtgctttctgaggctgaaaatctgatcttcccaggtttgaccagttgctctgtttagctaaggtcagcctgtttattatttgggacagtcccaagagaggcaagattagcatcctttgaactgaaaggaacccttctcatctggagggtgaagaaggaagaacagaatgtcctggtggcatttagaatggaatctctagcccttctccttggacactgtttgcgtcatgaaaaaaactgtaatatggagacgctgtctccagcaagaaayttatggctatayttcaatagtttgttcaaatttagaccatgccagcttctatagttgatgaaagcctgaatatccaaacactatctccattaataaaatctcaatgttcccagaatgacgaatgtctgaaaacgggttttattgtgaaaggagaagctcatttggtgtttcctcttctctctttgcttttagaagaaaaaaatgagaaaactctgtagtcagccaaaaggtctttgccccctactaattctttttttaaaactgtcatgagaagataagagttttaaagttttgtattctatctctgggtcagggatcaaatatttgcatttgtaaagaaatcagaattgtctttgagaggtggagattcctggcaatgttcaagctcacaagttgcacaattctgtaatgtgaagtacttctagtcacctcgatgatggagagggtcacagcaaagagatctggccacatgggtggtcaaaagtaggatgtgcttagaaagaagttgtttttctttccattttctattattaagtatttaaaaactgtgatgtagtcacaytgtttctgcattgatactgtgctttcctttctccctcccacagccctcagtaacccagaygtttattcttctatctacctaccttcacttcctatcacccaagggtttctgccttttaggttttctttagactgagatactgtctccctagcctttctgctttccggctggccgttaaaacaatcacccagcccttttctgtattataagtgttaattctgatctcagttgggaaataggcatatgggaaagatacaggcataccttggagatattgcagatttggttccagaccactgcaatagagcaaatattgcaataaagtgagtcacacaaattttttggtttcctggttcatatgatagttatgtttgtaatatagtctattaaatgtgcaatagtagtatgtcttwaaaaagtatgtgcataccttaatttaaaaacagcttatttctttaaaaatgctaacagtcatctgagccttaagtcataatcttttgaaaatattttttcttaaattaaaaaaattaaagtatcttaagtctgcttcttaatttttttttcaaatcctccactatttttttagataggatcttcctctgtcacccaggctggagtgcagtggcacagtcttggtgcattgtagcctctacttcccaggctgaagcaatcctcccacctcagcctcccaagtagctgggccacaggtgtgaaccaccatgcctggcttttgtattttgggtagaaatgacatctcgctatgttgcccaggcttgtctcaaactcctgggctcaagcaatccacctgccttggtctctcaaagtgctgggattataggcgtgcaccaccatgccctgcacaggtcatgatctttttgctggtggaaggtctggccttgatgttgatggttgctggctgatgacagtggtggttgctgaagattggggtggctgtggcaatttcttaaaatgagacagtaatgaagtttgccacgttgatcgattcttcctttcacaaaagatttttcagtagcatgtgatactgtttgatagcattttacctacagtaaaacttctttcaaaatctgagtcaatcctctcaaaccctaatgctgctttatcaactaagttgatggaatattttcaatcctttgttgtcatttcaacactgacaaccagaatatattctatctccagagaccactttctttgctcctccataagaagcaactcttcatccattaaagttttatcatgagattgtagcaatttagctacatcttcaggtgccacttctgactctttctcttgctctttctcccaaatctgcagcaacttcctccactgaagtcttgaacccttcaaagtcatccatgagggttggaatgaacttcttataarctcctattaatgttgatattttggcctcctactatgaatcatggatgttcttaatggcatctagaatggtgaattctttccagaaagttttcaactaactttgccaagatccatcagagaaatcactatctatggcagctctagctttacaaaatatacttattaaataagacttgaaagtcaaaattactccttgatycatgggctgcagaatggatattgggttagcagtcatgaacacaacattaatatccctgtacatgtccatcagagctcttaggcgactaggtacattgtcaatgagcagtaatattttgaaaggaatctttgtttcttagcaggtctcaacaatgggcttaaaatattcagtaagccatgatataaacagatgtgttatccaagctttgttgttccatttatagactacaggcagagtagatctagtataattcttaagggctgtaggatttttggaatggtaaatgagcactggcttctgcttaaagacacaccagccgctttatcccctaacaagagagtcagcctaccctttgaagcttagaagccaggcattcacttttcctctccagctatgaaagtcttaggtggaattttctctctgcacttattggtcagttatgttgtgaaactaacctgctctaaaaataacatttgggccagatgtggtggytcatgcctataatcctagcactttgggaagccgaggcaggtggatagcttgagcttaggagtttgagaccagcctgggcaatatgatgaaaccctgtctctccaaaaaatgcaaaaaattagccgagcatggtggcaggcacctgtagtcccagctactcgggaggctgaggtgggaggatcacttttgagcccaggaaacagaggtcatagtgagccgagatcacaccactgcactctagtcagggcaacagagccagaccctctctctaaataaataaataaataaataaataaatwctttatttaataaatgaagcaaaacaaaaagawcactgatcacagatcaccataacagatataataatgaaaagtttgaaatattgtgaggattaccaagatgtgacacagacaccaagtgagcacatgctgctggagaagaggtgccactatccttgtgtgatacagggctgccacaaaccttcaatttctaaaaaatgtaatgagccagtgaaatgagctgtgcctgtacaggaaggtgctaggatcacgtaacttatactgttactgaaacaccaggggtttggtctaggtcctgctgcccactgcactgaaagtcaatcactgagatgccaatgtgatgtcaatcaatgaaatgtgagcacagtgaaatgagctgctcctgtacaagaaggtgctaggatcatgtaacttatactgttactgaaacacccggggtttggtctaggtcctgctgcccactgcacagaaagtcaatcactgagatgccaagcattgccaaggaagaaggcttttcttgggtgctgcagctgaggagatgggagctcagactcaaatccatctccctgactgactaaaaccacgggtttatatagaagggaaaaaaatagtcacaatgtgtaagaaataggaactagggaggggcaacgaagcagtcatgatgagtgagggatatggcatttggtacagtgatctggtgagtttcacttctttgatacttttttgagaggcctgaaggtcctttcccaagaaaggaactcagataaaataaatataagtttcaagctttaagacaaaaaaggtcaatttctatgtttatccaaaagaacagtctatggaacgatggggttggtttcaatacttccctggcatctgattggtagttctcgtgtcccttctgaaatggaaactataagactccttgaacatttttctctatgtgaccagaccagttcttctgaaaggatgctggtcacacctgccctttcccttcaatatagttctttccagcaagggcaactccaagagctggccctttgcattttcaaggcctcctaggaagtcgtattcatttcagggaatttctggtccacagaagaaaaggtacttcctcacagtgcttaggtaacttcactaactaatgaatctctctgaaagaccagaatgttccattcaatgcagttactaaaatgtatttttcctttaagattattctgctttatatttcccttttgatttctcttgaacataagatgtgataagagactaatttcagtattaattttctgttttaatactttatgatgaaaataattataattcagtacatttaaattttaataaaataacatctagacaataacttagtatcaatttaatatatagttaattataatatattaattaatattaatttgttaatagtttattaagcattaatgaattataaaagcatttaaacaaatgtcttaatattttaaaataatttaagtaaaatattttaaaattgcttactatttataaacatttagatatttaaaattaataatactttagttcctagtttaaatagaaaaatgttcctaaaatatgcataagggaaaaaaaagaaaagaaaaacacactgattatttatttccaaagaacaattaaacaagaagcaactgatgagaagcagaattatttgggatggatatgagccttagcctccatcttctgtagtgtaattttcttatgaatctgttttagcttttccctgaaatcagaaaagctgtgtgtgtgtgtgtgtgtgtgtgtgtgtgtgtgtgtgtgttttgtcaaaggttaagtctttcttttttgatgtgaaagttagaacaattaaaccgatgtaaatcaaattactgttctttgaatagtaagccatccttaccatccttatgctctctgtagttcctgctttttctgttttaatctgtgcattattattaataaaaatcattttcttctataaagataacatatgattagtacagatatattgggaaatattaagaatcaaagaaagaaaatagtaacctgtagtctcccatgcaaagacaacacatatcctttatctgagattttcctgttgtccagacatgtgaatgtcaagagagaatatagaattaatgaatcaaaacagttcctgtgaactcatatagatgttgctttactggaccctgatgtttaacattgttacagaaaagtcgggggtcagtctgattatgctccctttacaggtaacctgtttattttggctgaggtgattgtgtgtctttattcttatagtttattctctgttctctttctttcaccagagtctgttccattaaagaccaagaacgattaccccttgcctttttacagagctaagaatattagaaccatcagtggctcagggtctgtcaagtctccagtgagtcattctaggttgttcgccatacatttctgttcatcttagtttctctctgttcctctcttgattttttgccggacagaatattataaggaatatttattgtttgtgacattagggccatcaaattcttaaataagacttagtcctttctcagaggtagtattatccttttctcccttttgttaaagtgataatacgatcaatgtaatttttaacatttttcaaatatatatcaacttttgaaattagctgcatgtagtaataccagaaaatgtacattcatagaatttgttttgttcttaattctagattttttaagttacagaattaaaatgttaatctgaatcccttttgcatcaataaaggatttttatatcataatttttagaaacttccttcatccttaagttggccttcaaagcatatatatccaatgtcactccatagaaactttggttttacaagtaaatatatagttcatttactttatrtgatatatttgttatgttttgtatttgctgactatatgcattttatgtggaaaagcattttaatttaaaaagtttcattctagaagaaaatcagctgttttaaaagtattttgataactggttatgagccataatagtattattgttgtgaagcattttgtttccctaagtgtaagagtcaaacccaagaaaaatattttaatatgaaaaaatattctaccacacaatgatcagaatatgtacttttattagataatattttgaggtgaccattttggcatgtgttgggttggtactaaaaaatgaaaagatgagcttgcatttctagcataggctaaaattatggagatgatactcttaatgattatatgtctttaatcagaagttttcacccaaagaacacatggcttgaaataagttttttaaaaacatcaccagtgtcaacattatattatacaaattaagaagtaggattttttcctttttttaatgaaacacattacaccaagttgggaagggttaacattgtcctacatataatakaagacagagaatggaccagcaatgtagtcagaaggttgattctagagttccagggatcttagaagtcccaaacataagcagggagaattttggctttagaggtaacatctatcttgtccatagaacttgacgtatttttgtgccataacctttactaatctgatttcttgaaatgttttactttgtttccaaatccattgctacctatggtaaagtttctgacaaagagcatgctcctggattataatagctactgtagaaagcttattacatgtcacgtgtttgaaatacagaaattcatgtggttcttatagcactgctgtaaattaggtattaccatatccttttcacaaatgaagaaactgaacctcagggtattgagccaggacacgcagccagcaagtgcacacactggcatgttctagcccaggtatgttcaccactatctgtctagggaaaataattccatagaacataagagactgaggaaatgtatagagccttttaaatccttacatattactgataagaaaatgcaagccctttaacttttrtggtaaatggtgcaattaaggtgtktatacttatttataaaacatagcaggctgggtgccgtggctcacacctgtaatcccagcactttgggaggccgaggtgggcggatcatgaggtctggagttcgagaccagcctggccaacatggtgaaaccccatctctactaaaaataataataataaaaaattagctgagtgtggtggcacacgcctgtaatcccagctgctgggggaaggtgaaacaggagaatcgcttcaacctgggtgacggaggttgcagtgagccaagatcatgccactgcactccagcctgcgtaatagagcgagaccccttctgcaaaaaaaaaaaaawaataaaaaaaagcaaaggcatattttgttttaaatgcatttcattgtccagtgtacccaaccatccatatatgacctagcacttctcaaggacaaattatcttgccacctatgcagacttggaataggatagcatggtaaactgaggaagaagtgagagcatgttaagttggtggaccatgattggcatcagccaattttcatrtagttcctttagttccaaggatttgttatagttgatctaaaaggatgccgaatgaacagcagtaaataggtgaccctgctttgcttattggtgttccctaccagaggtgggaaagaaatgaataattcctctaagtggaaatggtccrtgctccagtaggtttatgctacatttgaagtgtcttccttctgtcacttcctctcctctctactctggggtttgtgagagcttggagtgtgtcatacaatatcctctttggattgtgaactttcttacagttttcagagcactttgaaagacatctgaatcataagggataacacgggatggatgagaagaattaaaacctgtaataatgtatagaattatcactgggtgtggtccaggttgtctgccagacctacttctccagccactcctatttcaaagatgtggcagttaaggtccaggaatttctggtgatcctgattcctagttaagagtcagaaacatgctccagtctagttctgtctcagaatgaggtagctcctagtctaggactttgccatgaacaacttaatacttttatttatattgagtcatttgatatgcagaatcccaaatagatattgaggacttttgggattatacctctatttatttactatgtctttgagtatacctctttgaatagttttccttttggttgctatctcattacaatacacatgtgacttatcacagtctactgatatcaacattttaccactttgagtgacacatgggggccttatttccatttaaatgcttttacctttcccacttttaaatattattgtcttgagtatcagatggtgttataatgtttaagtcatctaatatatcttatgaaactcatgaggaggatcatctatcgtatgtagccatatttcagcttgttttgttgttttatttcctaatgctccatgattccatcttccatcattttctttctgttcaaaaaacttattttagccatttttaaaaggtctgccagcaacacagtccttttgtttctttcatctgtttctatattcccttcattcttgaagtatagttttcctggatatagaatttgaagatgacaattctttgttttcagcacttggaaaatgcaccttttccttctggcctatatggtttcaggtaagaaatttgctgttattggagttgatgttccctaataggtaatgtgttgttgctctctcagtgctttcaagacttttttttttttttttttttttgcaattcacttatcaaaattttaattatgaaatgtcctggtatggatttctttgggtttatcctgtttgagatttatacagcttatgaatctgtagatttatatttttttgccaaatttagaaaattttaagccattattttaaaaacaatttttcaagcccactctctttttctccctctattctggacctttgatgatgtgaatcttgaacattttgttattgtgctacaagtccttgagggtctgttttttgtcggtttttagtctattttcttcttgttcatagtgagtaaatttggtaattctgttgatctgttctcaggttcactgattctgtcctttgtcaccttcattttactattgaacccrctaagtttatatttgttgtactttttagttttataatttccatttggttctttttttaatttctcaaaaaatacggaatgcgtcacgactttgcatgtcacccttgtgcaggggccatgctaatcttatctatgctgttccaatgttagtgtatttgctgctgaactgtgagcaccgtggttctttttttaataacttctagttcttggctgagattttctattttttcatttgtttctaaataatttacagttactcattacaccattttgaggatggctgctttaaaatctttgtcaataagttcttcttctgtttcatctctgggttagtgtcagttgtcatttcacagtcaagttgtgattttcctgayttttggtttgttgggtaatttttcattctatcctggaatttggctatgctgttaggagactcagagtctgatttaaatcttttgttttagtaggcagtcatcccatttargtttagcaagaaaatcctggcctaattttgtgggccgtgcatccaatgacaattrcattttcagagactttgtggtgctattttggtcttcttggtttatctggggctgctagggttcctcctggcgtctgctggtgctacctgaaggggtggagctcttcagtagagcctcatgatgcctctgatggaggtagagggaatacaaacagatatcctggagacaggcactagtgctgaggactgcccctctctccaaggaaaacacttcccaggtggagcctttttttgtggcaggatcccctttgctagtgctgcaagycacctgctgtttctcattggaggaagggagtcttaggcttggtgagtaaggagagtgctttcctgtcttcttatggtcagcaggtgtattagtctcatgctgctaataaagacatacctgagactgggtaatttataaaggaaagaggtttaattgactcccagttccacatggcttggaaggcctcaggaaacttaacaatcatagtggaaggggaagcaaacacgtccttcttcacaaggcagcaggagagagaagtgctgagcaaagtgggaaaagccccttataaacccatcagatgtcgtgataacttactatcacaagaacagcatgagggtatccacccccatgattcaataacctcccaccaggtccctcacaacgcgggattatgggaactacaattcaagatgagatttgggtggggacacagccaaacaatatcagcatggctcctgctccattttccctggctagtaccgctggccagcctggtagtatcattgggactcccctttggtctgagtgggaatgagcctatttgggctggctacgagattgaggctctagaaacactgggcttgggtgaccttctgtgaggttgtgggttgtaagacactgtcactgtgacattcctctggttgtagggtctctaaccatttcaccttttggagttctctggcttccttttgtgttttttttctagggtttatatttatacttagctgggagaaacagggaaaaagtatctgtaccatcttgtccagtccagaattcttgtgcagggactatttttgggtagagttggggtcggagaagacccttaagactactcattatagaaaaaatgaatttagttagtggctttgtttcagtagaaagttctctatttttctacctttcatagttccctgtaaacaaaactgaaatgcagtctacctgccctctctcttccccctacttcgtaatcatgctgtgatatggtttggctgtgtccccacccaaatctcatcttgaattgtagctgccacaattcccacatgtcatgagaggtacctggtgggaggtaattgaatcatggaggtgggtctttcccatgctgttctcatgatagtgaataagtctcacgagatctgttggttttataaagggcaattcccctgcacacactctctcttgcctgctgcatgtaagacataccttgctcttccaccatggttgtgaggcctccctaactatatggaactgtgagtccattaaacctgtttcctttataaattacccagtctcaggtatgtctttattagcagcatgagaacagactaatacatgctgcctctatgggcttcaatgagctgaagttcttacatctttaggaacgtggaggaagagttaaagcctcaccttcagttttgctactcttgtcgtagtgggaacgtgagtcaacaaatactctatctttaggccacgacttctccttctgccttcttcctaatcgcctcttgtcaacttcaccaagcttaacttcacaggctgggaaaaatgagcttttaaagacagttagtcaaatcttatatgtcaaactcaaaaagggaaagaaactgtaagtgtaaatgccatctggctttatttactcatccgcccccatctcagaatcactttgagcagatgcatgctttcactctgaagagcagtttataggaacagattgaagaaaagatttgttttaaacatttcagcacgataattagattcaattaaatttgtcactaagtattctgtaacttaagatgccctagcccttggcacatatgagcaaaaatctaaaaaacacagggaaggtgctgatgaaggttttggatgagggttcaagtagccaaatactaccttcacttttgagataaatctaaaagaaaatttttaaggtagtaaatataactctgtaaaatacaaatagaattcttaaatttcaggaaacacccaaagattcagaaatgaatcatatttcctcatttgttgggcatttaaaatgtaattttatactagtgatagcaacagggtcaagaaagcttgggaatggtgccagaaactgtaacattaaaagtagaaaaacttggttcttccttagatgaatttatgtgtgactagaaatgctatgaaatgttctcaggtaggaaagtacttgcggcacagaagaaaatccctgttctctaggattttgggggagaaactttatcttaaattattctaggtatgaaatcatttacaaatgtaatttttattttaacatggtgggagtgagaaatacrgaccactaaagatgctcacatccttatccctggaacaaaaagatacttttcagatgtgactaagttaaaggccttgagatagggaggttttatgctggatcattggctttgaagaaagaggaagggtccatgagcagtggaagcttctggaagctggaaaagtcaaggaaactgattcttccctggatcctgaagaaagaattacagccctgctaacactttgatttttgcctagcaaggactcacatcagatttctgacctctagaattataagataataaatttggattattctgagtcacaaarttttgtgataatttgttacagcagaaatagaaaacgaatacaaataagtgagttatttttaagagggttgctatttgtctcatataactttttatgtaaaagcattatctacaccactgactttgcccctaggaaaacatttggcaatgtttggagacatttttgattttcaccatgggggcatgggggtggtgtattactggcactgagtgggcaaaagccaggggtgctgctaaatatcttacaatggaatgaccagtcccacaagaaagaatcatctagccaaaatagagaaattctgagctaggttaatttatgtactcaaagcatactcttgctacccaaagtgctgtacatggatgagtaacattagcattacctgacagctgttagaaatgctgattctcaggtcccactccagacctactgaatcagaatctgtattttaatagatctctgggtgattcgtgtacacattgaagttgataaagcactggtctaggtgactttctcttgctttcttcctctccctatcatttcctttctcctcccttgctactccctgcacttacggttcccatttagctacgtaaatgcctttcttcccagcttcagtttctagtctcctcaagccaggtctgtgtattatttcatctctatattctcccaaagacactgactacattgcattgcacaaaatagctgcttgatattatttatggatcgaatgaacttctgaaaattcttgatgtagataattttcattttaactgaatggatggctgccatcatttttactttgtaattgaattcaaacatttcctagagtgtcaactatgaaaaaagatagccatttcaaatacctagaaatttcatagtaaattgaagcttcctaatgatttcacagtgtgaagaagagaactcatcctaartatcctatattctgattcttgatgtgtaacaaaatgtagccagtatttccattcttaacattccattcttaacattaattctccagagcaatcatttgtgtaatggaataatttgtgttgtatttttaaaaaagaattagccgatgtttgtccaaggaacctaaggggattatcaggtttttggtatttatcaaaatctgttactttatatgatggttacaactacaaggaattatctcattttttttctttgcacgaatgcagtgaaaacactcataggatgttttggagttaaggtgacacacattacgtgaaaggcctgattttatgaatactgcatcttacagcaaaaataagaattcactgctacagaaaaggagcaaattaaaaattctagtttagttagccagagatttctcaggctgtaagtgatctccttcattttgtagatgaggaatttgaggcctagagaagttggtgctagtcaaaagatcaaaccgttgcatgttttgtggaaaggacaatattggaggcttgcttttaaacatagctgtcttcatctcgtgaacgtgtgctgtaaacccgatgacccttgagggccttgcaacttttgaaacattttaaatccggttctcccactctaaatatagcgttcttatagtttcatactgactctctgtagactatttctgtctggagaaaaggatgggtaggtggatggaagctgtcactacaatactagtacaaaagttagatttaaattcatgtttctttgcacacggtaatctacataaaaaagtttttacttcatatgtagatgaataaaagtgccaagttatattaattctctgataaaatagttttgtaattccaaagctactgggaaaagtccaacagacacatattttttaaatttctaaaagcaaaactagcactggaaaaaataacttggtccagaaatattggtttgtattgcttggaattgtaagcattgtgttgttttaaggtcctttttacccttcaggatagagccatggctttcactggattcccagaggcaccaatgtcacagaaatgagtcactagttttctcagctcttgaaatacgtatctgaagaccagtgaaaatctgacttgtcaagactatgattctaattactagggtttcttgagctcactgtttttgctattaaatattttcttccttcctccagaaattctgtgtttgaggattttatgtatcccttgtgaaataatccccarataatgaaaattcaacaatacaaagtgatgcagagacaatgatccttgacaacagtagtatagatatctgctcattaaaaaaaaaaatcaaaggccttattttagtctatatctagttatttttttctacttttcaatgtttctccctatctttctagaattagttctccagttgtctttttccttttaccttatgttgttttatcttcaaagacagagtgatggagcttagtaaggatgctatgatttgaagaacacagatgcctctaacttatggaagaggaagccaaatgctgttccacattcagataaacagatgaatggatgcaaaagtttctccctataagatgtgtttgtagttctgatgcataagaacttttccagcatgctaagggggttgaaaggtactgtattagtttgttttcacactgctgataaagacatacccgagactgrgcaatttacaaaagaaagaggtttattggacttatggttcaacatggctgggaggccacacaatcgtggaggaaggcaaggaggagcaagtcacatcttacatggatggcggcaggcaaagagagagcttgtgcagagaaactcctgtttttaaatcagatctcatgagacccatttgctatcatgagaacagcacgggcaagaccctcccccatgattcagtcatctcccatggggtcccttccgcaacacatgggaattatgggagctrcaagatgagatttagatgggaacatagagccaaactatgtcaggtaggaaggcaggattcaggaaaataaaattctctgtctgattaaagagttcactaaatcacgcctgtaatctcagcactttgggaggccgaggtgggcagatcatgaggtcaggagatcgagaccatcctggctaacacggtgaaaccccatctctactaaaaatacaaaaaattagccaggcgtggtggcaggcgcctgtagtcccagctactcgggaggctgaggcaggagaatggcatgaacctgggaggcggagcttgcagtgagctgagatcacgccactgcactccagcctgggcaacagagcaagactccatctcaaaaaaaaaaaaaaaaaagatttcactaaatagttgcatattcaaatacaagtcacttaactcaccccctcccaaattttaagtcatgcttcagtgtattatgtgtttattacaagttcatacggtgcttaaatcctagtcttcaatctagtaacctcactatgggtaatccttagtgtactattcttgtggatcctttcctttgtttttcttgcctacttaagtgtagggttactttctagatcataccatggagtagtacaatggggaatgtcttaaaaatcaaatacttaagtgcaaaacacaaaataaggtgtaattcagtaacaatcagactaagcaaataaaaaacattctgagttgccttttaaatgtttcaagtgtgggttgcccctgataaatttaattaggcatcataaagagataacatataaatgcatttaaaagatgtaattgcacctcaaaactttacatagttaaaaatcaaaaggccacaaatgacctgaataaatagcaggagtctgaaaaataactgtcaaaaagaaaattgtcagcaatgtttttgaaaatataatgagggccctagaaagtacgcagcatagtcaaaaatctgtcgtggtaacaagaataattatgagcaggacttgaggttcttcattagcatcatatacctggattaaatggagcaagtacatttctccctctgatctaaactggaagcgagcactttactggtttacagctaaaggaagacaaaggaattgacccagcttacatcttccctaactaagtttttcactctgtaagcctgatctgattaagatttttgactaagaaatgaatacgaaatggatgggtaaatggcatgagaagcaagagaaatgcccaggtgtcccaaaggctgtctttccattcttcacgtggggccaacatgaagctcctctgggctgcatctggttctcttttgttgctactttatttcttaggaaaattatttttattgttttttagccagaactgttctgcaatgaaattctctcagcgctggcctttgcccagctgcccagctgtttctggagggtggggtccaatcttaccgaggtggccagagtgcatccagctccgaacaccccccagtcagtgctgttgtctgataagtctccaacagaccctcctgaactgtgacctgtgaaaaatagaaatatgaggcctgtgtgttcactccctaaagagttccctccctggcttatctattttcctcaaacatctcaactaggtcaggccctgtcattaaaaaacaagtggrtctcccctagtttcccrgctaagaagatctggcctctgccttaggccctgactagggggccccgtgctgcaataactggttgtgcagcccacccagcctagtggccaggccccagtgtctgccccagagaggagaggttggagccagccacccagaacctttgctggctatgcctggctgtagcagctgttctggctatgcaactctgagcatgctcagagtggggcgtccagtacaccctgtcttcccaggctctctaaagccagaaggatttcattcttttccagaatgtggtactttagcaggctgagatagtccattcctcttagaaattgttcccctctacttgaaggatagtaaaataaaggaccatttaaacttttaaacttgactcttacctcaaattctttttcaaatgagattgggtctaaaattaagaaattaaaagcaaatattcattttatattctttttttattttttaagactaggtcttgctttgtcatccaggctggagtgcggtggtgcaatcataactcactgcagcctttacctcctgggctcaagcaattcccccacctcggcctcccatgtcgttgggacatgtgtgcaccactgcatctggctgattttttttttttactttttctggaggtagggtttcagctcgttgcccaggctggtgttgaactcctgggctcaagcgatcctcctgcctcagcctcccaaaaggctgggattataggtgtgagccactgcacctgtcccttatttttaattttaagcaaaaagrggactgactctgaagttcaagaagtcatcaagaaatgctgatgggttacttcagaattgtttcagattaaaggacagcctggtgtcactctgtgactatggtaatggcatagtagggaatacwgcttcccactttgctatctctaggttaggagaaccaataacagttcacccaaaatatccacatttcttggaggcttatcctttgcgtattcactgaagaaggaaaggaaagaaatgaagggaacccattaggtggccctgtgcttcgtattccatttgcagtgtctcattcagtcctcacaatagtgctgaaagtagatcatatcctcatttgacagataaggatattgaggctgggcaaaagtgaataacttgtccaatgtcccatatgcagtaaggaaaagaaacagtatctgacctcaggtctgtctgtctctttcctcctataaaagatgaatacatacctttaaagtcctccaagttacccagcctcggagattaaaataaattttatttccaagatatctctatttttcttcctccccrctaactagcttcttaagttcccatgtgaatattgtcattcatttccttaattattaaacatgttttgttttaaactggtaaataatgtttaataaaggttttattattattttaaaaacatttttaatgaagttctttccattgaagcatttctaatttattctaatgaagcatttccaaagaataaagaaaagtaataatttagggttggttatctacatcaatatcattatcaaagtctactgtctgtccttcctcttttttcctccgtcttagaccagggagcatagtagatgaacatcatgcaggccagcacactgaggcyacgtgtaagcaggtgggaagattatgtgcatgaaacagacagtcgcataccacttttggttacaaacacttgccctggatgagagcaggaattgagaccacgtttgtgtcccagtgggttccaggactttttttccatcagtttccaccctgtcctggacaggcttagaaaaacatgtttcttaccaaaaaaagttacaaaaacaatgtttacattaaaattcaaagtccatgcaactgcctctggttcctcaaggtaactactgccaatgatttggtgtgtatccttctagacattttttgtaatgcacatagggtatatatacatataagtacctatagcaattttataagtgacctgttgtacatgaggtaactttatagacttaatgtaatgtgcgtatcttcccatgtgggtaaatatgatagagcagtgccaatctgcttaatggctgcttactactccacttatgtatactatcagtggatattgagatagtttctaattttctaccgttataaatatttcattgaacattatgtggttgtatttttatatgcttcttcaagtatatctggatgacacatttctaaaatggaattgttaggtaaaagaggacattgtacatttagatagatattgccaaattgcccttcaaaaagatggtcaaatgactcttctatcaacagtatatgagtgtgtccatttatttattaccattatgtcactagtaagagcattttaaatctttcccactgtgctacctattctttttaagatcagaataacacatttaatactgatgagctttagttctgaagccaaagcgcttgctaacatttcatccctggatcaacagactcaaccacccagccacagatattgctggacaatcatgggtttccccagtaagggtgcagcctgcaccactaagcttattgagtgtttttgagcctgcctgcctgcgtgcctgcctgcctgcctgcctgcctgcctgcctgcctgcctgcctgccttccttccttccttccttccttccttccttccttccttccttccttccttccttcccttcctccccttcctccctccctcttccttccctttccctttcccttcccctttcccttcctttcccttcccctcccctcccttccccctctctctctctttctttctttctttctcactctgtcaaccaggctggagtgcagtggcatgatctcagctgagtgtaacctctgcctcccaaaatcaagcgattctcctgcctcagcctcctgagcagctgggattacaggcacacgccacctcgcctggctaatttttgtatttttagtagagatggggtttcaccatgttggtcaggctggtctcaaactcctgacctcgtgatccacctgcctcggcctcccaaagtgcttggattataggcatgagccaccgtgccggcctgagctatgacctactttctacaggaaactagaagaagaaactaaagatagttggtgctggcctttctagtgttggtcaacctcttcctcattctctctctctgtcattctctctttcctactttattgaactataattgacatataacatgttgttgcatatattgatagtttgtttctattacagactagtattccattgattggaaatactactgtatattcacctgttgatttgtggatggacttttgggttgtttctagttactgactattacaaatattttgctctgggcatttcctacacatctttgtgtggacatattctttcctttctcttggataaatattgagtagaatggctgagtcatatgatatgtgaatgtttaacttttgaggaagctgccaaactgttttccaaataattaataccatgttacattttcaccagcagtgatgaaagtttcagttccactatatccaagtcaacatttgctagggtcactcttctaaattgtagacattcagtgggtgtgcagtcgtatctcattgtggatttaatttgcatttccctgatgactagtgaagctgatcgccttttcatgtgcttaatgcgccatttatacattttcttttgagaagcatctattaaactattttacattttaattggattattcattttattattgtactgatatgtaatgggaatctgacttttatatccctccctcaccccaaagtcaaattattccaagactatttattgagcatttgatcttttcttcatgttttaaaatatgtgttagattttgttatgcagagatccgtttttagattttaatgtgtgccactaatctcgtttatcctcctgctagtaccaaactagcttaaacctgtgactttatagcatgttttaatgagataatcccctttcattaacttgcccccacaaatgcgtttaatatacaaactaattttgaaagaattcctattttaaaagtattgaatcttccccttcaagaatatggtactagttccatttatttaggtattttttcttaaaagttatgtaatgttctttattgaagaataacatacttttgctagatgatgattatcttgcaaatatttattataagaaatccatttagttttgtactttaatttatatatgcccacttttctgagttacaaatttttttctaatagttgattgaatagttatcaggtattttagtttttctattaacaagcaggcaatctgaggacaacttattttcaattgtttatcacttttttcttttccagcttaattcattgactagaatgtcagtacaaatggatatccttttcttatcccttatattagtggaatacttctagtatatcgttgttaaataagatttctgttggtttctaataagttttctgtagttttccccattcccagattactaagtgttgtacttgtaattatattttgatttgttggtggtggtgttttatcttccttttaaaaaagtaaatgttgaattttaccaggcaagtcattggtgctaatattttttcttaatagtgtggtgaattgcattaagagatttcctagtgttaaccctttttggttggatcatagcattctgctaatataatgtcagattcaattatattcataaagttgactggtctatacagttattctcaaagaaaggtggtacttcctgctgactattctccagggacatttgggaatgtgagggagtagtttttgctggccacaatgggcagggtgctaaggaccctggaattcatggaacagttaatgcaacaaagaagcttttcatccccaaagccaattccaatcccactgagaaaaactaatctgtagttttgtgggggggagatttgttttgtctatttttttatagtttattttagtctcttagaatgaattggaattttttttaaatgttaatacttggggaacaatataaattccataggaagtaatatgttccttagtggtttgataaatttcatccacaaatccatctgaatctggtgccttttgaggggggtgaaggaacttttttaacgattatattctctatgttttttgttttgggtatattcagattatcaaactattacatcaattgtcatagtttgtttccttagaaaaacatcaattttagccattttttcaaatttattggcaaataatttcatgtaacttcttctagttgtgtgaacttcatcatctatggttatctcttcttcgtaatctgtttttattttgttggtcatatttataagacatttgtctctttagttgtttctttaaataccagatttgttgtcttaatcaagtttattcttttttatttactatttcagtaacatgttttaatttcttttttgcttttggggacgttatatatttttgctcaacttcttgagttaaatgcatggttcatttctttctcattatttgtattcatttgtaaaaatattttggcctctgaatgcaaaactgtgctgttaatggatttctagtctgttagatattccatttggatataacacaatcacttaattagggtatgtgatttgtattactagaaccaatagtgattattttgtaaccacaatatgctatttgtacagcaaacaagcctaaagctgctttgaatttccagcagctcagctggtatcctgttgttattaacagttgtaaactcaattacaattttacaattaattttaaagtaatgatttgtgacaaaaattctagtagtgaaaaatacacagtgaatctaccttctcacctcaatctttagccatggcaatactaatttctgatttagaattttttaaaattatctacatatataagcataagtgagtgtgggagggcatgtgtgtatctacatatacacactgagtatatgcacctattcttacctgacttttcttttcaccaacttaatgtggttttttctttctttatttatttttttattttttgagacagagtcttactctgttgcccaggctggagtgcagtggtacaatctcggctcactgcaagctccgcctcccggcttcacaccattctcctgcctcagcctcccgagtagctgagactacaggcgcccaaccatgcctggctaatttttgtatttttagtagagacagggtttcaccttgttagccaggatggtctcgatctcctgacctcgtgatctgcccgcctcggcctcccaaagtgctgggattacaggygagagccactgcacccggccaatgtgttaacaatagttttgtaaaacatactaattcatgcccatagccacttttctattctcttccagtgaaactgcttcaaagagttgtatatccttgcagtattcagtttctttcctgctctctcgatgttactccaagtcaggagttctcatgactccactgaactgtcatcagtgtcctccttgccactaaatwcattttttcagttttcaggtattttttacttttctcattctctccagtatccagtctgttagccatacatatcagctgtatggtcaaaatgtgtctatgatctccaccttcccrtattcaaagccaccattatctcttgtctgatttactgcgtgagtttctagctgctcttcttgtatccacacttgctcttccasagtctccaaatattattcccctctaaaatgtatcttacttattttgtattttgttgattgtctttctcatttatcttagaacctaaactcaatgaaggcagattttttttttttttttctgctgggttcattgctgcatccctagtcacataactaatgaaataattacattgtctaataaaataagtacaaaaagaagacatcgtttctatgaaaattaggtgaatgctttgttaacattcaattaatgtaaattgggggaaaaaaagaactgatgaaaacaactgtcgaagtttggagaatccataaaaacactccacagggtttttcactgaaatggctttgcaagaattttaagttctgactctattctggaggagccaaattggaagtagtatgggatgcttaattggggttgcttttgcttcgaatatgacacagaactccagtcaatgcacctgtgttcaaataaaaagccttgactctatgtcaaaacattggtaaatgaatacaaatttatatttttaaataagatgtttaaagtatcatttttatgatttgttgttctaaacactgttagaggcattgaattttatcctccattaaggcttactgtagggcatctgatgacttggtatcagtaaagccagaatacctaaactgatggaattgaataggattctactttatgggtgcagtgtaccttattttacttctctatttatgcttatttaagttatttacagcttttaaaataaagaatactgcaaatctttgcacatgcataattgtattgtgtgtaaatatatctrtaggataagtttctatcagcgatattgttgcagtttatttagacagctttagaactgattgacttttgcttaggatttacgggctagtcagaatttgctttgcaatatttagacttggtgttgtcaattttatcagctagcttttttactctacacttgtacttaaaataattgaaatttatgtagaaaaaagtatgtttatgattgtgaatctggaattctgtagccgaagcacccacttcccaattgaataattgtttttataaccttactttaaggatttttttaatttagaaaaagtttttgataaagagagatatcttagacacatagctatcatattagaacagaccgtacctcctttctgctctgccaagaatctgtgcttcctaaagatcaatccagggcatttggcagctataggagatgtaactaatctcaaaaagaatgacagtgaccacatttacagtttatactgttcttcttttcatgtcttttggctattaaaaattatatttatataaatataaacatttttaggttatgtaaataattcacaaagttttctgaattcgcttttagattaaatttttaatattttccccattttgatagtaagaaaatgaattgtaaataaaatttccattacgtttctctatccttgaagtttctgtcttgggtaatacatatcttgtgattcatgaactgcaaagaaaaaaaatccacaggattttgtcatcagctacattctatgagcattttcagccagatttcagtacttgtttagatttatattattttgggagaatcttaatttgtagttaaaaaattaaatatgttgcaaaaccaattataaacttcctgttaatgttgaacttttgctagggaaagattctaaggggaatttcctttatccttttaaagggataaatattattcaaatcaccttagtaacagttggaccacagtcatgcaattagtttagtatcactttctaagttagatgatgttggtctggagttgacaacattgattttctgtgaagtttacaatttattattttttaaataagggggaaattttgctttttaaaacttttgcaatttatcacttagtttacgaggcaaaatagatttcaccattttgagaactgtgagttattttctatgtgaagaatatatgtggtaccattgtttttgattgggtctcatagtgcacattatgtaaaagaaaacaaatcttactgtcttttttatgatacagcaaagtgaagactgaggatcctgagtgtgcatagtgcatgcatgttatgygttatatgtgtatgcatacatatgkgtatatatatagttttacaagtttaaaataatatcagtgacttgaaaattgtaagggcttaccagataatctctttgtaggccttggagtagcattgtttttttttttttttttcctttggttattgatgggtaataatgctctggtaaatcagtctttttttttttttttgagatggagtttygctcttgttgcccaggctggagtgcaatggtgcaatctttgytcactgcaacctctgtctcccgggttcaagtgattcttctgcctcagcctcctgagtggctgggattacaggcatgtgtcaccacgcccagctaaattttttttttttttgagatggatttttgctcttgttgctcmggctggagtgcaatggtgcaatcttggctcactgcaacctctacctctcaggttcaagcaattctcctgccgtagactccggagtggctgagattacaggcacccgccatcacacccgactaatttttgtggttttagtagagacagggtaataccatgttggtcaggctggtcttgaactcctgacctcaggcaatccacccgcctcagcctcccaaagtgctgggattacaggcatgagccaccacgcccagcctaattttgtatttttagtagagatggggttttatcatgttggtcaggctggtctcgaacccctcacctcaggtgatccatccgcctcagcctcccaaagtgttgggattataggcatgatccaccacgcccggcctggtaagtcagtcttaaccttagttacttcaccctaagacagagctgggtagaaatcagawgacaagaattaggaaaaaaggaagaggcagtgacccatcttaaggtttagactgtattgtttgattgcgagtaaattaaagcctttccttttttgtatgcttatagacctcaggggtcacattctgttcctgagaatagtagctaccattggcaatgaagtatgtgtgcatacatcctggatctaattaggtggttgtgctgcttccatatttttggaacattattctgactttatttgttctatttgtagataagaacattcagaggaacacatctctccccatgtaattatctcatttagcattttgcctactcagagggcatggctaaatgttttaggtacagggaaaagctgactttggtggcagttctttatactgtcttctcaaattaagagggtcctctattcaggaatgtttcctgcataacgaatagacattccttgaarcatgatgaccccccacccactgcatttgaatgtagagcaacatcttacatggaaacagtgatagtataggaaacacaaaataacgtcaaataaactctaattaatagcttcacaaattcaagaagacactgtattgactaaattagtacatattactatgcaaaagtatcattcagagaacagtgttcctgaaaataaaaaaatctgatcgcctgccctcctttatccattactaataaacagacaaaccaaaagccactaccaagtagtgaaatggatakagctaaaaatcaaatatttgaccttgaaaataagtccacgatatcacccaggataccaaataaaaagtaaagtgttaaaaatacaaatgaaaaattaagagacrtcaaggatccatcaatttttaaatgtagattcccaaatatccaacattcattgtaaaagaagtctcagatgaacagaaacaatggaaagaaaattactcaaagtaataggatatttccttaatctaaagacgaatgtgagactatagataaaattgccaatcaagggccaagcaagaattatgagcaaagccaagacattatattctagtgatatctgtgatctcccaaagttaatgaaagacattgtgacagtttcaggtaggagaggatgagaaaaatatttggttaatggcctaggttggtagctagctagccagatccttgttctttctttcacttattttttttattcattcaacaaatgtttatagagcacttactatrtgccaaaaattttgttaggtaataatagacacagtggagtaaaaatagtctgatgacagaagtaaacaataatcacattataaataaaaataaattacacctgtgataacttctaccatggagtgttttatagtgctgasagcatattacaaagggatttttgacttaatcagggaaggcatcccagaagtagcggtaagtaaagtgtgagtaggaattagattgcgaggagagcaggtaacatcccaggaagagagagcaaacacgtacaaaggcccatggttagggggattgtgatagactgaaaggaatggaaaaactaatatgtccagaaagcagacatgcagtgcaagacaaagcttggcgagtaagtaaggactcgtactatgcaggtgttttacacaaaaagaatgggaatcatacatcagacttctcacctgcaagactaaatactagaagacagtgttctgagagaaaatgattttaagcttatgcaaactttctagaaagaatgctcatggatacactctagaaaatgggggtgggggagggagaagaaaagagattccaaaaaaaagatgtacgttagaagaaacaatgtgccacctaggtatgtaaaataagcagccctcagtggaagctgagaagcaggcctagaaatcaatgggttcgattgggttagtaagtcagcgggctgcaggaaatgtctttggggataaattgtataattaaaaagttggaaatacatctgtggcatgcttctgctgtaataaactgtgtgtttcttatctgtaacaaaagagagaataaaaagaaaaagcagttagaagttcaagggaaaacaaaaatctgttcaaaagtcatggtgttgaatctgttttttagtaagagaattaagggcatcacatttatgatatctagtcacatgtttgggcttattcttgacattctatttacgtgtgtgcatttccttgcttttgcttctgtcttttcttttccttccttttgataaattgagttttcttttcaaactgttttgttcttccttcctttttaaaaaatttttstttgtttctttagtggtttgagtggtacatccaatatctatttttaatagtggctaactttaaattttaaaaacgtactttaaaaaattcaagatataggccgggcacggtggctcatggctatattcttagcactttgggaggcgaaggtgggcagaacacctgaggtcagcaattcaagaccagcctggccaacatggtgaaagcccaactctactaaaaatacaaaaattaggcatggtggcgtgcacctgtaatcccagctattcaggagactgaggcaagggaatcgcttgaatctgggaggcagtggttgcagtgagccaagatcatgccactgcactccagcctggatgacagagtgagactcagtctcaagtaaaataaaataaaattcaagatayaattcggtttctacagtagcccccaaacaagacaaaacttttagcaaactttctactcttctgcctcctcttcttaccttttacttaagaaaaatcaagacttctagtttcttgttgttaaaatttctaaatttataaatatctgaatatgagtgagttgaatatataaaaagcacaaaaagtaatacggcaatcatctaatgaccaaacattaaaatcaaacatgctaacattttacataatttgcttcaggtctctgaaaagaattgtagatataaccaaagcaccgtcccctactccttcctcctgcctgtcatctcagaagttgtccggaaattgctgctgcttgttctcattcatgtgcttgcacttttattatrtatctgtgcactcatttaaaaaaccctcacacttaaaaataatttggccaggtaatacaggttaaaattataggatacaaattctgaaccttcaaaagtgtgtaggaattgttccaccattctagaatttggtcttccagggtcttccttatgcccctttgaatgtcctatagcatccatttaaagaccttacacacggtagatgttaatgtttattttccacccgtaatttaatgacatttctacttattaatttttcttgtttgggatatatgtactaggcgcttagctatgacttgctaattcatccaatggaagatactgagtgtctgctgtcgccaggcaatattctagattccagagatacagacatgaaagaggtagcattccttccttcatgaagttaatattcttgttgagggaagataaaacaataaacatgtaaaccaataaatacaataattttgggtataaataaaggatatatcatttgggtatatcagcatgtgatgataataaaatgggagaatgtggtgatggtggtgggctgttgctctggctaggataaccaaggatagcctttttaagaaagcgacatttaataagtaaatagacataaaaagctgcagagagagtaatcccagcagatggatctataaatgcaaagatcctgagacagaaatgggcttggtctgtgtgactggaacctcgtaaatgaggagcgagtggaaagagatgagatccaagaaactagcagggccagtcatgtgtagggcattatggatagcagtaaggatttcaagtaggaagactttggagggttttaagcaggagagtgacttagtgcaaattgatttatgcttgttttgtacaagctggactttagggaagcagtgtggaggaagaggaattggttaagagcctgttgcarttggcagataaaaggtattgctcacttggctaggatggtagcagtggagaagtggttttacctggcttttcagcacctgaatggtctgtaagaatggcactagcatwcaagtcatttcaatgtggactttccaaggtacagttgcaggatgagagttagagtctgttgtasggtatggaacttgtacgtgcgcaatacacactacttaatgttaaggagagtacaccagagggaaggcagctttggcattctcttgggcacaggaaagtagcattgtggtgatcaggagagtctaatgaagctaaaactgtcacccaggaatgttaaaaagagaacataatgagtattctgctctgctttagagctctgtatggtgttattatccttctctaaaagataaatgttgctctcaagagtgagtaatgaaaatactagagcacatcatacaataaatgaaatcatgaaactttaaatgtatgcaacatgtgctgtgaccaggaaggaatggcagtgttgaacaccaaactagatggagtaaaattggtatcagggtggaaataatatagaacaataatactgtggagatacctcaggtaaattatrtagtttcaatagtcaggaaaaaagattttttaattaatctgggttattcttttagaaaaagcgttaatctcaaaaagccatccacatacacccccattataatgaacccttagctgcaagactggggaagaataagctttgcatctgtggccactttttctgacataggctctgttaagatacatagcattgaaggatttcctagctaactatgtagtatgtgtgtaccttaatagcagaaatcacaacgtaactacagagatgaactaaaatttgattagattctgggataccaygctgcctgacctgagggaataaacaatttagggaaaacagaaaaagcaacttaggcactcatttattttctcccttgattcccaccgcaggtctctgagatgggactgtttctgggatcctcatttgaaaaacaagaagagtgaggccaccttgggcacagtgctgttgtagaattgatttaccttgacttgttttggatctatgggatgtctggttcttttgtaaaaacacaactttgccagccagactagaaacgctttctgtgtttttcatcaaaaatcttggacactgtctctagaggtcttctctggcaaggactgttttcctctttaactttggttcttgcattccatatgtaagcaaagttcaactagttaggaaaaagtcattctagaaaaaaagactgtaattgtgagaccagatggtaagcattattcagctgatgaggttggrtagatttgagggaaggtgtggtaatatgatctcgatctgcagctgtgacctgttgttccaaaacagcctcattcctccctgccttttgcgtctgcattccagcacctctccctccatctttgtgggcattggggttctcacagattgctttgacagatgcatcagggaggaataaagcttgttcaaggaagaacaacccacggatctgttttgaatatcctccaccccatgttacttgtaatattggcaaatcaggggacaatataaccacttttgttcagcrtgctgtgagacagtttcccatgacacaaattgccatgagcctatttagatgtaattaaggcatttccattagatgtcttgcaggtacctcaaactaaacacatactgaacccagctcatcagctgtcttcttctccttacctcccttacaaaacaccagtaaacattttctcctgtgtttcctccttcaaccaaagtgaaaatttagaagtcattctagacttctctgtctcatccatctcatggagtccgtctcctaaatacttctccagtccttctatatctcttcccagtgctgctgtcctgattctggctttcattatctctcttctggaatttggaaatagttttgcctttactttattttcttcttccactctgtcaccaatgttgtgtcttaaatgaaaatctgaccagtaaggccaatgagattacaatcccatagtgggaggtgtgggtgaaggtctttattttttaaagaagctctgcagactattgtaatgtgtggctagggttgagaatgtatgctggactggacaaatttcaaatagccagatatacaagacctttgtgaccttggwcatcttatcttctgctacttctgtttctgatgttacaataaataaccacacttcttcwtcctttttttttttttttttttttttttttgagatggagtcttgctctgtcactcaggctggagtgtggtggtgtgagcttggctcactgcaacctctgcctcctgggttcaagtgattctcctgcctcagcctcccaagtagctgggaccacaggtgtgcgccaccacgcctggctaatttttgtatttttagtagagatgcggtttcaccgttgttggccaggctggtctcaaactcctgacctcaggtgatccacccacctcggcctcccaaagtgctaggattacaggcgtgagctcccgcaccgggcccttcctcttactttcatactgttgcataccattcatcggtgttgtgcctgggtttgtgggattcttctatcagaaatgtgctggaaatatacaaactactcaaagcactatgactactgagtactatatttcattccccatcttggtaggtgatggcattgacccatgagaacctccaaaatgatttgcttccctatgttgtctctctattccctcttgttatcttcttcatacccaactgcaagtcctaggaatctctttataatcaggatagtattgtctcagagccttttgacatgccagctctttcttgtccaaaacacattttcacattctgcccttggagaatctatcctagggctctgcaacgccagcgtgccactcacgtaagtcatggtggtcaggtagatgcacagtttatagagggcttttacaagttgtatctcagtttgatcctcactgtgccatgtggaggaggcagggagctattatttctccacttcagaggtgctgagatggaggtgttttaactcttatcaacctttcaggtgtacgctgaactctctgtagattacatgttgatggggtccacaatgcacatctcaagtcctgtaacctgattgaattatggttagctccttactattaaaggggtttaggtgtggtttattattgttttcagaagctcaaggggaaatccttaatttgagcaaaatttatttcagaatatccattcattgtgggttaggaacctcatcccttacaattttccagcccccattttcgtcttctgtagtgcatcctcatcttttggtcagtttgatccttgaggcctctgtgaaatagaaaggagggggaggggggcgcagaatttccatatgattggttttagatgttgatttcggaggcctgtactgtgagtcactgaaattattggattgagtctygaagatccaaacacagagtgttgggactgtgtggttgggcttaatcctagtacaaaaaccagttcctttcagtgaagaagataaaggagaggaatccaggttcctcaatgaagcatccatacatagaagctcctgtgtcaggctgtggtgtttcccacttcctgccttcagtctagcagggttccttgcatttcttggtctaaaagtaaggcttatgggctctttctggaaagatcttacaccttttaaattttaacatgggaagaaattataaacaacaaatgacagtgtttgaattctctcacttttgagcaaagtcaagcagcttaagtatgwgagaataaagatattcccttctgttgcccagaaggagaaaaagatcattttatttaaaatctagctattgagatgcatgttccttgtgtctaatcaagttctgaatttgaactcaattagagctttgataaaaggaaggggaaaggaaacttgaaagaatgctgttccattcatgaagggactgtgtgtttttagtttccaagtaaatggcataatgggaccatgcattttccatccaagcattttccatcctgagaataattcccttcctggcttctcaatgaataatgcattatttctgaaacccaagaggcattcctttgattttcctttatgtttagctttctgagtgattttcaagcaaggaaattcaaggacttggaatgaatgctttattaacatttttattgaagttcaaattgctccttggctattatctcctgatatttgaaatatttttttctctccaaggaaagtctaaggtgttgtatttattagaaaatgaagtaccttggccaatcttcaaagtgaacagcagtttaaaaccaatacacatttgtgttgtagaacaaagagctttatgggggtacttttctcctttattttcatttccctgctgaaaagtttcacaaaagaaagctcagattcaaaagtgggctgtttggagactaaatctcatttgtttacattttgtgaaactaattccttgaggctggaccaaatccatgaccccagtccaagcctgcatccaccaaagccagcgccatttaaatctgaagatgcaaatgcccttctgggrttgctcctacttccgctctgcctgattacacatatgtagcctgcctgattacacatatggggcccattaggtgaggtgtaatgggacacagtggtgcccaccgctgttggctcatgttctttcagtagaagatccccagcagagtctggagtaacacagtggtaggatttaatgctattttacaacctccattttcctgggatccaaatgatgagtgatttcagaaactaaatgaaatagaattaagcatctcatctatattttcattcctcttacagttatagtaaaattgtaatgattcagaataattgggggaagaaagagaacaaagttgatctaaattagtagaacatctgaaatagtaaatttggtttaaaatatttaatgttatcattttcaagayatagaaatgtaatattttctagagcttgaactctggaggcagcctctaagaacagaaactctgggatttttctgctttccagtactgtggccttgagccagttatataaactttctgggtctcagttccttcatctgtacaatggggatattagtttctatgtcatatggctactgtgaaaattcaataarttattactggtaaagcatataggacagcactatgtgggtagttgttgaataaaaataaaacatagatcttgtcattgaaaatcacaatttccaaacaggcccatgctactcagcaggtaataattattattgttattgtagatacagattgagtgattatttccttaacacttgtttaatccatacaacaaaccttatgaggtgtaaatataatcatctgcattttcagatgggaaaattaaggaaagaaagtagtttgcctaagttcacccagtttattacatgtcaaacaaagatttgggcccagacaacctgaatccagaaactatgccttaattaaacattaaaggacacttatcattcgtgcttatcttttgcctgaaaataacactgctattaaaaaccatgttgttatgtgaggtgaagtgtttcctgaatgcagtttttcatatctcaattgcttatcaaactctttgtgttttgctcaaaataataatcatcamtgtctcataattgcttgattttagtaacgtccaaaataaaattttaagttgactatcgttaaattttttctgattttctcaggaaatgagtatttcatttgcgacaatggtggcttccaacttcagtatttttatattgaactgaaatcatttcactttatggtcgcatgttttataatattttttcattctctttttaaaaatccttctgatccctatccttgtccttgtaggggcctttatcatctgctggactcctggattggttttgttacttctagacgtgtgctgtccacagtgcgacgtgctggcctatgagaaattcttccttctccttgctgaattcaactctgccatgaaccccatcatttactcctaccgygacaaagaaatgagygccacctttaggcagatcctctgctgccagcgcagtgagaaccccaccggccccacagaargctcagaccgctcggcttcctccctcaaccacaccatcttggctggagttcacagcaatgaycactctgtggtttagaacggaaactgagatgaggaaccagccgtcctctcttgkaggataaacagcctccccctacccaattgccagggcaaggtggggtgtgagagaggagaaaagtcaactcatgtacttaaacactaaccaatgacagtatttgttcctggaccccacaagacttgatatatattgaaaattagcttatgtgacaaccctcatcttgatccccatcccttctgaaagtaggaagttgsagctcttgcaatggaattcaagaacagactctggagtgtccatttagactacactaactagacttttaaaagattttgtgtggtttggtgcaagtcagaataaattctggctagttgaatccacaacttcatttatatacaggcttcccttttttatttttaaaggatacgtttcacttaataaacacgtttatgcctatcagcatgtttgtgatggatgagactatggactgcttttaaactaccataattccattttttcccttacataggaaaactgtaagttggaattatcttttgtttagaaagcatgcatgtaatgtatgtatgcagtatgccttacttaaaaagattaaaaggatactaatgttaaatcttctaggaaatagaacctagacttcaaagccagtatttgtttaggtcatgaagcaaacaatgctctaatcacaatattaactgtttaattaaaatgttgtaacaagtataaaacagggaatgtaagtttattaccaaagtgatatgtattccaaaaaagtcatagaagatgaagcactataatattgttcccatatatttaaaatacccaagtacattctaattaccagtatatcagaggaaaattttcgtagtctttgtaaaataatatactcatcatagaaaacttgaaaaatrcagaaatgtataaaaaagcaaaaatgattactgataatatcacaacccagaagtaaccacctttaaaaagcaacccccatgtatgcctatatgtgtattgtatactttttttacataattggagtcatactgtaaacagttttataagtagatctttttcattgcaaaattgccacattttcttatggcattaaaaattttacaaaaacataattttaatggctatattatattccatttaatggatgcaactcagtttatttaaccattcccatgttgttaactatttaggttgtttctaattttsattattataaagttgcagaaatttggtgtacataaaactgtctccatataattgattattaggatatattcccatgaaggattctttttttaaaaaaatgtgaaatrtcatcttgtacttacacctttcatgmaaagggatttcctgcttttgtactgcatgggtggcagttgtgaggaaaagccagtcaaatgacctttttacaaaagaaatgcagtggtcacttcagttgagagtgactttttaatacaacaagatcaactagaagaattcaactgtctcaagaatcaaggtaccccaatatatctcgcaattccaaactttgtttgagggactcgttatccagctcttggtagccacacctgcaatgtaaaatggaagaaaatgcaaagaaaccaaatgtgccgagtgaataaaggattgtcatatcaattagtgtgggtccatctgtagcaaatgggttgagtgtgtcagtatgtggttggttactgtgtattcgccaggaatcaccccgataggctgccaccctattaggtgatacctgtttaatatgttgyccaggtagactagtagttgcatcagtttgctgtaacaagtaaccagtgaggtaacacagtggtgaagcaggtcaggggaggtcaggaggatgtctgagagaaagaagtccgggagatgaatggctgtctaggaaggaggatgtcagtgcacggttagtgtttgagcagagggcagacttgtaaagtacctgtagtgaaaagaatgtggggacccgattagcagaaaggtgtttgcacrtactttatacaaaatacagaatactttatattggaagtgaaagaaatgaacgtggacttttacacatgtgcatatttttctggaggctatatggattatttgaaatgaaaagcatactaattggactttaataaatcattttcaatcagcgtttggtaatgtgtggttctggtcagtgctatttctcttgttcgagagtcttccagcttgcattgcgtgggtgtttttcccactatgacctcctttatttctctgtaacaagggctgcttaaccctgaggcggagcaaccgtgtgctcccccagcccacgactgcttttttttcaatctgagtaataaatcttgccaatgtctgggaggtggtagtttatgttccttgagaggagacaatttattaagatggtactttacctcaacaggataaccgttagagtgggtttctttttgaaagactgattttacaaaaaattttgacaactttatgaaacactctcactagtttataaagtcacagtggtatttctacttataggtttaataaccaacaagataaaagttatatatatatcttccaatgatataaccattataacattttcagtatatcactaaggtgttggaaaaagataaaatatttattcaagtgaatgtctcaatgaggatttggaagagaattctgaacctttaattttaggtggatataagattgttagaaatcaaatatctttgaactggtctttacaaattagccacccctcacatatattcctctttttaaattagtgaaaccataattttcaagacctaaaaccgcaactaacgtataattaatgaatcttatcagccttccttttctccttcccagttagctattgttttaggttccactgttcatcttccagtttattccagaattctctcagcttctgaaatattatatactgcttctagctccttcccttaaaacccagagtgtgcactcatgctaggtaaaaactgtagaaacacctcttttatcacatcccttcactataacaaagtaaacagaacattttaatgaaaagagcttttgaaacaaagtgctaattgtttcatatcaactgagcttcacctgattccaaaccccataagaattagggattatttgtgggtttagaatggtggtttgtgaatgaggttggacactgcatgatagaagagatgtacgtaactaggagccaggatgtattgttaatcttcctaagcaagggctgttcatgttctagcattcacctgcatcttgtgtagtctacacagcaaattctctaattcttcccttaatgttataaagctcatattcatagactattaacaaaatattaaattataaacttaaatcataaattattagcaaatagtctatgaatatgagctttataactctgaatatgaactttaatgatgtgacatgtaatgaccatttgaaaatatgctgaatttgcaaactaaggcacatcagtcgaatccacttatttttgtatgacctatgagctgagaacaggttttacatttttaaatggttgggaaaatattttgtgacacatgaaaattataagaaatgcaaatgtcaatgtccataaataaagttttattggaatacagccatccttattagtttattaattccctatgactgcttttgtatcattaaatactagcgcagagtggagtagttgcaacagagtctataatggccctcagagtctaagatattcactctctggccctttattgaaaaagttttccaatccttgatttagaagattccattttcaaaaaaaaaaaaaaaagtttccattttcaatcatgctatcctcatttgattatggatgttcattagaagaggaagaaggagaaattgggcacaagattccttaatctagctctagcctgcagagagaattctcaacccaattttttatgttaaagataacttgcattttggaacttatggaaaagctaaccaaatttacagattttgtgaataaattgccaacatgatgccccatcagccctgaatacttttttatgtaattccacagataaggacattctctttcataacctcaatgcaattattaaagtcaaattaacattgatgcaggaactatcatttaattcacagatcccattcaaccttcatcaatttgtccaataaagtccattatagcaaaataacctaatccaggctggctggctgtattatctctctttgagtcttcttaaatcttcaacagtctcttagttttttcttgaccttcatgactttgtcacttaaagatcacaggtcattttttagaatgtctctcaacttggcttgtctgacattttcaatggtatatatatcatttatctttgacaaaacaagagagaaattctgctgtgtttcttccgactacatcccatcaagcagtacatcatgttgatttgtcctattatgtactttgattatgtagttaaggtgatgtctactaggtttgccactatgaagaaaacagatacctgttgcacacataccctcaatcatttttttatcctttgtaataagcaccctgtagagaggtaattgggactatgtgagtatcctgttccacatcaaattttaatgtctagttttagcatccattgatatttcttgggtgaattaatcattattctgattgatagttgcctaatgatgaatttctaattctcttttcaaaatgtattagcaatcttctgtgagaaactttttctctcatttattcactcatttatacccctatgaactcatgggttcctgttttgtttaattacttatactgttagtgtcgctttccagttaaatcttttcttttgagataattgcagattcacatgcagttctaagaaataatatggactgattccgtatatcttttacctggtttctcccagtggccagtatctcacaaaaccatagcataacattacaaccaggaagttgacattgatataatcaaggcatagaacagttccatcaccacaaagattcctcatgttgcaatttatagcttcatccaactcccttacccccattctgactcctagcattcactaatctagtcctcatttcttcaattacatttgatacttttctcatgctaaaactcataagacttctctgtaacaatggatgtggtgctgatacttccctagagttaacagacaggaagagagagtctctatacacatgaactatagactgtatctagtccagagagaaaccacgcaaacaaatatttcaaggaacacagaaatgagtaaagtagaaagtggaagtctcccctacagtttggaagttagaccacagataatctgttgcacacaacctgataaacagacattcacaaagtgattttacttttttttttttttttgagatggagtcttgctctgttgcccagactggagtgcagcggcgcgatctccgctcactgcaagctccacctcccaggttcacaccattctcctgcctcagcttcctgagtagctgggactacaggcgcctgccaccacacctggctaatttttttgtatttttagtagagatggggtttcaccatttagccaggacggtctccatctcctgacctcgtgatccgcccgcgttggcctcccaaagtgctgagattacaggtgtgagccaccatgcccggctgygattttacatttctgtttgttttgtggaactctcaacgtctctttggcatcaggaaagccagacttcattttgtttcatgtgtgacattgtttataatttgcatcttttaactcggatctttcatgaaaggaatctttgtattttctattatgaagaacatatagtgctgagtagtacttaacacttgtttatgtaaatgaaatgcgtgaactacaagtaaaggcatgcttaatgaagaaatgctctttaattccacaatcctgataaagggtttccttcacatttaagaatattacagttaaaattaagtcagaataatgtaaaagaaaaaaaaaagcttaaatccttcgattatgtgttctaccaatgtgtctgtgttttctgagtagtcaacttattttgctatgctttaggaaaaattttaatagcactactgtgttgcgtgggtaatgggatttatagctcacataaaacattcatataatttgtattttgatctttgtggtaactcttacacatgaggaaacagtctcaaagaaaaaactgggggtctaatatttgttgtttatagcattatttgatggctaattacatattctttatattgcaattgataattccttatatatatttatctattttgtctccccaaacaaattatgagttccttgagaagaggtatgatgttttatatattttttaatccctcaaagaacttagcacagtaaaagtaagagaagaaaacatgatgtcattaacaggtgcatgaactgtgctgtgcggtgttcatattattgcaggcatgcctatattccaagctagaaaacaagttagtaatatttgagagtaagataatcttgtgctttccattacttttttattataccaatgactataacaaaactagaaatatggtgtcactcaacagttcttaagtgaaaattttatgaccataattagatgtgatagttgatgttatcgctatctaccactcattctttgacttattcatctacaaatattttttcagagtcttctgtgtatcaggctcttatgatgttgctgtgaatgtgataagcaagatctttaatagaacttagttgcagcgaaggagaagaaaataagttcaaaataaaagtacaaattgtattaagagttatgaaggaaacaatggcatgacatagaaattaaaggaaaataaaatggatggtggaagatagggagaggaactatctttgaaaggataatttagaatgctctgtcttagaatgagaactgtcctgtcaaagccactcaccttgagcctgagttgcacagaggtgtgcccctgtcaagctcttgaacttgcactcactctggtaatcagttcacgtcaaaacaacccattagaaaaattggcacgcatttagcatatgcagataggaatttcagacaagatgtgtaaatgcttagtgagagaaagcatgccatttgggaaagaagggcaggtatagactgtgaggatgaggcttgaaaggcaggctggcgtgatgacttgagtgattttggaagtgattttatccttgagaattgtgggaaataagctaaaggatttaagtttaaaaaaaaaccacacaatctggtttacacttcagaataaattggagaagaaagactgaaggcaaaagataggatcagaggccgtcacattaactgagacgaaagatgaaggtggcaatggaggtgcagagatgaatggattcaggggtgtttgggacacggtgattgtttggataaagatgttttcttaagttatgacctcgaatactggatggatggacatgtgatacgttgagataaggaacataagagcaattttacagagaaaagataatgagtagagccttcaaatgagaattttgtggtaggaaggtggctatgtgaaacttgaagctcaggatatatccctggactgaagacttagattttggagtctgatttttttctgctgccatcttgctatattcttccctaagatgagaagcacacagcctcgatctgcttgaataagaagaaggaaatgagctaaaacaaggagaaataaaaaaaagcagaacttaatatctgaatgtattatccagaaacatgtgaagctgtttcttttcaacaaaataaggttatgtaccatgtatttgatttttaacttgataatacattatagatatccatccaaggtttaagtatgtgtctgccttgctctgcagttgaagtagagattattacaggtcatcaatgttttgtttaccccttcttcctggactcttggaaagctacaactctgttagacaggtttgtgcaactagttatgtccagtgggctgtgagtggatgtgacatctgtcatttctagacttgatgaactaaaataccccatgctagttttcagatcttttttctctcc

SEQ ID NO: 5680 - DNA, 23393 bp, Homo sapiens
  misc_feature (1)...(23393): n = A,T,C or G, or insertion/deletion polymorphism (see Tables 1-2)
tccaccacccaccccaccacaccgcctctttctctcacaccgaatagcattcaagaatttccactgtgggctgggcgcaggggctagtgcctgtaatcccagcactttaggaggccgaggtgggcgaatcacctgaggtcaggagttcaagaccagcctggccaacatggcaaaaccctgtctctactaaaaatacaaaaattagccaggcgtggtggctggcgcctgtaatcctagatacgtgggaggctgagttaggagaatctcttgaatccgggaggcagaggttgcagtgagctgagattgtgcccctgcactccagcctgggtgacaaagccagactccatctcaaagaaaaaaaaaaaaattccactgtatgtgtgcagcaaaccatcatgacacacatttacctgtgtaacaaacctgcacatcctacacatataccctggaacttaaagtaaaagttgggggggggggtaaaaaagaatttccaccgtgacattattgagtatagcaaaaaaaaaaaaaacaagaaacagcctagtgttcattagggaataaacgcattcaagcagcatcaaaccctgcagccattacaaagagatctatgttgaccatgtggaatatctccaagagccacagtagcctcccttatctgtaggattcactccaagaccctctgaaaccatggataatactgaaccctatatacactatgttttttcttgtatatacatacctacgataaagtttaatttataaattggcaaagggtatataaatattccttctaagagattaacaataactaataaagtagaacgattaaaacaatatactgtgatcaaagttatgtgaagccaggtgctgtggctcatgcctgtaatcccagcactttgggaggctgagacaggtggatcacctgaggtcaggagttggagaccagcctggccaacatgacaaaaccccgtctctactaaagataaaaaaaattagccgggcatggtgacacatgcctgtaatcccagctacttgggaggctgaggcaggagaatcgcttgaacctgggaggcggaggttgcagtgagctaagatcacaccattgcactccagcctgggcaacaagagtgaaactctgtctcaaaacaaaacaaaacaaaacnnnnnnnnnnnnnnnnnnnnnnnnnnnnnnnnnnnnnnnnnnnnnnnnnnnnnnnnnnnnnnnnnnnnnnnnnnnnnnnnnnnnnnnnnnnnnnnnnnnnnnnnnnnnnnnnnnnnnnnnnnnnnnnnnnnnnnnnnnnnnnnacttcatctcaaaaaaaaaaaaagaaaaaagaagtccagaaacccgcggagacactatcacactatcccccccaggctggtagtgcagtggcccaatcatggctcactgcagcctcgacctcccaggatcaagtgatccttccacctcagcctcccgagtagctggaagtataggtgcacgcccgactgattttttttttttttttttagacggagtctcactcttgttgctctggctggagtgcaatggcaggatctcggctcactgcaacctctgcctcttagattcaagcgattctcgtgcctcagcctcccgagtagctgggattacaggtgcccaccaccatgcccggataattttttgtatttttaatagagacagggtttcaccatattggtcaggctggtctcaaactcctgacctcaggtgatccacctgcctcagcctcccaaactgctgggattacaggcgtgagccaccgggcatggcctttcctggctaattttttaaatttttgatagagatggggtctcagtgttgcccaggctgatcttgaactcctagattcaagtgatcctccctccttggtctcccaaagtgctgagattacaggcgtgagccaccgccccgggctggaaaatacttttttaaacgagggcaatgtgaatctgaaatgccatttgaggaaagatctgttcgcctgacatcctgtttgagcctgggtggacaggacagcacctgccagcatcgggaagcactgcagatgggaagaggcttggtcactctccaaaggtggcaggagttggagggggtgagctgaaggtaaggagaaaggaggtggggacccaggagacaggggctgcgcagcgggctcggggctgacacccccacggatacagttcactggggctcaaacataaaaggaacccaactattgtgggaggaaaagactcttctgcctttctgccttttctttttttctttttctttctttctttttttttttttttttttgagacagagtcttgctctatcgcccaggctggagtgcagtggcgtgatctcggctcactgcaagctctgcctcccgggatcacgccattctcctgcctcaacctcccgagcagctgggactacaggcgcctgccaccacacccggctatttttttgtattttttagtagagatggggtttcaccatgttagccaggacggtctcgatctcctgaccttgtgatccgcccgcctcggcctcccaaagtgctgggattacaggcgtgagccaccgcgcctggctcttttttctttctttttttttttccgagacagagtttcactcttgttgcccaggctggagtgcagtggcgcgatcttggctcactgcaacctccacctccagggttcaagcgattctcctgcctcagcctcctgagtagctgggactgcaggcgcgcaccaccacgcctggctaatttttgtatttttagtagagacagggtttcaccatattggccaggctggtctcgaactcctgaccttgtgatctgcccacctcagcctcccaaagtcctgggattacaggcgtgagccaccgtgcccagcctgacccctctgccctttcaaaaactatgttcgttctctcacagccttctcttgtcatattaagtccacaccgcaggcctaatttgtccagtgaatgctatgcaaatatttcatgcacctgctgatcgcaggaatgatatgtacttggtacgcactgatcgtacctcggggtgggagaagagagggcaaggaagcaaagaatagccccctcctttcctggtgcaccttcagatgtgccgatggggcccaggctcgctgcagatggcccccttcccagagacaggggaggatcctccacccactccccagcctccaggaccatcctgactcctgccttcaggcactcaagttatgcgtctagacatgcggatatattcaagctgggcacagcacagcagccccaccccaggcagcttgaaatcagagctggggtccaaagggaccacaccccgagggactgtgtgggggtcggggcacacaggccactgcttccccccgtctttctcagccattcctgaagtcagcctcactctgcttctcagggatttcaaatgtgcagagactctggcacttttgtagaagccccttctggtcctaacttacacctggatgctgtggggctgcagctgctgctcgggctcgggaggatgctgggggcccggtgcccatgagcttttgaagctcctggaactcggttttgagggtgttcaggtccaggtggacacctgggctgtccttgtccatgcatttgatgacattgtgtgcagaagtgaaaaggagttaggccgggcatgctggcttatgcctgtaatcccagcactttgggaggctgaggcgggtggatcacgaggtcaggagttcaataccagcctggccaagatggtgaaaccccgtctctactaaaaatacaaaaaaattagccgggcatggtggcgggcgcatgtaatcccagctactgggggggctgaggcagagaattgctggaacccaggagatggaggttgcagtgagccaagattgtgccactgcactgcactccagcctggcgacagagcaagactctgtctcaaaaaaaaaaaaaaaaagtgaaaaggagttgttcctttcctccctcctgagggcaggcaactgctgcggttgccagtggaggtggtgcgtccttggtctgtgcctgggggccaccccagcagaggccatggtggtgccagggcccggttagcgagccaatcagcaggacccaggggcgacctgccaaagtcaactggatttgataactgcagcgaagttaagtttcctgattttgatgattgtgttgtggttgtgtaagagaatgaagtatttcggggtagtatggtaatgccttcaacttacaaacggttcaggtaaaccacccatatacatacatatacatgcatgtgatatatacacatacagggatgtgtgtgtgttcacatatatgaggggagagagactaggggagagaaagtaggttggggagagggagagagaaaggaaaacaggagacagcgagagagcggggagtagagagagggaaggggtaagagagggagaggaggagagaaagggaggaagaagcagagagtgaatgttaaaggaaataggcaaaacataaacagaaaatctgggtgaagggtatatgagtattctttgtactattcttgcaattatcttttatttaaattgacatcgggccgggcgcagtggctcacatctgtaatcccagcactttgggaggccgaggcaggcagatcacttgaggtcaggagtttgagaccagcctggcaaacatggtgaaaccccatctctactaaaaatacaaaaattagcctggtgtggtggtgcatgcctttaatctcagctactcgggaggctgaggcaggagaatcgcttgaacccgtggcggggaggaggttgcagtgagctgagatcatgccactgcactccagcctgggcgatagagcgagactcagtttcaaataaataaataaacatcaaaataaaaagttactgtattaaagaatgrgggcggggtgggaggggtggggagaggttgcaaaaataaataaataaataaataaaccccaaaatgaaaaagacagtggaggcaccaggcctgcgtggggctggagggctaataaggccaggcctcttatctctggccatagaaccagagaagtgagtggatgtgatgcccagctccagaagtgactccagaacaccctgttccaaagcagaggacacactgattttttttttaataggctgcaggacttactgttggtgggacgccctgctttgcgaagggaaaggaggagtttgccctgagcacaggcccccaccctccactgggctttccccagctcccttgtcttcttatcacggtagtggcccagtccctggcccctgactccagaaggtggccctcctggaaacccaggtcgtgcagtcaacgatgtactcgccgggacagcgatgtctgctgcactccatccctcccctgttcatttgtccttcatgcccgtctggagtagatgctttttgcagaggtggcaccctgtaaagctctcctgtctgactttttttttttttttagactgagttttgctcttgttgcctaggctggagtgcaatggcacaatctcagctcactgcaccctctgcctcccgggttcaagcgattctcctgcctcagcctcccgagtagttgggattacaggcatgcaccaccacgcccagctaatttttgtatttttagtagagacaaggtttcaccgtgatggccaggctggtcttgaactccaggactcaagtgatgctcctgcctaggcctctcaaagtgttgggattacaggcgtgagccactgcacccggcctgcacgcgttctttgaaagcagtcgagggggcgctaggtgtgggcagggacgagctggcgcggcgtcgctgggtgcaccgcgaccacgggcagagccacgcggcgggaggactacaactcccggcacaccccgcgccgccccgcctctactcccagaaggccgcggggggtggaccgcctaagagggcgtgcgctcccgacatgccccgcggcgcgccattaaccgccagatttgaatcgcsggacccgttggcagaggtggcggcggcggcatgggtgccccgacgttgccccctgcctggcagccctttctcaaggaccaccgcatctctacattcaagaactggcccttcttggagggctgcgcctgcaccccggagcgggtgagactgcccggcctcctggggtcccccacgcccgccttgccctgtccctagcgaggccactgtgactgggcctcgggggtacaagccgccctcccctccccgtcctgtccccagcgaggccactgtggctgggccccttgggtccaggccggcctcccctccctgctttgtccccatcgaggcctttgtggctgggcctcggggttccgggctgccacgtccactcacgagctgtgctgtcccttgcagatggccgaggctggcttcatccactgccccactgagaacgagccagacttggcccagtgtttcttctgcttcaaggagctggaaggctgggagccagatgacgaccccatgtaagtcttctctggccagcctcgatgggctttgttttgaactgagttgtcaaaagatttgagttgcaaagacacttagtatgggagggttgctttccaccctcattgcttcttaaacagctgttgtgaacggatacctctctatatgctggtgccttggtgatgcttacaacctaattaaatctcatttgaccaaaatgccttggggtggacgtaagatgcctgatgcctttcatgttcaacagaatacatcagcagaccctgttgttgtgaactcccaggaaygtccaagtgctttttttgagattttttaaaaaacagtttaattgaaatataacctacacagcacaaaaattaccctttgaaagtgtgcacttcacactttcggaggctgaggcgggcggatcacctgaggtcaggagttcaagacctgcctggccaacttggcgaaaccccgtctctactaaaaatacaaaaattagccgggcatggtagcgcacgcccgtaatcccagctactcgggaggctaaggcaggagaatcgcttgaacctgggaggcggaggttgcagtgagccgagattgtgccaatgcactccagcctcggcgacagagcgagactccgtcataaaaataaaaaattgaaaaaaaaaaaagaaagaaagcatatacttcagtgttgttctggatttttttcttcaagatgcctagttaatgacaatgaaattctgtactcggatggtatctgtctttccacactgtaatgccatattcttttctcacctttttttctgtcggattcagttgcttccacagctttaatttttttcccctggagaatcaccccagttgtttttctttttggccagaagagagtagctgttttttttcttagtatgtttgctatggtggttatactgcatccccgtaatcactgggaaaagatcagtggtattcttcttgaaaatgaataagtgttatgatattttcagattagagttacaactggctgtctttttggactttgtgtggccatgttttcattgtaatgcagttctggtaacggtgatagtcagttatacagggagactcccctagcagaaaatgagagtgtgagctagggggtcccttggggaacccggggcaataatgcccttctctgcccttaatccttacagtgggccgggcacggtggcttacgcctgtaataccagcactttgggaggccgaggcgggcggatcacgaggtcaggagatcgagaccatcttggctaatacggtgaaaccccgtctccactaaaaatacaaaaaattagccgggcgtggtggtgggcgcctgtagtcccagctactcgggaggctgaggcaggagaatggcgtgaacccaggaggcrgagcttgcagtgagccgagattgcaccactgcactccagcctgggcgacagaatgagactccgtctcaaaaaaaaaaaraaaagaaaaaaatctttacagtggattacataacaattccagtgaaatgaaattacttcaaacagttccttgagaatgttggagggatttgacatgtaattcctttggacatataccatgtaacacttttccaactaattgctaaggaagtccagataaaatagatacattagccacacagatgtggggggagatgtccacagggagagagaaggtgctaagaggtgccatatgggaatgtggcttgggcaaagcactgatgccatcaacttcagacttgacgtcttactcctgaggcagagcagggtgtgcctgtggagggcgtggggaggtggcccgtggggagtggactgccgctttaatcccttcagctgcctttccgctgttgttttgatttttctagagaggaacataaaaagcattcgtccggttgcgctttcctttctgtcaagaagcagtttgaagaattaacccttggtgaatttttgaaactggacagagaaagagccaagaacaaaattgtatgtattgggaataagaactgctcaaaccctgttcaatgtctttagcactaaactacctagtccctcaaagggactctgtgttttcctcaggaagcattttttttttttttctgagatagagtttcactcttgttgcccaggctggagtgcaatggtgcaatcttggctcactgcaacctctgcctctcgggttcaagtgattctcctgcctcagcctcccaagtaactgggattacagggaagtgccaccacacccagctaatttttgtatttttagtagagatggggtttcaccacattgcccaggctggtcttgaactcctgacctcgtgattcgcccaccttggcctcccaaagtgctgggattacaggcgtgaaccaccacgcctggcttttttttttttgttctgagacacagtttcactctgttacccaggctggagtggggtggcctgatctcggatcactgcaacctccgcctcctgggctcaagtgatttgcctgcttcagcctcccaagtagccgagattacaggcatgtgccaccacacccaggtaatttttgtatttttggtagagacgaggtttcaccatgttggccaggctggtcttgaactcctgacctcaggtgatccacccrcctcagcctcccaaagtgctgagattataggtgtgagccaccacacctggcctcaggaagtatttttatttttaaatttatttatttatttgagatggagtcttgctctgtcgcccaggctagagtgcagcgacgggatctcggctcactgcaagctccgccccccaggttcaagccattctcctgcctcagcctcccgagtagctgggactacaggcgcccgccaccacacccggctaatttttttgtatttttagtagagacgggttttcaccgtgttagccaggagggtctcgatctcctgacctcgtgatctgcctgcctcggcctcccaaagtgctgggattacaggtgtgagccaccacacccggctatttttatttttttgagacagggactcactctgtcacctgggctgcagtgcagtggtacaccatagctcactgcagcctcgaactcctgagctcaagtgatcctcccacctcatcctcccaagtaattgggactacaggcgcaccccaccatgcccaccttatttatttatttatttatttatttatttattttcatagagatgagggttccctgtgttgtccaggctggtcttgaactcctgagctcaagggatccttttgcctgggcctcccaaagtgctgagattacaggcatgagccaccgtgcccagctaggaatcatttttaaagcccctaggatgtctgtgtgattttaaagctcctggagtgtggccggtataagtatataccggtataagtaaatcccacattttgtgtcagtatttactagaaacttagtcatttatctgaagttgaaatgtaactgggctttatttatttatttatttatttatttatttttaatttttttttttgagacgagtctcactttgtcacccaggctggagtgcagtggcacgatctcggctcactgcaacctctgcctcccggggtcaagcgattctcctgccttagcctcccgagtagctgggactacaggcacgcaccaccatgcctggctaatttttgtatttttagtagacggggtttcaccatgctggccaagctggtctcaaactcctgaccttgtgatctgcccgctttagcctcccagagtgctgggattacaggcatgagccaccatgcgtggtctttttaaaattttttgattttttttttttttgagacagagccttgctctgtcgcccaggctggagtgcagtggcacgatctcagctcactacaagctccgcctccygggttcacgccattcttctgcctcagcctcctgagtagctgggactacaggtgcccaccaccacgcctggctaattttttttggtatttttattagagacaaggtttcatcatgttggccaggctggtctcaaactcctgacctcaagtgatctgcctgcctcggcctcccaaagcgctgagattacaggtgtgatctactgcaccaggcctgggcgtcatatattcttatttgctaagtctggcagccccacacagaataagtactgggggattccatatccttgtagcaaagccctgggtggagagtcaggagatgttgtagttctgtctctgccacttgcagactttgagtttaagccagtcgtgctcatgctttccttgctaaatagaggttagaccccctatcccatggtttctcaggttgcttttcagcttgaaaattgtattcctttgtagagatcagcgtaaaataattctgtccttatatgtggctttattttaatttgagacagagtgtcactcagtcgcccaggctggagtgtggtggtgcgatcttggctcactgcgacctccacctcccaggttcaagcgattctcgtgcctcaggctcccaagtagctgagattataggtgtgtgccaccaggcccagctaacttttgtatttttagtagagacagggttttgccatgttggctaagctggtctcgaactcctggcctcaagtgatctgcccgccttggcatcccaaagtgctgggattacaggtgtgaaccaccacacctggcctcaatatagtggcttttaagtgctaaggactragattgtgttttgtcaggaagaggccagttgtgggtgaagcatgctgtgagagagcttgtcacctggttgaggttgtgggagctgcagcgtgggaactggaaagtgggctggggatcatctttttccaggtcaggggtcagccagcttttctgcagcgtgccatagaccatctcttagccctcgtgggtcagagtctctgttgcatattgtcttttgttgtttttcacaaccttttagaaacataaaaagcattcttagcccgtgggctggacaaaaaaaggccatgacgggctgtatggatttggcccagcaggcccttgcttgccaagccctgttttagacaaggagcagcttgtgtgcctggaaccatcatgggcacaggggaggagcagagtggatgtggaggtgtgagctggaaaccaggtcccagagcgctgagaaagacagagggtttttgcccttgcaaatagagcaactgaaatctgacaccatccagttccagaaagccctgaagtgctggtggacgctgcggggtgctccgctctagggttacagggatgaagatgcagtctggtagggggagtccactcacctgttggaagatgtgattaagaaaagtagactttcagggccgggcatggtggctcacgcctgtaatcccagcactttgggaggccgaggcgggtggatcacgaggtcaggagatcgagaccatcctggctaacatggtgaaaccccgtctttactaaaaatacaaaaaattagctgggcgtggtggcgggcgcctgtartcccagctactcgggaggctgaggcaggagaatggcgtgaacctgggaggtggagcttgcagtgagccgagatcgcgccactgcactccagcctgggcgacagagcgagactccgtctcaaaaaaaaaaaaaaaagtaggctttcatgatgtgtgagctgaaggcgcagtaggcagaagtagaggcctcagtccctgcaggagacctctcggtctctatctcctgatagtcagacccagccacactggaaagaggggagacattacagcctgcaagaaaagtagggagatttaaaaactgcttggcttttattttgaactgttttttttgtttgtttgttttccccaattcagaatacagaatacttttatggatttgtttttattactttaattttgaaacaatataatcttttttttgttgtttttttgagacggggtcttactctgtcacccaggctgagtgcagtggtgtgatcttggctcacctcagcctcgaccccctgggctcaaatgattctcccacctcagcttcccaagtagctgggaccacaggtgcgtgtgttgcgctatacaaatcctgaagacaaggatgctgttgctggtgatgctggggattcccaagatcccagatttgatggcaggatgcccctgtctgctgccttgccagggtgccaggagggcgctgctgtggaagctgaggcccggccatccagggcgatgcattgggcgctgattcttgttcctgctgctgcctcggtgcttagcttttgaaacaatgaaataaattagaaccagtgtgaaaatcgatcaggaaataaatttaatgtggaaataaactgaacaacttagttcttcataagagtttacttggtaaatacttgtgatgaggacaaaacgaagcactagaaggagaggcgagttgtagacctgggtggcaggagtgttttgtttgttttctttggcagggtcttgctctgttgctcaggctggagtacagtggcgcaatcacagctcactatagcctcgacctcctggactcaagcaatcctcctgcctcagcctcccagtagctgggactacaggcgcatgccaccatgcctggctaattttaaatttttttttttctcttttttgagatggaatctcactctgtcgcccaggctggagtgcagtggcgtgatctcggctgacggcaagctccgcctcccaggttcactccattcgcctgcctcagcctcccaagtagctgggactacaggcgctgggattacaaacccaaacccaaagtgctgggattacaggcgtgagccaccgcacccggcctgttttgtctttcaatagcaagagttgtgtttgcttcgcccctacctttagtggaaaaatgtataaaatggagatattgacctccacattggggtggttaaattatagcatgtatgcaaaggagcttcgctaatttaaggcttttttgaaagagaagaaactgaataatccatgtgtgtatatatattttaaaagccatggtcatctttccatatcagtaaagctgaggctccctgggactgcagagttgtccatcacagtccattataagtgcgctgctgggccaggtgcagtggcttgtgcctgaatcccagcactttgggaggccaaggcaggaggattcattgagcccaggagttttgaggcgagcctgggcaatgtggccagacctcatctcttcaaaaaatacacaaaaaattagccrggcatggtggcacgtgcctgtagtctcagctactcaggaggctgaggtgggaggatcactttgagcyttgcaggtcaaagctgcagtaagccatgatcttgccactgcattccagcctggatgacagagcgagaccctgtctctaaaaaaaaaaaaaccaaacggtgcactgttttcttttttcttatcaatttattatttttaaattaaattttcttttaataatttataaattataaatttatattaaaaaatgacaaatttttattacttatacatgaggtaaaacttaggatatataaagtacatattgaaaagtaattttttggctggcacagtggctcacacctgtaatcccagcactttgggaggccgtggcgggcagatcacatgagatcatgagttcgagaccaacctgaccaacatggagagaccccatctctactaaaaatacaaaattagccggggtggtggcgcatgcctgtaatcccagctactcgggaggctgaggcaggagaatctcttgaacccgggaggcagaggttgcggtgagccaagatcgtgcctttgcacaccagccwaggcaacaagagcgaaagtccgtctcaaaaaaaaagtaattttttttaagttaacctctgtcagcaaacaaatttaacccaataaaggtctttgttttttaatgtagtagaggagttagggtttataaaaaatatgrtagggaagggggtccctggatttgctaatgtgattgtcatttgccccttaggagagagctctgttagcagaatgaaaaaattggaagccagattcagggagggactggaagcaaaagaatttctgttcgaggaagagcctgatgtttgccagggtctgtttaactggacatgaagaggaaggctctggactttcctccaggagtttcaggagaaaggtagggcagtggttaagagcagagctctgcctagactagctggggtgcctagactagctggggtgcccagactagctggggtgcctagactagctgggtactttgagtggctccttcagcctggacctcggtttcctcacctgtatagtagakatatgggagcacccagcgcaggatcactgtgaacataaatcagttaatggaggaagcaggtagagtggtgctgggtgcataccaagcactccgtcagtgtttcctgttattcgatgattaggaggcagcttaaactagagggagttgagctgaatcaggatgtttgtcccaggtagctgggaatctgcctagcccagtgcccagtttatttaggtgctctctcagtgttccctgattgttttttcctttgtcatcttatctacaggatgtgactgggaagctctggtttcagtgtcatgtgtctattctttatttccaggcaaaggaaaccaacaataagaagaaagaatttgaggaaactgcgragaaagtgcgccgtgccatcgagcagctggctgccatggattgaggcctctggccggagctgcctggtcccagagtggctgcaccacttccagggtttattccctggtgccaccagccttcctgtgggccccttagcaatgtcttagraaaggagatcaacattttcaaattagatgtttcaactgtgctcytgttttgtcttgaaagtggcaccagaggtgcttctgcctgtgcagcgggtgctgctggtaacagtggctgcttctctctctctctctcttttttgggggctcatttttgctgttttgattcccgggcttaccaggtgagaagtgagggaggaagaaggcagtgtcccttttgctagagctgacagctttgttcgcgtgggcagagccttccacagtgaatgtgtctggacctcatgttgttgaggctgtcacagtcctgagtgtggacttggcaggtgcctgttgaatctgagctgcaggttccttatctgtcacacctgtgcctcctcagaggacagtttttttgttgttgtgtttttttgtttttttttttttggtagatgcatgacttgtgtgtgatgagagaatggagacagagtcccyggctcctctactgtttaacaacatggctttcttattttgtttgaattgttaattcacagaatagcacaaactacaattaaaactaagcacaaagccattctaagtcattggggaaacggggtgaacttcaggtggatgaggagacagaatagagtgataggaagcgtctggcagatactccttttgccactgctgtgtgattagacaggcccagtgagccgcggggcacatgctggccgctcctccctcagaaaaaggcagtggcctaaatcctttttaaatgacttggctcgatgctgtgggggactggctgggctgctgcaggccgtgtgtctgtcagcccaaccttcacatctgtcacgttctccacacgggggagagacgcagtccgcccaggtccccgctttctttggaggcagcagctcccgcagggctgaagtctggcgtaagatgatggatttgattcgccctcctccctgtcatagagctgcagggtggattgttacagcttcgctggaaacctctggaggtcatctcggctgttcctgagaaataaaaagcctgtcatttcaaacactgctgtggaccctactgggtttttaaaatattgtcagtttttcatcgtcgtccctagcctgccaacagccatctgcccagacagccgcagtgaggatgagcgtcctggcagagacgcagttgtctctgggcgcttgccagagccacgaaccccagacctgtttgtatcatccgggctccttccgggcagaaacaactgaaaatgcacttcagacccacttatttctgccacatctgagtcggcctgagatagacttttccctctaaactgggagaatatcacagtggtttttgttagcagaaaatgcactccagcctctgtactcatctaagctgcttatttttgatatttgtgtcagtctgtaaatggatacttcactttaataactgttgcttagtaattggctttgtagagaagctggaaaaaaatggttttgtcttcaactcctttgcatgccaggcggtgatgtggatctcggcttctgtgagcctgtgctgtgggcagggctgagctggagcmgcccctctcagcccgcctgccacggcctttccttaaaggccatccttaaaaccagaccctcatggctrccagcacctgaaagcttcctcgacatctgttaataaagccgtaggcccttgtctaagygcaaccgcctagactttctttcagatacatgtcyacatgtccatttttcaggttctctaagttggagtggagtctgggaagggttgtgaatgaggcttctgggctatgggtgaggttccaatggcaggttagagcccctcgggccaactgccatcctggaaagtagagacagcagtgcccgctgcccagaagagaccagcaagccaaactggagcccccattgcaggctgtcgccatgtggaaagagtaactcacaattgccaataaagtctcatgtggttttatctactttttttttctttttctttttttttgagacaaggccttgccctcccaggctggagtgcagtggaatgaccacagctcaccgcaacctcaaattcttgcgttcaagtgaacctcccactttagcctcccaagtagctgggactacaggcgcacgccatcacacccggctaattgaaaaawttttttttttgtttagatggaatctcactttgttgcccaggctggtctcaaactcctgggctcaagtgatcatcctgcttcagcgtccgacttgttggtattataggcgtgagccactgggcctgacctagctaccattttttaatgcagaaatgaagacttgtagaaatgaaataacttgtccaggatagtcgaataagtaacttttagagctgggatttgaacccaggcaatctggctccagagctgggccctcactgctgaaggacactgtcagcttgggagggtggctatggtcggctgtctgattctagggagtgagggctgtctttaaagcaccccattccattttcagacagctttgtcagaaaggctgtcatatggagctgacacctgcctccccaaggctttcatagatcctctctgtacattgtaaccttttattttgaaatgaaaattcacaggaagttgtaaggctagtacaggggatcccgcataccgttctcctccttttccccgttgtgaggacagtgcactgtattcactttcaacatccaaggtctgtgttgagagggtgagttgtgcggcccagcttgccccaagcccgtcttgccatcacgaaggatttcctgactcagctgaatctagctcaacaaagcaaaggactaactaagctgcagattttctctccgctgggcttagcctacattatttacacctgttttcagctggatgggaccaaactggggccttgacttctggggtttccacgtgatccccaaagaggagacatccattcattcactcaggtatttgcttgtgcacctactgtgcgccaggtgccagatccaggaattgaagcccaggaacaactcttgcagtgagctccccgggtttttgttttctgaacggtgggaagacaggtcagcaaatagccatgcacgtctgcacatgtgtggctggtgtctgcaggagtaccgagaagacggtgagctctgccctggatggcaacaggaaagggcatccctgtgcagctgtttgtcctggcacaggtggcaggctgccagcgggaccaggaagggaaggggaggatgcacaggtcggagggaacggaacgggcactgcaggtgcgctctgcgatgtgaggaaggaagcaaaggctggttccgggatgatgtcggagaagccttgcagcctagggcactgcccattccacgttacccagtgagtcaaagcctcccagaaagacatttagtcactcaaagccagtgcaggtctcagctttgtccggggaggaactttcactctagaaaacacgaactcatttccctttgaggaagttgtttctccaggatatcatttccagccaccatccaggatgctgggcaggtgctgcagtgcccaaggcacggctgccgaagaagcttgtcccttagaaaccccttgtggcctcggaggcgcctgcctgcctccctgagaatggaaccctgttgggccgccaggctcgctgggcaggtgctggggaaggctgggtcaccgtgctgagcccctcacaggcctgggagttgtgcttggggaggagagctcccagctctttggctgcctcccaatcatggccacatctcacaaacaataccactgtccacgaaaaatgaaaaggtgcctggttctaacccatggccccaaccatgaaagagcccttagaatgtgggggtttgactcgaacagtggctttgagtctcccaggggggattagtgtcctaatgccctgagttaatgaattgacttgttggacagggaaactcagtgaggttcattttctgtggggggacgtttgtcaaatgctgtgaaatcagttgtagcatacgcgacgctcagctgctccgacagtgactcagccacggctccagctgcttccccagccctgtagtggaggtggcagatggtgtcatcagcctggcgcagagggctgtgcccactggcatcacaagggccaggcctgctggtcctccagccactggatccaggtagttacatatgggtttaaaagaagagaggcagggccagttgcggtggctcatgcctgtaatcccagcactttgggaagccgaggtgggtgatcatttgaggttaggagttcaagatcagcctgaccaacatggcgaaacccagcctccactaaaaatacaaaaaaattagctgggcatagtgctgggtgcctgtagtcccagctactcaggaggctgaggcaggagaattgcttgaacccggaaggcagaggttgcaatgagtcaggatcatgccactgcactccagcctgggcaacagaacgagactctaaaaaaaaaagatcaataaataaaataaaaataagagaggcagggtgggagtattacttgaggccaggagtttgagaccagcctgggtaacaaagcaagaccctgtctctaccaaaataataatttaaaaaattacccgggaatggtgtgacatgcctgtggtcccagctactctggaggctgaggtgggaggaacactcgcacataggaagttgaggctgcagtgagccgtgatcacaccactgcaccactctagcctgggtgacagagcaagacctcatctctggggaaaaaaaaaaaaagaagaggcttggaagccacattgttttttgtcacttataactagagtttcgtccatcaaaagcccattctgcactgatttcagtgataggggtctgatgctggcttggaagagggcctgacagcttagagacaggcttggagttccaagttgatgaaagaacgatgaataatgaaaaataatgtgttgttctaaagtagtgccttttcatactgagctagggtataatttgggtccatttcaagggaaatatactagcagaattcatcaaagtagcccctcgaagactggtgcctgctgcctacgggacaatttaatcagtggttccagctgcacatctagagttgggaacactgaacccaggctttctcatgcagatggggtgtggattgctaaggtggctgtctcctagcgctgcagcatgagtgaaacacgtgtccattctacagagacgcggctccgtgatgctgaaacctccttctttttttttttttttgagacggagtcttgctctgtcgcccaggctggagtgcagtggcgatatcttggctcactgcaacctccgcctcctgggttcatgcaattctcctccctcagcctcctgagtagctgggactacaggcgcgtgccaccatgcctggctaatttttgtatttttagtagagacagggtttcaccgtgttagccaggatggtctcgatctcctgacctcgtgatctgcctgcctcggcctcccaaagtgccgggattacaggcgtgagccactgcaccccgctgaaacctccttctagataacagcggcgttaagcatttttttttttttttgagatagagtgttgctctgttgcccaggctggagtgcagtgatgcgatctcggctcactgcaacctccacctcccaggttcaagcaattcttctgcctcagcctcccgagtagctgggactacaggcacacgccaccaggcccagctaatttttgtatttttagtagagacggggtttcagtatattggccaggctggtctcgaactcctgacctcatgatccacccgtctcagcctcccaaagtgctgggattacaggcgtgagccactgcacctggccaaaacctcctcctagataacagtggcgttaagcattttttttttttttgagatggagtcttgctctgttgcccaggctggagtgcagtggtgtgatctcagttcactgcaacctctgcctcccgggttcaagtgattcttctgcctcaggctcctgagtagctgggataacaggcatgagccaccactcccagctaatttttgtatttttagtagagacagggttttgccatgttggccaggctggtctggaactcctgacctcaagtgatcctcccacctcggcctcccaaagtgctgagattacaggcgtgagccactgcacctggcctttttttgttttttaagacagggtctcactctgttgatcacagccacagctcactgcagcctcaacctcctgcctgggttcaagcaatcctcccaccttggcctcccaggtagctgagaccacaggcacaagccaccatatctggccctacgtaagctttatgtgggtgcaataacagatctcaaaccagctctcagctcaagagaaggggaagctgggcacagtggctcacgcctataatcccagcactttgggaagccgaggcaggaggatcacttgaacccaggagttcgagaccagcctgggcaacatagggagacccctgccctccctgtctctgaaaaaaaaaaaaaaaaaaaaagaaaggagaggctgggcttggtggctcacacctgtaatcccagcactttgggaagcccaggcaggaggatcacttgaaccctggagtttgagtccagcctgggcaacatagggagaccttgtctctaaaaaaataaatagagtgagagagagaaggggaagtcaccgggaggacacacatggagcacgcagcccaaatggggctcctctgttctccctgcagagtcagttcgtacctttcacatgcacaaaggtgttgatccaaccgaagcaatattgattcttgttatattgctttattgtggggtcagtgtcagagtaccacgagttttcatcacgcaccgttctttccccagctgcagtgtgtttagggggggaacgaggccccaccccctatccctatcgcctctgcctttataacggctgctactctctgagcacctgttgagttctttcaccttccagatctaatgtgctatccccacccctagagaacagggctgctggatgccacatggctcccagagaggggctgtggtcagggaagccccagctccaagggggctggaaaaccccagagctgcccacgtgcggcaacacagtctggtgctgcaggtgtgaggacggctacaaaatacctgagccattctgtcactctgtctgaactctgtttgaaatattgtttcaataactgctaggctggtttttccttcctgactatattcctcaaaccaacaagagcctagcagaggaaagcatggccaaaacgccccaagaagagagccttggcttcacctccaagggccaccatccgggaggatgtcctcagacctctgatcccctctctgcaggctctgcccagccctgtgtggcaacccagaggaagcctccccttcgtttgagatttaaccccagaccttaggcgatggctgcccagcctgtcccttccgcctgtgtggctgcccacgcgggcgttgctcatggggctagtcctgggtggatgggtgggggcctctcgccggctcctctgcctcccacccccactggcaccccacgcctgtcctagaaggttctttctgcctgttttctccgtgagtgactggacaggcagaggccggccttgctggagggggcatttgtaattatgagtgaatccaaaacaaggttttttccttccgcagccccccgcccggctgtggggcccagccactgcacttcaccggatgccgtctggttggtcctcaggactgatacagaccaggaccccagggccagcccgtgccaggctcctatgcttccaggagcacgggtgggtggtcctgctgcctggccggccatcctcctggggtcggtctctggccgatcctccctcctcctctcaagccct

SEQ ID NO: 5681 - DNA, 27115 bp, Homo sapiens
  misc_feature (1)...(27115): n = A,T,C or G, or insertion/deletion polymorphism (see Tables 1-2)
gtcaagaagaaatgaaatacttgggttgatgaataacagttacagaaattgcattgcaattaaaaaaaaaattaccccaaacagataccagatctaggtgattttgtaagcatacaaacatatttataaaagctatttaaaagaatataacaagagaaagcaactcaataaagttatgaatcaaatttaaccttggtacccaaacctgacaaagattatgtaagaaaagaatcagctgggccaggtggctcacatctgttcttctagtactttgggaggccgaggtgggagagttgtctgagaccaggagtttgagaccagcctgggcaacattgcaagacaccatctctacatgaaatttaaaaattagccgggcatggtggcacatacctgtagtcccagctacttgggaagctgagaccttacaagtgagcccaggagtccaaggctgcagtgagctatgatgatcatgccactgcactccagcctgggcaacagagcaagaccctgtctctcaaaatcaaccaaacaaaaagacaatgtaagaaaaaataaaattatgaagatgaatgcaaaaattccaaatgaaatataattaagtaaaacccaattctgtgttataaataaaggtaatactttctaagcaagtaaattcatcccaggaatgcaaggggtagtatgttaatgtggctataatttgccatattaatgaagtgaagggtaaaatcaccagcttaacaaatgcaaaacaataattcaatttttattcaacatgtacttgtcatgttaggccaactaggagtagaagaaaatttctttaactaaataatatatatcaaacaaaatctttgcagcgaactttttttttttgtttgtttgtttgtttgttttctgagacggagtctcgctctgtcgcccaggctggagtgcagtggcgcgatctcggctcactgcaagctccgcctcccgggttcacaccactctcctgcctcagcctcccgaggagctgggactacaggygcccgccaccacgcccggctcattttttgtatttttagtagagacggggtttcactgcgttagccgggatggtctcgatctcctgacctcgtgatctcccacctcagcctcccaaagtgctgggattacaggcgtgagccaccgcgcccggctgcagcaaaaattttaagtactgaaatcctttagaaccatccccattggcagcagaactgaacggggccccactactctccagcgccatttagccgcagtactagtgactaccaccgcaaaggaaaaggaaacaaggccagcgcggcggctcacgcctgtcatcccagcactttgggaggccgaggcggcagatcacgaggtcaggagatcgagaccatcctggctaacacggtgaaaccccgtctctattaaaaatacaaaattagccgggcgtggtggtgcatgcctgtaatcccagctactcgggaggctgagacgggagaatcgcctgatcccaggaggcagaggttgccgtgagccgagatgtcgccattgcactccagcctgggcaacaagagtgaaactccatctcaaaaaaagaaaaaaagaaaaaggaaccaaggcatgctaattgaaaaataacttttcatatctagaaaaaccaggtgaattcataaactattgaaactaagaagtccacaagatcaacccacaaaaagttattaacattcctagcaataacaatactattttaacagcaacctaaatactaaaataaatgtaacaaaagttttggacaaaattatgaaacatgatagaaggtcataaaagaaggcctaaatgggagatttttatggatgggacaattcagtatcaccaaagtgttaactctcccccaagttaatctgtgtatttcatcaaaattccaacagaattctttgtggaattaggaagttgattgtaataaacatagaagataaaggtctgagtatagccgtggtgattcggggagcagaggcaggaggaggagggctcacctaccaggcatctggatagatcataaacctgtcatcagtcgtgacaagggggagagaggctaaactggtcgagcagaattcagattcccaggcagggatgtgtgcagggacctggcttgtcctggggctggtcaatctttggcacggaatggcctcttcaggaacgggtgttattgggacagctgcctttccatgtggatgatggcataaaagtatagcccccccaaacttaagattaaaacattattatgaggaaacagaatattcttattgcctagggcaaggatagatttcttacaaaagacaagctacactttaagagatggacaaaaagataagatggacaatctgagcacatcccatggtgaatttctctccacgctaagaccccggacaagggtgaaaagcaggaccaaggcccagagaagaaaaattctgctcaaaatcataactgttcaaccttgcatacattctctctcttaaactgaaagttagcatcctacagcactggtgtgacacccggcaggcccgagggctcagctgcctccagctgtggccccaagaaggcaaagcacccgggtggggtggagggagcagccccgtgctctactggctgacagtggtgcccaggcccagctgccttctctgcacagacagcagagttccgcttagcacaggcttttcctcgccagtgcacacactgtcagccattggaactggcctgcaagacagcttgctgtggcggctttgcaggcacagggcacacaggcatccgtgcacgcagctcctctgtcctcccatgccctgcaccctctgtcacaaggaaacccttgcttctaggattgcaccaaataggatttggaaccaattggtgcccaagctcaaatcctgttagtggctgcctgtttccctggcatacatgcgtcctgccgagatgcatttggcaccaggtgggatgtgctcactggttcccaaaacgagaacacatagcagtttccctggatgtttgttcaatactattcccgggacctgcccgtagattccaattccttatgggtgtggaagagcctggaaatcacgtgtgtgtaggtgtgtggcatgtgtataggggtgtgtttatgtggtgtgactttggggtatgagtgtggcatgtgtacggtgtgtgtgagtgtggtatgtgtatggcgtgagtttgggttgtgcgagcgtggttctcatgtacgagtgtgagcatggagattctttggtagggaaggagtcagggtctccctctgtcgcccaggcttgagtgcagtggcacaatctcagctcattgcaacctctgcctcccgggttctctgtctctgggaccacaggcatgaaccaccaagcccagctaatttttttattttttgtctagctttggtcttgctatgttgcccaggttggtctggaactcctttcctcaagcgatcctcagtcctcagcctcccaaagtgctgggattacaggcatgagccaccacccaagagattctgatgtcacagacatctgactcacacactccctggacagctcacgtgtgcccaccaccacagtcagggatggctgcagatgaacaaggtgctgacgtggtttctgtagcccccaaacaagcaacttgccttgagatgacaaccaaagttttcctgtgtcctccacactcaagagtgactgtgaggcggaggggcccagcccttcttgcaggcgggaatgagtggatgggtggatcaacagaggctgccacaggagagagggaggcctggcctgggaacagagctgtgaccgtgcccttccccagggtaggggctgaaggaccctcccatcctagtgacagggccacagcatgtccaaggaggccccagaggaggtcccgggagtcctgggagagcctggttagcctccctgaagggaggaagtggggttttgtgagagggatggtgcagcagcccccacacctgctactccgtgtggccgggtccagccccaggcaaggttccaggcatgcccctgggacagacgtgggagggagaccagcaggcaggtccccctcagggaggtatggagcgggtccccggggccaggtggagcccctcacacctgtgtcctcaaggacccacaccaggacaatggccataggcgggcacctgcagccgccctggccagcagtgagacgggcagagagcccagccagatagcccggttcctgccccctcccgcctgcccgcacagagagggctgcatgcaggtgagggtccatcacctgaagagcttcaccagccccgaggccatgagccactgaatctctcagggggttttggcgcttgaggttccccaggtcattctgctgcccagagagggttgaggacctctgacctggagccccaaaggggaagggtaccctaagaccagccagccatctactctcaggtgggaaaggggtagggtttagatatggccccctcccctccacgtcctgaaattaccttgggctgtgctggccgagagccgcggggaccagatttgagctggacgtgagctttattccagacggagcagctactttgtaagcgatctccctgggatcgatatcatggaggggcacagatgggcttcagctgtgctgggtggaagagaaaacatgccctgtcggcccctcagcaagtgctctgctctctggactgagatgcaggtcagcagcaagcagggaggctttgggggtgctgggggctgctttgaaaggcacccctgagctaagacttggctgttgggaaggaatcacctccctccctccagccgtaaaaagaactggacatcagcttccaaagaagtcatcagcaatgcaactgttcacatggaggatactccctgcttgaggggtcagacaggcctgctgggcaacccaggaggcttggatgaccgtctaccccagtgtttttgggatggaaagttccacattctgagaaccctcagtccctgggcaacctggggtggttagtcaccacagcttgtggcttgggcccatgacagcaggtagaaatgacgtggactgccgccagccgggcacagtggctcacgcctgtaatcccagcactttgggaggctgaggcatgtggatcacttgaggtcaggagttcgaaaccagcctggtcaacacggtgaaaccccatctctgctaaaaaaaaaaaaaaatatatatatatatatatatataaattagccaggcatggtgacgtgcacctgtggtcccagctactcaggaggctgaggcacaagaatcacttgaacccgggaggtggaggttgcagtgagattgcaccagtgcactctccagcctggcaacagagcaagactctgtctcaaacaaacaaarcaaaacaaacaaaaagacgtaagatgtggaccgctggagaatgggggtgctgcctgcagtcaaaacggagtgggggtgcccagctcagggccagaatgatcctattcccggcacttctcagtgaggctctgtggctcacctaagaaaccagcctcccttgcaggcaacggcctagctggcctggtctggaggctctcttcaaatatttacatccacacccaagatacggtcttgagatttgactcgcatgattgctatgggacaagttttcatctgcagtttaaatctgtttcccaacttacattaggggtttggaattctagatcgtatttgaagtgttggtgccacacacaccttaacacctgcacgctggcaacaaaaccgtccgctctgcagcacagctggggtcacctgacctttctcctgtcccccccacttgagctcagtggctgggcagcaggggatgcatggccactggccggccaggtgcagctctcagstggggtgttcagaggacgcctgtgtcctcccctcccccatccctctgtcacccttggaggcagagaactttgcccgtcagtcccatggggaatgtcaacaggcaggggcagcactgcagagatttcatcatsgtctccyaggccctcaggctcctctgccttctgcttgggcttcagggctgcctggctgcaggtgcgtccrgggaggttttctccataaacttggtggaagggcagtgggcaaatccaggagccagcccgggcttcccaaaccccgcccttgctccggacacccccatccaccaggagggttttctggcggctcctgttcaatttctttccttctagaaaccagcatccaggcacaggaggggaggcccttcttggtrgcccaggctttggcgggattatttttcaaagaactttaggagtgggtggtgctttcctggcccccatgggcccctgcctgtgaggtcggacaagcgcagggagtctggggcctctcagagtgcaggaagtgcgcacagggtgctcccaggctggggagcacaggtaggggacggtgcgtgggggatggcgcctggggcatgggggatggggtgtgggaaacggcatgtggggcgtaggggatggggtgtggaggatcgggggtggggatggcgtgtggggtgtgggggatgggccgtgggggggtggggcctgggaaacagcatgtggggcnnnnnnnnnnnnnnnnnnnnnnnnnnnnnnnnnnnnnnnnnnnnnnnnnnnnnnnnnnnnnnnnnnnnnnnnnnnnnnnnnnnnnnnnnnnnnnnnnnnnnnnnnnnnnnnnnnnnnnnnnnnnnnnnnnnnnnnnnnnnnnnnnnnnnnnnnnnnnnnnnnnnnnnnnnnnnnnnnnnnnnnnnnnnnnnnnnnnnnnnnnnnnnnnnnnnnnnnnnnnnnnnnnnnnnnnnnnnnnnnnnnnnnnnnnnnnnnnnnnnnnnnnnnnnnnnnnnnnnnnnnnnnnnnnnnnnnnnnnnnnnnnnnnnnnnnnnnnnnnnnnnnnnnnnnnnnnnnnnnnnnnnnnnnnnnnnnnnnnnnnnnnnnnnnnnnnnnnnnnnnnnnnnnnnnnnnnnnnnnnnnnnnnnnnnnnnnnnnnnnnnnnnnnnnnnnnnnnnnnnnnnnnnnnnnnnnnnnnnnnnnnnnnnnnnnnnnnnnnnnnnnnnnnnnnnnnnnnnnnnnnnnnnnnnnnnnnnnnnnnnnnnnnnnnnnnnnnnnnnnnnnnnnnnnnnnnnnnnnnnnnnnnnnnnnnnnnnnnnnnnnnnnnnnnnnnnnnnnnnnnnnnnnnnnnnnnnnnnnnnnnnnnnnnnnnnnnnnnnnnnnnnnnnnnnnnnnnnnnnnnnnnnnnnnnnnnnnnnnnnnnnnnnnnnnnnnnnnnnnnnnnnnnnnnnnnnnnnnnnnnnnnnnnnnnnnnnnnnnnnnnnnnnnnnnnnnnnnnnnnnnnnnnnnnnnnnnnnnnnnnnnnnnnnnnnnnnnnnnnnnnnnnnnnnnnnnnnnnnnnnnnnnnnnnnnnnnnnnnnnnnnnnnnnnnnnnnnnnnnnnnnnnnnnnnnnnnnnnnnnnnnnnnnnnnnnnnnnnnnnnnnnnnnnnnnnnnnnnnnnnnnnnnnnnnnnnnnnnnnnnnnnnnnnnnnnnnnnnnnnnnnnnnnnnnnnnnnnnnnnnnnnnnnnnnnnnnnnnnnnnnnnnnnnnnnnnnnnnnnnnnnnnnnnnnnnnnnnnnnnnnnnnnnnnnnnnnnnnnnnnnnnnnnnnnnnnnnnnnnnnnnnnnnnnnnnnnnnnnnnnnnnnnnnnnnnnnnnnnnnnnnnnnnnnnnnnnnnnnnnnnnnnnnnnnnnnnnnnnnnnnnnnnnnnnnnnnnnnnnnnnnnnnnnnnnnnnnnnnnnnnnnnnnnnnnnnnnnnnnnnnnnnnnnnnnnnnnnnnnnnnnnnnnnnnnnnnnnnnnnnnnnnnnnnnnnnnnnnnnnnnnnnnnnnnnnnnnnnnnnnnnnnnnnnnnnnnnnnnnnnnnnnnnnnnnnnnnnnnnnnnnnnnnnnnnnnnnnnnnnnnnnnnnnnnnnnnnnnnnnnnnnnnnnnnnnnnnnnnnnnnnnnnnnnnnnnnnnnnnnnnnnnnnnnnnnnnnnnnnnnnnnnnnnnnnnnnnnnnnnnnnnnnnnnnnnnnnnnnnnnnnnnnnnnnnnnnnnnnnnnnnnnnnnnnnnnnnnnnnnnnnnnnnnnnnnnnnnnnnnnnnnnnnnnnnnnnnnnnnnnnnnnnnnnnnnnnnnnnnnnnnnnnnnnnnnnnnnnnnnnnnnnnnnnnnnnnnnnnnnnnnnnnnnnnnnnnnnnnnnnnnnnnnnnnnnnnnnnnnnnnnnnnnnnnnnnnnnnnnnnnnnnnnnnnnnnnnnnnnnnnnnnnnnnnnnnnnnnnnnnnnnnnnnnnnnnnnnnnnnnnnnnnnnnnnnnnnnnnnnnnnnnnnnnnnnnnnnnnnnnnnnnnnnnnnnnnnnnnnnnnnnnnnnnnnnnnnnnnnnnnnnnnnnnnnnnnnnnnnnnnnnnnnnnnnnnnnnnnnnnnnnnnnnnnnnnnnnnnnnnnnnnnnnnnnnnnnnnnnnnnnnnnnnnnnnnnnnnnnnnnnnnnnnnnnnnnnnnnnnnnnnnnnnnnnnnnnnnnnnnnnnnnnnnnnnnnnnnnnnnnnnnnnnnnnnnnnnnnnnnnnnnnnnnnnnnnnnnnnnnnnnnnnnnnnnnnnnnnnnnnnnnnnnnnnnnnnnnnnnnnnnnnnnnnnnnnnnnnnnnnnnnnnnnnnnnnnnnnnnnnnnnnnnnnnnnnnnnnnnnnnnnnnnnnnnnnnnnnnnnnnnnnnnnnnnnnnnnnnnnnnnnnnnnnnnnnnnnnnnnnnnnnnnnnnnnnnnnnnnnnnnnnnnnnnnnnnnnnnnnnnnnnnnnnnnnnnnnnnnnnnnnnnnnnnnnnnnnnnnnnnnnnnnnnnnnnnnnnnnnnnnnnnnnnnnnnnnnnnnnnnnnnnnnnnnnnnnnnnnnnnnnnnnnnnnnnnnnnnnnnnnnnnnnnnnnnnnnnnnnnnnnnnnnnnnnnnnnnnnnnnnnnnnnnnnnnnnnnnnnnnnnnnnnnnnnnnnggaatggtgagtggggcatggggatggcgagtagggggtgtggcgtgaggatggctagtggggcgtggggatggcgtgtggggatggcgagtggggggtgggctgtgagggacagtgcctgggatgtggggctgcagccctagctcacagcatggccttatgaccccggccaccttcctgccccaggcggggtcgctaaggcctcaggaggagaaacacgggacatgccgtggaagccggggcctcacagargtgagcagggactgccactggttttgtcctggggcccagtgggggccaacatcacctccttcccctcccatggcaaagagccagcccgcggggtggctactgcagtgccccccaaggagggtgttccctgctcgagaggaagtgaccgctccagcttggccttccctgggactggggtgcaggcgattttatcttctttgctccattctgttccttccagataatcgtgtgttcttcatcaggttttcctcagttcttgagagcttttctgatgcaaatctgctttcaccccagggcggtcaccggctctgctcacaccagcctccaagggtgtgggtgtcccgggagtgtgggtgtcccgggggcgtgggtgtcccgggagtgtgggtgtcccgggggcgtgggtgtcccgggagtgtgggtgtcccgggggaagtgggtgtcccgggagtgtgggtgtcccgggggagtgggtatcccgggagtgtgagtgtcccaggggcgtgggtgtccgggggcgtgggtgtcccgggggtgtgggtgtcccgggggtcgtgggtgtcccgggagcgtgggtgtcggggactgcagggacatgggcctcccctcccactcctgccgcccagggcacctcctgtgaggactcggagtccgtgagttcccacctccttgagcccgattctttggtgtccccgcctgcatcctcagcctccttccaaaccagaccagttctctaggggcgtcgacgtgtgaaactgattttaaagaaaacaggcrgtggcctttctctcggccccacgtggcccagtagcgctcaccttccgtcccttcttccgcgctcagtaaccaatttaggccgctcctgcagaactcgggctcctgcccaccggcccacagcgtccacctgaggcctcktcctcccagcaaaggtcgtccctccggaacgcgcctcctgcggcctctccagagcccctcccgcgcgtcctctcagccccgctcgcctcctcccggggcctccctctcccgcctgcccccaggcccgtctcccctcgcgggctgaggcaggttcgggcagcacggccgccccggggcgggggtcactctccaccaccgcgtggtgcccacagctcacggcgctcccgggtgacggtcccctcggctgtagggcgtcctgaagagcggcctgctcggagctgagcgcacggggttgcctssccctgggcgtctctggccctcaccagccccgtcttcccatgggcaaaacggcggtcctgtttgtccacaagtaaccgtcggggttacggaggggccaggagctgcggcggggggctgtgctctcaggaccggccccaggaggatccgcgcgaggtctggagctctcaggggtcgcgggggacagaggggccccaagcggaggcggggaaggcggcagaagcccaggaccgccaagagctggcgaggaagcccggggctcgctgtcgggggagccgggcaggggccgcgcctcggaccaggacggaggcctggggaaggcggatctggccgccggagacgcggtgcgggtggagacgagggatttggatttccgcgggcggctgyacggatttccacgcgcggttcacgtgggccccagggggktgcccggcacccggggccgcgccgccttctcctssccggcatcgacccgcagcctcacgtttacgcggcggcgcccgcagcccccttcggcccggcttccgcgcgtgcccccgagcgcgccctcgggatcagcccccggaagcagagaggccaggccgggaaggatgggcgamsggggtggctgacccgggagcacggcagggaggacacccagccaggcccgcgagcagcgccgctcccctcctccaggacgggcgggaacctgcgatgcccccgccgcgtgggccgtggggcggtctccgaggcactgggcggggcacgcggtgggcgcttcacggaactcgcatttcccagtcttcgtaacccaggaggaagcccacggcgtcctgcaccggcgccggcgcgccaacgcgytcctggaggagctgcggccgggctcccwggagaggragtgcaagsaggagcagtgcyccttcgaggaggcccgggagatcttcaaggacgcggagaggacggtgagcccagcctcggggcgccccgcgccgcggacactgcaggcggcggtgaaccaggccgcgtggggccrcctgcgtctctttggctgcggctgtgggcggcgaacacgcagcggcgcccgcgcggcgctytctgcgggggtcgctttccgcccggggtgactccgctttcctgggcgatgccccccacccccaggcacgcgctctccccgtgcggccgcaccgcgcatgccggttttcacatcagaaaatacgatttgcaaagcacacttagggtgtcccccttaacttcccaagggagtccccccagtccccgaagggtccagggcagcctgcgcatcgcagacgcgcgcggctcgcagaagggacgtggtgagaagctggcccacagcatgccaccagcggcacctcctcagggcacgtgtcggggagaaacaacacttagggacctgggactttctccagctcacgctcacgggtcacctcacactccaagatcacctcaaagaggacacctcacacagggcacacttcacactcacaggtcacctcacactcacaggacacctcacactcacagggcacacttcacactcacgggtcacctcacactccaagatcacctcaaagaggacacctcacacagggcacacttcacactcacaggtcacctcacactcacaggacacctcacactcacagggcacacttcacactcacgggtcacctcacactccaagatcacctcaaagaggacacctcacacagggcacacttcacactcacgggtcacctcacactcacaggacacctcacacaagacacctcacacggggcacacttcacactcacaggtcacctcacacccacaggacacctcacacagggcacacttcacactcacgggtcacctcacactcacaggacacctcacacaagacacctcacacggggcacacttcacactcacaggtcacctcacacccacaggacacctcacacagggcacacttcacactcacgggtcacctcacactcacaggacacctcacactcagggcgcacttcacactcacgggtcacctcacacccacaggacacctcacagaggtcacctcacacaggacacctcacactcagggtgcacttcaaacccacaggtcatttcacctcacactcacaggacacctcacacaagataccacacggggcacacttcacactcacaggtcacctcacactcacaggacacctcacagaggtcacctcacacggggcacacttcacactcacaggtcacctcacacccacaggacacctcacagaggtcacctcacacccacaggacacctcacacaggacacctcacagaggtcacctcacacccacaggacacctcacactcataggtcacctcagtcttacaggacaactcacactcacaggtcaccttactctcacaggacacctcacactcacaggtcaccttactctcacaggacacctcactctcacaggacacctcacacagggcacacttcactcccacaggtcaccatacctcacacagatcacctcatactcacagatcacttcattctcacaggatacctcacactcagggcacacttcacactcacaggtcacacctcacacagatcatctcattctcacaggacacctccctctcacaggtcacctcacactcacaggacacctcacagaggtcacctcacacccacaggacacctcacagaggtcacctcacacggggcacacttcacactcaggtcacctcacacccacaggacamctcacagaggtcacctcacacccacaggacaactcacagaggtcacctcacacaggacacctcacaaaggtcacctcacacccacaggacacctcacactcataggtcacctcagtcttacaggacaactcacactcacaggtcaccttactctcacaggacacctcacactcacaggtcaccttactctcacaggacacctcacacagggcacacttcactcccacaggtcaccatacctcacacagatcacctcatactcacagatcacttcattctcacaggatacctcacactcagggcacacttcacactcacaggtcacacctcacacagatcatctcattctcacaggacacctccctctcacaggtcaccttacactcatctcacactcacaggtcgccacacctcacactcacaggatgcctcacactcacagaaccacatctcatatgcacaagacacctcacactcaggacacctcatgctcaaagaagcctcacactcacaggaggtccagctgtctgaggcaaaggctaacatgaccctttccagacaaattgaggatggtcatgcctagcatttttatacacctagttttgaaagcatttctcatctgttgtattctcacagcaccccgtgagtttaagttcaggtggccaacagtttcttcagcaatcacttttttctgtggagtgcttttgctgtttgtggaatattttgcatctgctactgcaccctctccccgtatgtgtggccaccctgtcagaggtggagctgtggctcagagcctgtgtacctcgtcccaggtccacagctcagcgacagaagagtcagggttgaacctcgggtgttctgacttgggagcaggaaatgtgtggtcacccatagttccagatgtcctggggaggggccaagattagaagaaacctacctcagctccagaggaaagtctggcttcctgagcccaccccgccagacccaggtccaagtcccccaaccccagttcatggtgtgtccagtgcttaccgttgggtgctctggtgaaggtgcatctcacgaggcttgctctcttgttccttcagaagctgttctggatttcttacagtggtgagtggatgatcaccaccagtcctgcctgcaacccttctcagcttactgacaccagcccactccacagatggggaccagtgtgcctcaagtccatgccagaatgggggcycctkmaaggaccagcyccagtcctrtatctgcttctgcctccctgccttcgagggcyrgaactgtgagacgcgtaaggccccactttgggtcccatatttgcagagggccctggggagctggtgraggtggcctggccaaccgggctgcagggtgcacaacctggtggggtgtgtaggccgggcattcagggctcagccccagttggaaattggtctaggtgaccttkaaatcccttccagtctgaggtctttgacagggacccaaggttctgattatcagactcagtggccccttgggctcccggccctgggcaattctcagccctsgagatggcccagctgagagtccctgtgtccctgtcccacttccacatcccaccacgcaggaccgcttggtaaacttccccttctctactttccattacaaaggtttgaggggtttgttttttttttaaccatctgaatattaaattatcacaaagtttrrggcccccaacctcccttgggttcagtaattcactagaaggacwcatagaatccactgaagtggatacactcacaggtaccgtttattacagcaaaggatgcaggcttaagtctgcagagggaccaggsacaagcttccccttgtcctctccctgtggggtcatgtggacagtccttaattctcccagaatgacgtgtgacgagacgtgggaagtactgccaacttgggaagctctacgagccccggtgtccagaggtttkatcagggctcaatsacatagacccagctgaccacccgcatggctgacctcagtctcagcccctccagaggctacgccgatartgcggcccaaggccccaccatacatcacattgtcagctagaccatccagcatggctcaaggcccaggtaaacaccaacattccctcaggcaagaccttccaagggcttagcggtcatttcccaggagccaaggcaaaggctaccctttctctggcacagcagttcatccttgaccacccaagaccacattcttacactgaatgagctctcctgtgcagcagccattttcttctctaagcagaagagagcccagcaagctggaggaggctgaagagagaggcttcctgctggtcatctgggtccagaatgcctgsagatctctgctcagccctggtgcccagcagccctggtgtgcatcctgcagggcaggccttcccgccggagtcctggacttgctcagggccactccccttgcccatgtcaaccaaagtcaggctgccggttctgcttcttctgtctgagcccatgaccagtgctgggactaactgtccccaggcgggctcacggtggtacgaggccagcttggagaactgtctcagctctctggtcctctcgtcagttgggtctctgattggaaagtcccttggacacttttaccatccccatkggactttcactttcccccaggctcccatcagctgctcggaagagtggtcaccctggaggccactgcccaccagccaggcaccccccaaatgcaaccgcagccagcactgccagccactggcaaggctgttcagacatgtggctcctctgatccacgccttgtcctttggatcagtccacggagcaggtggtgccaagctcaggctctgtcacccacagctcagtgccaccttccaggcagaacaccactgctgacccagggcatggccaccccggggrctggctctcgctgacccccagaagcccctctcagggtgtccccttcctgtccccagacaaggatgaccagctgatctgtgtgaacgagaacggcggctgtgagcrgtactrcagtgaccacacgggcaccaagygctcctgtcggtgccaygaggggtactctctgctggcagayggggtgtcctgcacacccacaggtgaccaggcttcatgtcccagtcccagatgacaccagtccctgtcccactacggattatcttactggacaaaagacgggtgggagtggcttcacatctactgagcactaactatgcactgaccaattgtgaggtgggatctgggcaccaagggtggcacaggccagagcgacagtgactaggatgggcaccctgggggcaatccctgaatggcctcaggccccctgccaattctaggcagaccaggggagccaagcaaggcactatctcacgtccaactcccactcgcaggacctccgccagggttcatgaatctacttcggcacagccaatgtctgtactgactgctgcccactctgcattccaaaactcgtaaaggctcctgggaaaatgggatgtttctccaaaccagcctggaacgaatgggctgcacttccaaaagcagggacaccccacacccactgtstctcaaagaggcggacgtgcccaccctggccacacagcctgggactcagcctgccacctcctcgggcttcctttctggcccaagaccttgattgaagcagatcaaaactaagcatgggatcaaaacaacacagtttgattcatctttaggtagaatttcattcaccttctactaaagtcaaacaacacatcttctccctgaaaagtgagcagagggcggttttaagacgtaagccctctgtttcctccaaaaccagccctgaccattgtctcctcagccagccacttcttcaaggrcctctcatggccgggccccaccagtcaggcccagccgaggccctgccttccaccacccctgggccctgggagctcctgctcctgggggcctcccatagcctcggcctcaaggcctctcagaggatgggtgtttctgaatctttcctagtggcacgttcatccctcacaaatctctgcatctttctgacttttgttttacacagttgaatatmcaygtggaraaatacctattctagaaaaaagaaatgccagcaaaccccaaggcyraattgtggggggcaaggtgtgccccaaaggggagtgtccatggcaggtaaggcttcccctggcttcaggattccaagccctgagggtcttgaagccttttgaatgtgaacaacagctctggaagggaaaatgggcaggtcagccccaagcccaccaggctccaagtcagcacacctagcacctccagctcgcggcacccccatgcttttagtggggcaaggaaggagaaaasaaaacgacactcactgagggtctaccctgtgcagagaaccctgcgagatgccccatccgagttgtcacgtcgtcctcacggttactctttgaggtgggatctttgcctgatctttgcaaaatcaggagcattgratcaaagctatgtgaagatcctgtgaggtgaacagtgaaatctcacagcgacatttgtattcttgggccgtgcccaagagcacgtctcggctagagaggggcacagcctcccagagccaggtctgagcagctttgcctgggagggatctgcaaagaccccaggatttcagaaagaaattgtgcaatgccagaggttccttggcatgcccrggagggcgagtcatcagagaaacaatgacagcaatgtgacttccacacctcctgtccccccgcccaggtcctgttgttggtgaatggagctcagttgtgtggggggamcctgatcaacaccatctgggtggtctccrcggcccactrtttcgacaaaatcaagaactggaggaaccygatcrcggtgctgggtgggtrccactctcccctgtccgaccgcggtgctgggtgggtgccactctyccctgtccgaccgcggtgctgggtgggtgccactctcccctgtccgaccgcggtgctgggtgggtgccactctcccctgtccgaccgcggtgctgggtgggtgccactctccsctgtccgaccgcggtgctgggtgggtaccactctcccctgtctgaccgcagctctcaagtgtctcaggggctgtggctctgggcttcgtgctgtcacttccacagacagacagacatccccaaaaggggagcaaccatgctgggcacgactgctgtggccaccgtgctctcagccactttcccatgcccaaataaaacgataaaagactgggggcttctgcccatcctgcctcacttgaccaagagcccagaagaggatgcgacacccagggcctcatgggaccaccggctggcaggggttctgctcactgggtttatgggtgagacgagcactcccaggagggccactgggccgggaagaactgtggagaatcggggcacgccctgtcctcccagctgccagggcacagcatcccttccccacctcaacacccagaccccagattcaccccagttcacttgtccccacacgagccacaggctgccacctggggcaggctggccccaccttggggttagatgcaggtccccttgccccagaaggagactgcagcccctgcagacctagaaatggccacagcccatccccatgcaccagggggtgaggtggcaggtggtggaaagggcctgargggggcttcttccttccaggcgagcacgacctcagcgagcacgacggggatgagcagagcyggcrggtggcgcaggtcatcatccccagcacgtacgwcccgggcacyaccaaccacvacatcrygctgctcyrcctgcaccagcccrtggtcctcactgaccatgtggtgcccctctgcctgcccraacggacgttctctgagaggaygctggccttcgtgyrcttctcattgktcagsggctggrgccagctgctggaccgtggcgccacggycctggagctcrtrgtccycaacgtgmscyrgctgatgacccaggactkcctgcagcagtcacggaaggtgggagactccccaaatatcacggagtacrtgtycbgtgcyrrctactcggatggcagcaaggactcctgcaagrrgvacagtggaggcccacrkgccacccactaccrgggcacgtrgtacctgaygggcatcgtcakctgvggccagggctgcgcaaccgtgggccactttgrggtgtacaccrgggtctcccagtacatcgagtggctgcaaaagctcatgcgctcagagccacgcccaggagtcctcctgcgagccccatttccctagcccagcagccctggcctgtggagagaaagccaaggctgcgtcgaactgtcctggcaccaaatcccatatattcttctgcagttaatggggtagaggagggcatgggagggagggagaggtggggagggagacagagacagaaacagagagagacaragacagagagagactgagggagagactctgaggacatggagagagactcaaagagactccaagattcaaagagactaatagagacacagagatggaatagaaaagatgagaggcagaggcagacaggcgctggacagaggggcaggggagtgccaaggttgtcctggaggcagacagcccagctgagcctccttacctcccttcagccaagcccacctgcacgtgatctgctggcctcaggctgctgctctgccttcattgctggagacagtagaggcatgaacacacatggatgcacacacacacacgccaatgcacacacacagagatatgcacacacacggatgcacacacagatggtcacacagagatacgcaaacacaccgatgcacacgcacatagagatatgcacacacagatgcacacacagatatacacatggatgcacgcacatgccaatgcacgcacacatcagtgcacacggatgcacagagatatgcacacaccgatgtgcgcacacacagatatgcacacacatggatgagcacacacacaccaatgcgcacacacaccgatgtacacacacagatgcacacacagatgcacacacaccgatgctgactccatgtgtgctgtcctctgaaggcggttgtttagctctcacttttctggttcttatccattatcatcttcacttcagacaattcagaagcatcaccatgcatggtggcgaatgcccccaaactctcccccaaatgtatttctcccttcgctgggtgccgggctgcacagactattccccacctgcttcccagcttcacaataaacggctgcgtctcctccgcacacctgtggtgcctgccacccactgggttgcccatgattcatttttggagcccccggtgctcatcctctgagatgctcttttctttcacaattttcaacatcactgaaatgaaccctcacatggaagctattttttaaaaacaaaagctgtttgatagatgtttgaggctgtagctcccaggatcctgtggaattggatgttctctccctgccacagcccttgtcaatgatatttcacagagaccctgggagcacctgctcaagagtcagggacacacgcatcactaaatgcaagttcccaggccctggctgcagtgggaggacctggcaagctgcactcttgctgagtccccagggtggtggaagaagaatgagaaacacatgaacagagaaatggggaggtgacaaacagtgcccccactcagactccggcaagcacggctcagagagtggactcgatgccatccctgcagggccgtcctgggcaccactggcactcacagcagcaaggtgggcaccattggcactcacagcagcaaggcaggcaccagcaacccacctcgggggcactcaggcatcatctacttcagagcagacagggtctatgaactacagccgtgggctgcttccaaggcaccctgctcttgtaaataaagttttatgggaacacacccatattagtgtccatggagtggccgtggcagagacgtccagccggacagaccagctgacccgccaagcccagcatggttagtgtcaggacctctgctgaagatgcttgctgaccctggccagaccccggttcctaatgccccctaaacgggacgggagccagtggcgggccctgatccaggtcagagctggctctgctttctcttttgtccgagtgaccatgcctcagtttcctcatctgtaaaacaggagcccaccgtgatgcttatggtgggatgagatcagcatggatggaacaaggccctggaagggcccatgccatggtcatcgacagcaaagccactctgcagacagatgcttcagtgaattggtagaaaattctgcaaccagaatgcccggggctcctgagggcctaagcccagcccagggttctggaagccgctctgacttcttgggagtggaagttggcaggactcttcctgggaagaagcggagggtggggatgagaggacagttcaggagcccacccagacccacaggaggaaactaggggagtcatgcggggtcctggtggagcgccagcctcccttcctgccaatgggaaatgcaggcgcccacctcatggtgctgccggaggagggggcccgggactccccagaggcttcgctgaagggcctgggcgcccccaaaggctacatgtttcatatgggacgtgccacctgccacggctcagctccagctttctgtgagtggcgagatagaatacggggaggccactggccatgggcctgggacagggtgggatgaggcggcaggcttgggccaccaaagccagcatcgccacccagcattgatgacaaagactgcgtgtctgccatgagcatcctgctgttggtgcacacaccgcattggtctctccatacaaacatgcctagaggcgatgtcagagggtggagaccaggagaggcaggagtcagacatctggtgccaccaggaaggcccttctcagaggaccaggctgtgcgtggtgcccgccgtgggaggccagcctggcgttggcatccagcatcatcagtttgtgcagttgggtggggctcagtgagtgcctcctgtgtgccaggcacaatgacgcacaatgtgtgcacaccaggctcatgtgcaggtggctgcgagacagggcgacccatcaaggcagatgcaccatgaggcagtggccagtgctgtgggtgttaggggcattgctccccggccactacggcatagcaggcagtgatcgccacactggccaagctttagaccatttattccagagaccccagaggcaaaaagcccggctgcacctcccagtgactcccacagccattgagcagagacgctcaggaccttgtgatgggaggtttctgcactggagaacgagcccagaagccctctcagcctcggaacagtgtggccagtggtgggcaggtcaggaggggcttcagacacagcctgtccctccagatggtcacgggaaggtcactccccacagaagtacgttttggggccatgcgggcacagaaggtttgggggtgggtggggcaggtgccagcctggcctgtgggaggccatggtgcagatgccaagcccccccgtgacatgagaccacctgataccacccagagagtggctgtgagcggaagggcccgcccagaaacaagcagggccttggggcagaagtcctgggctcagatcccacgctcactgccagcggcctcggctcaggcttctgcgctctctaaacttagttttctcttctggaaaaatgatggggaaaatgatatttgtatgtgattgtgaggactgagagttaaatgtaaacatctggaaactacaaaatgagcacgaaatgatgtttttattcttagaacagaaagtccccacacccgcggccctggtgactgatgaggatgaggttccgaggggcctctctggccgcccagctctgcctggggaaggtggggccagagtggatgtgttcccagcgtggtcactcccctgcctcgccagcaggtctcggctccaatcaggaggcctaagccaagtgataagcagccagacaacagccatcccagctggggcgtggactttgctccagcagcctgtcccagtgaggacagggacacagtactcggccacaccatggggcgcccactgcacmtcgtcctgctcagtgcctccctggctggcctcctgctgctyggggaaagtcgtaagtgcccctcgcccttcagacccaaaagcagcgccagggagcagggaggggcggcagttggggaaaccctctcatctctgcagcctggacggtgggtgccttgagtgctgccagaggctgggctcggatggctgggcttggcctttccagccaacggcatcctcaaggccagctgtggctccctggggctgagagtcagacgggcggatcagaggtcacagagacaaaaacacaaggacagagtcagagagagaaagggagagggaaggagaaacggagacacagtgagatgggaggccaagaggcagagacagaggtagaaagacggagacagagagagagggaggggttggggcaggcagagacaggacagttagccatctgccaccacagggaggcacaggacgaggggcacagcagaggagctcccagggaggaggaggctgagccgagccagtgccaccactctcggactggctccgtcggggaaggagctgcctaatgcacagctggacaggtgggggcagcagggctgtccaggacccccgggtctgtccaaaagcagaggcccagacaggacagaagccaggcmagcctggggacagcggaggaagaggaggcccctctggtggggacacgagagacagggaccctagacttgtttgcatcctggacaaagtggacaggcaggggcaccaaggggacccaggcctgggaagggaatgtgtgagggagagacggagcagggggagaccctcgtggggtggaaaggggagacccctgggaaggctgagtggatcctcagtgcatcactgacctaaacggcccctccgcctggtgacttggagctccagtcacatcacacgggggtcttctccatcccaccctcaaccccctgccctccccagcctctgtcccctgagccacatcttcctgtctcccacgcggaacgggactcccgtcttcatggggtactgtgtggctccaactcgcccagccttcttcctccccctcaggccacactgccccctgcaggagcccactgtgatgcttgtggtgggatgagatcagcgtgggtggaacaaggccctggaaggacccatgccatcatcatcgacagcaaagctactctgcaaacagacagatgcttccgcgaattggtagaaaattctgcagccggaatgctctaggatcctgaggccctaagcccggcccggggctcccgaggccctaagcccggcccgggactctggaagctgctctggcttattgggaatggaagttggcaggactcctcttcctgggaagaagcagagggtggggatgagaagacaggccaggagcccacccagacccacaggaggaaactaggggagttatgcagagtcctggtggagcgccagcttcccttcctgccaatgggaaatgcaggcgcccacctcgcggacctctgggtccacagggtattggcacccttagctgtgtgatgcgggcctggctcataaccatggcctgtggtgtccccgggggccggcctggaccctgggtggacatggccagccccggagagccagggccaggccatctctctcccctactctgcctcagaggcctcggcagctgcactgtggggtgggtggggctgaacacaggtcccagaaggtcccactcaggaccctgctgtgcacacttttgattttaataaaatcagaatgcgcacagcatctgcagtctagcctttaaacgagcacagctgtcctggcagtcacggaagttcttctggggcggtgggacctcagcattcctttgctggtactgctacaagaaaggacaatggaccaagtagcttaaagcaacagaaacatttctcccacagctctggaggctggaagttcaaaatcaaggcgtcagcggggctggttcctccagaggctgggagagagtctgctctaggcctgtttcctggcctcggggtgccagcggcctcacagcccatggcttgtgggagcattgctcccatcgctgcctccatcatcgcatggggttctcaccatggctgtttttctgtcttcttttctctcagaaggacaccagtcattggatttagggctcactctactcccataaaatgtcttcctaactaaatacatcacaaaagttctatttccaattaaggtcaggttctgaggttctgggaaagacatgaatttggagggacattattcagccctgtcctgccacctgtgagtgttttctgcaatccaactttttattttaataaaatcagaatacgcagagcacctgcagtgccagcctttaaactactgctgttgtactggcaatcattaaagctacgtggcttcagtttcaatctttacattcaacaagtttaaacccattcttcatgagtttggaccttactgactgaaaattttgcttgctggtaaaacttgctcaaatgcagttgctgactgtggaattcactgatgttgccaaaacaacaaacacaactgtgtgctcgaggattgcaatgctcccaacagcttctgaagaaacaaaccacacgacaaatgtctaccaatctggatgctccatatcagagttctagagtgttccattaatttcttgagacaagtgcctaaaaaccttgttttaatttcgttttgccaaaatcccattttactcacatcagaaagtgtggccacgtggcccagacccggcctgctcagtctgactgaagcgttgatgcgactcagccataacagatagcagaagcgcccagattcagtccagagggctgagccaggcacgccatctttccttcattccctcaacacatattggttaagttccggccgtgctaggcacgggcatacagctgtgaccaaacacgtcaagtctttttccagcggagggaaggataagcctgtcagcatgtaatgtcagagaggggttgggtgctagaagacaaatagcacagtgtaaggggatgaaagagacacgagtgggggcaacgtcagagggcgtggtcagggagggtgtctcggagggcgctgggcctgagccacttgggtatctgtggaaagaatgttccagacagggaggtgactggtgcaaaagtcctggggtgtgagtgttgggctcagccagggtcagcgcagagcccagtgtggcagagagaggtgaatgagggcagagttgaaggtggtgaggcctgggaggcctggccatgggaagaccctgggctctgttctaagaccactagaggcagattctgggtagtccttgacttccttgcatcaccctttccaccccgtgcctgccacctgtaccctcttcctcacacagtccagctcaaccttataggccgtgtcctacccccatgagctggggagagctgagcaggcttcagggagatgggaaaaggcgggaactggacaggggctgcaaaggaaaggtgacttcttactggtcaatcagcctggggatgctcgggggtggatgccaaggggaacagagctgtggccgctatcacagaacagcgagttcctctaagaggtcagaggaggc

SEQ ID NO: 5682 - DNA, 561515 bp, Homo sapiens
  misc_feature (1)...(561515): n = A,T,C or G, or insertion/deletion polymorphism (see Tables 1-2)
cccaatctgattgcaaaatgggcaaaagacttgaatagacatttccccaaagaagatatacaagtggacaacaagcacttgaaaggatgctcaaatcactaatcattagagaaatgcaaattaaaaccacaccacagtgagataccacctcacatccattaggatagctattaggaaaaaagaaaaaagaaaccccaaaccccaaaataacaagtgttggtgaggaagtggggaaattgaaaccctggtgcactgctgatggaaatgtaaaatggggcaactgctatggaaaacagtagaatagttcctcagaaaatcttaaaagaattaccacatgatccagcaattccacttatgggtattatcccaaagaactgaaagcagggtcttgaagagatatttgtacactcacgttcatagcagcattattcacaagagccaaaaggtagaaacaacccaagtgtccattggcagatgaatggagaaacacaatgtgatctatacataccatgaactactattccttaaaaaggaaggaaattgtgacatatacttcagcttgaatggacattgaagacattatgctaagtgaaataagccagtcacaaacaaataatgtacaattccacttatatgaggttatatgagagtggtcaaattcataggcagaaactagaatagtggttgccaggaataaagtggagggaagggaggatgggagggggagttgttgtgccatttcatgggtataaagtttcagtttgggaagatgaaaaaagtgctggaggaggatggtggtgatggatgtataacaatgtgaatgtacttaatgccattgaaatgtacactttaaaaatggttacagtggtcaactttctgttatgcacattttaccacaatttttaaaaatgtataaaaaatagaaggtgagcaaatgcaccaactgaatatactaagttcaaatttaagaaagcacttcccaaatcttgttctgtggcttattattcttgaggaatgtgcctcaaaataagggttttgtggttgtttagttattttttcaaaaaatatttaccggtcactgcctgcgtgctaggctctgtactagatgttgagaagtaggtatggacaaacctgatgtggttcctctctttatcaatttgaccatttagcagaataatattcccattcattgaaaaccaaatatagagcaagaagcttaaattcttcattttgttttatctttgtaaagtgggtattatcatcctcttattaaagaagaagaaaccaaggctcagaaaatttaagtaacattctccaagttcacccaactagcaacctgggtccatctggctccagagtcacaataaccaaaagaagaaagcaatccaggatgggcgccgtggctcacgcctgtaatcccagcactttgggaggctgaggtgggcggatcacaaggtcaagagattgagaccagcctggccaacatggtgaaaccctgtctctactaaaaatacaaaaattagctgggcatggtggcacacgcctgtagttccagctactcatgtggctgaggcaagagaataccttgaacccggtaggtggaggttgcagtgagctgagaagtgagctgagattgcgtcactgcactccagcctggtgacagagtgagactcaaaaaaaagaaaacaatccaaaagtccatcagctaaaaccattgaaatgtacacatttaaagtggtaaattgtatggttggtgaactacatttcaataaaaaataatataatcacaatttaacgtattaggaacaacagaccactgaatcctggcacacagaccatttgttctgctatttcgtattgtataattgggggccaatagagctccctggggttgctgtcttcccctcaataaacacagctccctaaattccaagcagagaaaccaaacaggtacaaaagagcaagagcaagcttggaaactgaggagcatcaaagtgtcaatgcaggtggtatcatccctaccgttggacttttatctgctagatctgcttagcctattttgacaacagtcaagaaggcaaagttcctaaatcctttctcttcaccagaagatttacattccaacaattgattatggcatgtatttggcacagaggtctcatttcatttgaatgacgtcagattcacctaggtttaaaggaattataaaatcaatcagccactgaattatagaactttagaacccaaaaggactttggaaggaggtcacctggcctgattctcttattttggttaaatctgtggcttgctcaaaatcacatagccaagcatggctgagcctgctgggtgtcttgcaatatctatcctccccttctttcctggaaatgccattcccttctccctacctttcagctgcggaccttattgtctggttgtctggaataaaggctgtattttctagtgaggtgtggttgcatgactaaattctggccactgggatgtaaatagaagtggtgtgagtaattcctgggaagtacacttaaaggtcagagtttgacgtggacagatcctccttccttcctgcaggctgggctgcagattagatagctagagtttaagcagccatcctggactatgaggtggaaattcttcctggagaatcggagagcaataagatagaattctgggtctccattaattatagaattgtcataccagctctggaatgttaatcgccagactttatgtgaaagagaaataaaattctatttttttcaacaattgttatttcacttctctatcatttacagttgaattgaattctaactgatacagaacgtgaacaaacaagttgggctgagaactcaggtctcccgaatccaagcatggtactctttattattatgttgatcagttttacaaaatgtatttatttatttcagagatggggcctcgctatgttgctcagggtggagtgcagtggctattcatgggcatgatcatagcgtgctgcagcctcaaaatcctaggctcagccttaaactcctgggctcagcctcctgagtagctggcactacaggaacaagccacggagctgggtacttttttttttttttttttgagacggagttttgctctgtcgcccaggctggagtgcagtggcatgatctcggctcactgcaaaatccgcctcctgggttcacgccattctcctgcctcaggctcccatgtagctgggactacaggtgcccaccaccacgcccagctaatttttggtatttttttttagtacagatggggtttcaccatgttagccaggatggtctccatctcctgacctcatgatctgcccgcctcagcctcccaaagtcctgggattacaggcatgagccaccatgcccggcctttgtttttcctttgagacagtcttgctctgttgcccaggctggagtgcagtggcgtgatctcggctcactacaacttctgccttctgggttcaagcgattctcctgcctcagcctcttgagtagctgggaccacaggcgcctgccaccacacccggctaaattttttctattttttagtagagatgggttttcaccatgttggtggtcaggctggtcttgaactcctggcctcaagtgatccactcgccttggcctcccaaagtgctgggattacaggtgtgagccaccatgcccagccactggttgccttattaattttaataataaaagccaaacggtgctaagtgttttgtatataatagttgcttttaatttttgagtacttaatatgtgataatcactgtttaaatactttataaatgtcactaactcacttaatcctcgtgtcaactcactaaaataggtctattattatcaccatttccattttacagacagagaacctgagacacacagagaaggaataattcacccaaggccatatatttagtaagaggtagagctgagatttaaaccctggcagtctggttctagagcctgtgctctttgctcctatgttacactcgctcttatgatggaagcttctcatcactctctctgcccattttacgggggaggaaactaaaacatacacttgtctaatcatttgcataaaatctgccagtcaatgctgaagccagaattagaagccacgttcctaactcccagtccagtgctctctcctcagaccaccctgctgtctctgaggccacctgagcagacacataatccccaccttctacctccctctccaacacacacacacacacacacacacacacacacacacacacacaccccacccagcaggcacccagacatatttgtggccaggatggctacaacctcctttgaaaagcagccagctttgccctccaccaataactttgttttatttatagtctcctgctcagagcttttgaactggctcccattccagggaagatcttgatagcaactgttccttggagaagtttcataggtgaataaacaccacagagctcctgcctgtctagcagagctttgctcctgggggtgtttacaagtcggtattggtgtctgggtgcataagactttaaattcaaaatgacagtttggacattttcactttttttttggttttcattttaaaaagtttaccctttgacttcaacaacctaaaggcagaggcaaaagggagaaactatctttattcagaaggtgactccaacagaagaagtcttctacgacttatcttctggctttctttcctcccatcctggccgggagctaggacgcaggaccagttacgtagaggctatggggtgggggtagggtggggaggcactccatgcatttataagaactaaaatggcagaagtgatgaatggcatttcgggacagaaaattggaaaaaaaaaaaaaaaaaggaaaaaaagcctaatattaaaaatgtctttggacttgtggccaaaggtgccaccttaaagcatgactatgtcacaggtgtctggaatgattcagtctggacactaatcttggcttcttcactcgttgctagttatgtgaccttgggaatgtggctcagtttcctctttgtaaattagggagatgaacacaggattattgtgaggattggcactaatgatgtacggaaatactgtgtctgatgcagaaagggcactcacccgctcattaaagggtggctaatggtagctgtgattattgcttcctttatgatccctctggccctagaggggatgaaattgaggtgttcatggaagtgaatcccaagggggagcaggggtaggtagcaggctggtgatctcggctctcaaatcctttcatttgcattgagttaatctctatcagggactgttgtgttaacaggaggcttcgatgttggagttcccaaaacggctgataaagggaggcagaggtcctcakcgggagggcagagctgagccaccacgtgggtccacgaagcccccaggtggctttcctgtaggtatgtggggtctccttcaagctctaaggggaaaggaagaggaaaggccttcagatggggaagtggacggtgtgatggagaagaggttctgcacggaacttactggaaggtgcgggatgttaaagggaaaacgtgttttcatggaggcctgggcgggggattagctctcygttagagaggctgggtgggaggcctccaatgggaggattggtggcggtttcatcgggagggcttggggtctccatgagaggattagggtctcttcagggcggctgtgagtggaggtttccagcggggcgcagtggggtgcagatgtgtaagggcctgcaacggaacgccagagtcctccggggcccgcgccctgggagacgtgcgggtgaccgcgctcccgccccgcccccaccggccacggccccgcccccgcgagcggactacacttcccagcagccccagcgggcagcggcggcggcagcgcgggcgggaggggcggtggtgagaggcggagggggcggcgcgcgccgggcacgcgcgccggcgaccatggcgttcgccgggctggagcgagtacattaacccctggaggcggcggcggcggcgagggagcgagcctcgagcgggcgggccccagcctgagggaagggaggaaggggcggggagagcgccagagggaggccggtcggccgcgggcgggcgggcagcgcagcgccgagcggggcccgcgggcccatgaggaggcctggggaccatgggctccaggatcaagtgagtgcggccgggccgggcggagccgggccgggcgcggggcggcgaggccgggccagggctgcaggccgcgggccgcgcgggggacttgttgccgagaccagaggggcgccccgcgtgacgccggcacgcggggagggggacggttgctatggcgatccagggaggcgcgggggcggggtgcgcgcggggtggcagggcgccgggggtcaggtgtcccctcctcacctgggggtcggaacagctgagattacagggcggccccctccccgggtttacggagagcccctgaaaatggtccttcaactgtggggaaggggagtgggaaagccccggaagcacctccccatgtttgggcatgtttggggcgcccctgaaagttggcaggtccggagaggttgcagcctggccgcttgaggcctgcggcccccacagaagtcgcgtgaggttcttagagggaggggccgctcatggtgtggccacctaaggtgtggatggccggggaggaaggcctgtctctctatttcccccctcttatctgtgaaaatctccacgcagcaaggtccaaaggctgtgaaggaggatacctctgtgttgtaaccgagcacctgctcttgataatcgttggaaaggctttgtaactcaatctggcgaattccctcactcattcattcacctggagttcccggtggagggttagctttccggggaaattgttgatacatgtaacttcagaatccactgaaacattgttgctgtccttgtagacttagaagttgactttggaaagtgcaactcttaagcggtccaatttgggtgtgtggctttcgactctatctcccctcccagccaggtcctcttgtggcctctcccttcctctgccccagaactggagatgttttatctctaattactaacaaatgttcactttttcctctgtgactaatagaattgtttaagggcattaaaaagcaaagttgacagcataggcttttctgtaaaacaactttcctaggacactttaaaccctcttacaagaaagtttgtggaatgtgtttatttcagcattttgagaattgtactagggaagtttgaaaggagaagggccttaagggtgaaactaataattattcaaacattgcatctcatgtccaggtgatgcccgtgcagtgtgacccttgcccagccttgcagtcccccgtgtggttaggcttctcatttacaaaatatgtatgagatgcgctgcagcagccttgagacatctgctgaatgaaactagaaaagtttgcttatggtaatgaaaatggaagagtcgcatgaacactctgttaaatctttatttttgtggaaatgagaaaaaagttagaagcatgctccaaacaagagcttgagaggcttgggaggtaaaaagatgtcgtttgtgaaacattgggattaaagaggcactcaagtttagctcctgcttccaagtaagagttgtaaacttggatttcaatagcacttagaaacactttccagaagccaacttagagttgcagagtatgcgtgaggacacttacccttcttgttacagaaaagttcagaaacttgcctgacatgaagcagtgagtgtcagaaccagtattaaaatccagcaagtaaaagttcagatggctagccatcaaatctctctgttgctctccaaggtagcaggttgacaaatacatttctcaaatgtgttttgtggaacccatcgctaattctgagcacttgggttagggaatttactaaggcatggaattgtattaagcgtgaaatgagtatgaagaatagccttattgatcttgaaactagactactctgtgataaaaacttaggcttgggaaatatgttagcttgtggtgaaaccgaaagagaatatgaagagagaagttatgaaaagtagttgtgatttatagtgactgttgattatgcaacttctgcctgtagctaggaatggggatggacaggaaattacccacttaagtgctcytctagttgttggagaagacagagctttggttactactggctggctttccctcctggcagggcattcaagatgttctcctggctgtggtgaaatctaagtgtgcaggttccattgaataggacagtcttggaggtagggacaagggggaggggttccttttgttttctcttgcttatctctgatgcagcaagtcagttgactaggtggaatcaggtctaggttcaaattccagctctttttaatgctaattatgaaactttacacagactgccttttcaacctcagtttccctgaaggtaaaatggggaggactgtgtccaggttgtagggttattatgagcattgaacacagtatcaatgtaaatgtcaggtccatgttaaaaactcagtaattgttaggtttttttcttttttttcaccttctgtatcaaaagactaagaacattactgtatattasaaatgtcagagaaaggtatgtttaaggtaatggagaagaaaattttaatgaccaaggaattaggctgttaacatgcagagtagggcttaacattgtctcattattaaaaaataaaagttgatttaaaacaatattgtgtgtaattgtgaagctggtgtctgttgtgtgatcagtggtaaagcacgtgagttgctaggcacaggtgttgagatttcgtgtttgatcagacttctcttttaagtttaagcctggttgaacacaatctctgtcaggtaccgtggaaatccttaatgtgaaccatttcatgaaaccctcactactgtccagtggtggcgatgctatttattaaccacatttttcaaatgagagaatgggagtttataggcctaagatcagatgccatcccccagacgcctgccttgatgccagtttcctgttgccacccccaccccctcctgttccagtctaggccaggtgcccttcatccgtgtttctgtggccccttgtgtttattgcagtcacaatactgaatctcgtttcttgtctgtgtcccgtaccatgctggacataaacttcttgagaggaaggactgtcttatttatctttgagttccctgtgtcagactcaatgcctggcacatggttgtttgagaagagttcatggaacgcatttaagaaatacattaggatctatattaagattctaattaagaccgagttgagtgtttatcgagttaaaaaaaaaacccttgaggaagaaaagttttatattttataaatttctaaggcaaattatatggtttacgcaggccttttactagattatttagttcttttttttttttttttttttgagatggagttttgctcttgttgcccaggctggagtgcaatggcatgatcttggctcatggcaacctccaacccccgggttcaagcgattctcctgcctcagcttccccagtagttgggattacatgcatgagacaccatgcctggctaattttctttatttggtagagacgggtttctcccgtgttggtcaggctggtcttgaactcccagcctcaggtgatctgcctgccttggcctcccaaagtgctgggattacaggtgtgatgtgagccaccgtgcccagcctcatgtttattttaataaaggaacattgtcttgcctcaaatcaacatttaatggacaaaaaaagagaaggtcaccagtatgcaggtagcaccctggaaacctaaatgttacatctgtatggacatttatctagaagaataaaaggagcagtggtaactgacaatcttcaacaggtatttttaaatcttatttagtgtttgaatgatcccagtggactggaatgtggttaatatgaagcaatttaactgataatgcagacacacagcaggaaactatgtggcagtttaatattgcttgtggtgacatcctagaaattgcttccaggcaccaagtgcaggaagtgggctgtaagtaatcgaaggaagttttctaagtgagtttgaagaaacgtgacatttatggactcagagaaaagcatactctaagacttgaggcataggaacagggcagggcaactaatttggccttgtggtggtgattattctacattagcctgtatacctgtcttctgtccctgtcaaactgtgacctctgtgaggttagtgaccaagaaatttatccatttattcatccatttacctactgtagaactaagaagattaagcacatattaaacaataaatgttagccattattatcataattagtggcaatactgtgcctggcagtgtgctaagtactggggacacaaagatgaacaaatatttttctttaaggctttctaaagtagtggacacaaatgtaaaacaaaaacaatcccttccagactccctccccaccaaaacaaaacaaaacaacaaaaaaaacaaaacacaagtataatacagtataagttaattgcaatggtggagatgccgctggtgacgaataggtgagtaagtgaaggagagactgtcttctggggaggagggagggtcaggaaaggaagccttcaccaaggggatcatgtttcagctgagagataggtaggggtggttagcagagggagtagaggcagtagtgatggtggtggtatcagcagagggagcagtacatatgaggacgtggcatattagggaaataaaaatattaccatttattcctggcacttaaatgccaggaattgtgttagacattgggaattacgatggtgaataatacagattcactcctcacggtgcatacagtcttgtggacctgacattaaaaaaaccaggtgaattcacataaagctatgtggatgttctataaaggaagcacatgagttgcctcagagaaaatgatgggagcgactgtcctattttagatagagtggcgagggaaggcctcactgtggagatgacatttgagctgagacttaaaggatgaggaggtattagtcatctaaagagactaggcaagactttttattccaggccttgaggcaagaaaaccctaggcatatttcaggaacggacagaaggccagtgggtttgagtagtgactgatggcagagaggcttgtggtgaggtcagagggagagaccctggacagggccttgtaggttgtggtaatctgaaaactgtttaagatacgaaattttatagtatgtgaatcttataagattacaacataagattcacatactataatatttactttttttttttttttgagacagtttcactctgtcccccaggctggagtgcagtggtgtgatcttggctcactgctacctccgcctcctgggttcaggtgattcttatgcctcagcctcccaagtagctgggactgcaggtgcccgccaccatgcctgactagtttttgtatttttagtttcaccatgttggccaggctagtctcaaactcctgatgatccgactgccttggcctcccaaagtgctgggattacaggcatgagccactgtgcccagccctaaaatttacttttttaagtggttttaagtatattcacaagggtgattgattaccactaattccagaactttttcatcaccccagaaagaaaccccatgcctgttrgacactcctcattcccccaaacccttcagtcctaggcaatcactaatctacttgctatagatttgccttttatgggcatttcatatattaataaatagaatcatatataacccktcctgcgtggcttctttcacttaatgatttcaagatttatccatgttggagcatgcatgagtgtttcattactttttactgctgaataatattccattgtatggacataccacattttactcatccatttgtcagttgttaggtatttgggttgtttccccttttcatcattatgaatgatgttgctatgaacattttgtgtggacatatgtttttatttcgcttgggtatatacttaggagtggaattgctggatcttttggtaactctatgtaacattttgagaaactgttaaaattgtttcctaaagcagctgtaccactttgtgtaaagtggtattttattgtggttttgatttggcccaaatgagttacatagaaaagatcagtgtagayggagataggtttctaggaagaggttggaacttgaactgaaagaaaggggagatttggagaatggagggggattaccaaaggaagacaagtggaagttatatgacttgaaagtgaggataaaccgatctcatttcaagaatagaggagcagtgttggcttatgatagctctgctccagtttgtttaaaggatcccattgccaaaatacacaaaaagtttgctttttcttgaggcctgttgtatagcacaactaacgtatctctctgctttgtgatgagaccaagaattggaatgtgacttccttccaggccttcttcctctaatgcctattcccctcttccctttctccgccacagtgctgtcctccctgtccccaaaggagaatgtagagagacttggagtggtggaataaaagtctctttgaagaccaagctctccatcgttagtgctcagagtcagccacttgaattttcatgacttttctggaaaacatgttggtgctactccatcactcttttcttagccattgtagtcaacttagagggcattgtacagcagataggaaggttgaaacagaaggtaagacctggagtattgctctaggaaagtatgtttgcattgagttattaaatctgtgtaagttcctggctggagttccggttgcagttgcaaaggtccagcctttttcctggccctagggagagctaatctctgggttcgtaacatcctttttgcttaaaggggctttgtagggacatggaaagataaacaaggaagaaaaataaacaaaatgaagttgttttgttctctacttttattggaatccgtacccattctttccgagtattcaggacttgaaaaggagccaaataaagtaagaaaagatatgttaaaatacatatatgttcctatagaaaagagaggtgacattccaaaagttcatttggacgttggttatgacatttagaatgtgtttccctcttcaagatactgttatgtacaaatcagtaactgttgagggcaagggcattccagatatagggaactgtgtatgcaaaagtcatggggagataaaaggtaaagctgaaatacaggatataaggataaagattacaggagaggaagttgatgaagtaggcatgtgccagtgggatatgatgccattgaagggttgaactggggatgtactatgatcagatttgggtttttaggtagattaccctggcagcagcagtttagaacagtgatatctctggcttttacaagatgacgcattggaacgtgagaatatgttagaaattgtatttatttttatatcaaccttcaaagtttgtattttttaatgtatgtgttagtatagtaaggcattattataatttatggatatttatcagatgtatgctcacttttttactgataggaagaatgcatggaaaaaaatgggaggccactggattgtggaactgtgtaaatagtttttactgctgaagatcaaggtccagagcaaggttttggcagtgtaaagaaaaggaatgacaggccgggcgtggtggctcatgcctgtaatgccagcactttgggaggccaaggagggtggatggcttgagtccaggaagttgagaccagcatgggcaacatgatgaaactctgtctttacaaaaaaatacaacaattagccaggtgtggtggcatgtatctstggtcccagctacttgggaggctgaggtgggaggatcacttgagctcccacagagctcaggagacggaggttgcagtgagtcaagatcacgccactgcattccagcctgggtgacagagtgagaccctgtctcaaaaagaaaaaagaaaaaaaaaaaaaaggatggctttgagagattttaagtagaaatgacaagacttggtgacaaattacacgtaagaggcaaaagaagaatcaaagatgacttgccaaggttagcagagttatgttacaaatggagtatttgtgaggtgaggactggttatatgtttgcttttctgaggaaaagtgaaaagttataattgggataaggcattttagtctgcattgagaatggaaggaatctttgagggatccrtagtgaatgtgtgtgctttattgaatgagtaagacttgaagtgggctggactaaattgctgaaggcaaatctgttcatggtagatttagagagggggaaaagaaaaaccaccttttgaattcactttagccacaggaaaggtttgagggtgttgcattgatctcgcataggctgtatgaataaatggaaggaaggaaaccaatctagagaagatactgtttgactccacgctggcagttcttgaactccggggtgtgagaggagccaggggtatgtgagcattggagtactgagttcccagaactatacattctccctctgagttctaaatttctgagcttcaggttaaaaaaataatatttatggaaggaagctaataaattaacctacagggttgttgtgataattaaaagagatattgtgcctagttctcagtggagatatgactgcttattaaatggcagctatcattaatattgcttggagaggagaaaacacagttgtctgaacaacctggagttaaaaaacaagttaaaaaacagcaagtatgttcctttttatagtattacagttttttttggttttgtttttaaaaascaaagtatttgcttcctttcagtaagaatgttaggatgacgtgtagtgtatttcactgaatttgtttgaaagattgagatgctgatatatacaaagcactattgctcttgctggttgggaagaaaggaagcctatagtctactaagacaggtaagatgagcgtgcaaacaattagaattataacatttaagaacrcttatgtccccagccaggcccggtagctcacacctgtaatctcatcactttgggaggctgaagcaggcagatcatttgaagtcaggagttcgagatcagttgggccaacatggcaaaaccccatctctactaaaaaaaaaaaaaaaaattacaaaaattagctgggcatggtggcgcatgcctgtaatcccagctacttgggaggctgaggtgtgagaactgcttgaacccgggaaggggaggttgcagtgagctgagattgcaccactgtactctagcttgggcaacagagcaagaccctgtcttgaagtaaaaaaaccacttaatgttccctttatcataaatattggaaatctattcagttttataaaagatttatacaaataatttatatttatctctgtttaactggtactacttttcagtctttttaaagtgttttttktgtgtgtgtgtgacagagccttgctcttgtcgcccaggctggagtgcagtggcacgatcttggttcactgcaattactacctcctggattcaagcttcctctgcttcagcctcctgagtagctgggattacaggcacctgccaccatgtccggctaatttttcgtacttttagtagagacggatttctccagtttggccaggctggtctcaaactcctgacctcaggtgatccgcccgcctcggcctcccgaagtgctgggattacaggcttgagccaccatgcccggccttaaagtgattttttattctttttcttcttggtgcttgaacctatttttaaactttattttggaaaattttaaacatctataaaagtagaatagtataatgagcccccaaattcccatcaaccagtttcaacacttaatttatgttttacctagttttatttatagataactgactgtaactccctcccctgctctctagtcctggattattttgaagcaaatcccagatgttgtcatatcatccttttttttttttttttttttctgagacagagtctcactctgtcacccaggctggagtgcagtgatgcartctcggcacgctgcaacctccacctcccaggttcaagtgattctcgtgcctcagccaccccagtagctgggattacaggtgtgcaccaccatgcctggctaatttttgtattgttggtagagatgagatttcaccattttggccaggctgatctcaaacacctgacctcaagtgatctgcctgcctccacctcccaaagtgctgggattacaggtgtgagccaccattccaggccscagatgtcatatcattcttaaatacttccatatgtgcctctaaaaggtagatttttctttttaaaaaacataacattttcacacctaaaaagttaaccaaaaaatttaatttttaattttttttttttagttgaagttgtactttgtcacccaagctggagtgcagtggtgtgatctcggctcactgyaacctctgcctcctgggttcaagcgattctcctgcctcaacctccccagtagctgggattacaggtgtgcgccaccatgcccagctaatttttgtgtttttagtagagacagggtttcaccatgttggtcaggctggtttcaaactcctgaccccaagcagtccacccacctaggcctcccaaagtgctgggattacaggcatgagccactgcacccggtcaaaaaattttaatgttattaaatatccagtcagtgttcaaagtttttcagttatgtcaaatttaaaaaaaacggtggattcgtttgaatcagcgaagttcatacattgcaattggttgatatttgctgtctttttcccccatgcagtttattttttgaagaactgggttatttgtcctatatgatttccgttgcatccttaaggtttgtttaatgtattcctctgtcccctttatttcctacaaattggtagttggattaagtgacttgatgagattcaagttcactttcttggcaagaatattttaaaagtggtgataggtacttccatcaagaggtacattatgtctggttatctctctttgatctgttcattaattagaggttataaaatggtgatattttgtttctatcacttcttcttcatactagctgggatacttgtaaaaagaaaccttttccatatcaaccatttggttgctctgagatacagttcatataggaaaggcagggtaaatgcttgattttattaattttttaaacattttcaaaaggtaatttttgagagaggggagtgtcactttaaatggatgtatttaaacttattggctatatttcaatctgctgtagttactgtcctcactgatgtttaatttgtcctatctttgtccagtgggaatttcttctttttttttttttttctgagacggagtctccctctattgcccaggctggagagcagtggcgtgatctcagctcactgcaagctccgcctcccgggttcacgccattctcctgcttcagcctcccgagtagctgggagtacaggcgcccgccgccacgcccggctaattttttgtattttaagtagagatggggtttcaccgtgttagccaggatggtctcgatctcctgacctcatgatctgcccgccttggcctcccaaagtgctggaattacaggcatgagccaccacgcccrgcytgtccagtgggaatttcaagtgaactctgaagtccttttaacaggatcccagtagtttcttttcttttatttatttatttatttwttttttttgagacagagtctcatcctgttgaccaggctggagtgcagtgacgcgatcttggctcactgcaagctctgccttccgggctcacgctattctcctgcctcaggcttccaagtagctgggactacargtgcccgccaccacgcccggctaattttttttttgtatttttagtagagatggggtttcaccgtgttagccaggwtggtctcgatctcctgaccttgtgatctgccygcctcggcctcccaaagcgctgagattacaggcgtgagccactgttcccggccaggatcccagtagtttctaatagctcccttgccttttggtatgacagagtgtcccagrctcatcatctgtgtttcctcctccagacccagtgtttctctaaggagtcctggttccttttggtgggaaatagtattagaaatcacagcctgggatttaggacttttggggatggggtgggtttgctaccaggtcagtcataatttctaggattctccaggggtcagaatttgggaatatgtgtgtgtgtttttaaaggtaaattgcattatgtgttcatattgctttttccagttctagactatagcagttttatttaacctcatcacttttacattggaattttccatacctatatcaaagtcttgatttccaacaacaccaacaccattactcttttgctttatcccgcaatacctagacagctcaacagcagcactaacattaccgtcaacaatgcgattactgaaaatagttatgtttttggctttttaaaacttggcagttcttttggtcgttagggtatatttcactgggactgtagtcaaattactgttttaaagtcagtagaattggtttttttctgtggttgtgtctccaactcaatacaaagttagttttttgttgttgttgttgttttgttttttgagacagggtcttgctcggtcgcctgggctggagtgcagtggcacgatttcggctcactgcaatttctgcctcctgtgttcgagtgattctcctgcttcagcctcttgagtacctgggactacgggtaactgccaccatgcccagctgatgtttgtatttttagtagagacagggtttcacttttttggccaggctggtctcctgacctcaagtgatctgcccactttggcctcccaaagtgctgggattacaggcaggagccaccgtgcctggcccatagttaggtttttataattttttcttttaatctgttggaattactgtttaaaaataatttgatttttaaaacaattacttaaaatatttatattgtttcaaagccaaagctacaaaacaggcatattcataagtctaacttctatccctgcctaccaccgtgttccttccctgacataggtaccgagtttgattttagattttcatttgtccttccattaaaacaaaaaaggcagccgggcacagtggctcacgcctttaatcccagcactctgggtggccaaggcgggcagatcacctgaggtcgggagttcgagaccagcctgacccacatggagaaaccccgtctctactaaaaatacaaaaataagctgggcgtggtggcacatgcctgtaatcccagctactcgggaggctgaggcaggagaactgcttgaacctgagaggcagaggttgcggtgagccgagattgtgccattgtactctagcctgggcaacaagagcaaaactctgtctcaaaaaaaaaaaaaaaaaagcaaatacgtagatatattcacatctcctcttgccaggccctcagataagtgatagcattccatgtatacttttcgccccttaacttttctcattttataatatatcctgtaaagaggtctctcctggaaaaatacagggaatgtggggctcttcctcatttctctgtaggacagcaatagtactctattggatggatggactatggtttattcaacccatctcatactgacgggcacttaggttgcttctagtcttttattattacaaatggtgcagtaatgaatagtcttgtgtatgcacctttttgtatttttaccattataccattgcgatagatttttccaagtggaatttgggtcaaagggtaattttgtatgtaattttgctagatattgtcaaattctcctccatagagattgtgccaattcatattcccacacgagaatgcttgttgtcatacagcttcatcaacagagtgtttgtcaaactttaaaaattatttttatcagttacaagtgcatgcaaagttacaaacatatatggtcacgaatcaaatacttaataagagcctgtgataagcaacaatcctctaccctattcttccctagtcccactctttggagacaaactcttattaactgaccctatttttagtttttctggttgttaactcataaccatagataaatctctctctgttaattaactttagacagtatctgttaactccttgaaatgaaagacaagtaactttatagtacttctctcttctactcatctgatattttatctattttgtgttactttaatttttataatggttattaacttaaacctctttattgttccattaaccctcaacactgtcttttgatttcacactttgtaaggggaagggtattatcctagctcttccttctaccttttcaaagttatgctttaacattatgtggtcattgaaattttgatccatgaccagaatcaaatcttctgtgatttgtcttttggttaattctaaaagtggaatgttattatgaatatttaaatataagtatttaactccactagatcgggtagggtgctaaaataacattttcagcccatttgaaggagaatgttaataacatcagggtcacagtaatttttttcttgcaatccatccagaattgaaaattatgctaaatgtctttggcatcatatatggataagtttgcatatatttgtacaaaacagcaaattatttgtacactagccctgtagagagagcagcccaggagatcatgcaagtgctttcatcctcatgttggcaggatggaaacctctactttgcagcctttgtgggggccttggcctgggtgctagcttttggccagcagaacctggcaactgatgatgttataatcagcatggctcctgagcttgggactcaggttgagatggtttggatgtttgtcgcctccaaatcccatgtggaaatgtgattcccagtgttggaggtgggacctggtgggaggtgattgggatcgtgggggtgggccctcatgaatggcttggcatcatccccttggtgatgactgagttcttgctctagtagttcatgatctggttgtttaaaagagtgtggctcctccccctccctcccttgtttcactctcactatgtgacacgctggctccctgtcaccttcagccatgattgtaaacttcctgaggcctctccagaagcagatgccagcactgtgagcctacagaactatgagccaattaaacctcttttctttatcaattacccagtcttgggtatttctttttttttttttttttttgagatggagtcttgctctgttgcccaggctggagtgcagtggcgcgatctcggcttattgcaagcttggccttccgggttcatgccattctcctgcctcagcctccagagtagctggaactacatacaggcgctcgccaccatgctcggctaatttttttttgtatttttagtagagacagggtttcactgtgttagccaggatagtctcgatctcctgacctcgtgatccacccacctcggcctcccaaagtgctgggattacaggggtgagacactgcgcctggcattgctataaagaagtcgcaggtactttatagcaatggcaggaacagaccaacacaggtgcccttcaagaccttgagcttgacaaaggccttgatggtcttcattttattggcctgtgtcttttgacccttcttgtgtttcttggcaaagtgcatgatccttaagaactaaggttctacccgcttaaaatatatctttatgatcagggcctatcgatgccatttctgtttggaactggttatgtgtggtatagttctcggacctgaccatgtctgcactgctgcctgcagtgcagaaagtgcctgagactggaaaataaaggtccatatctggcttttgattttttttttttttttttgagataggagtttcgagcccaggctggagtgcaatggcgtgatctcagctcaccacaacctccgcctcccgagttcaagcgattctcctgcctcagcctcccgagtagctgggattacaggcatgcaccaccatggctggctaattttgtatttttagtagagacggggtttctctatgttggtcaggctagtctcgaactcctgacctcaggtgatccacccacctcgtcctcccaaagtgctgggattacaggcgtgagccaccatgcccggtcggattttgatattttaaagcagtattctttctcttcttctccctcttccagagtttcttaaatctttttttccctcttgcattatttgcttttattgtatccttaatttttttccacacttgaaattatacttgcagtttttccaggcttccctgtacccctgatggttccctcccaccttcctgttaaatccttataaaattggctctattgttataaccctggaatgtcctctcatcacttttcaaggttgatttgactatttcctggccctgtgtgatcattttgctttaatttgttcgctggagtrcatattcaggttcttataggagatagccccagtagcacccctgcagaaagagtacataaaaagtaaactgtgggttctcgcatgtctgaaaaatgtctgctttctcacaggggattagtagtttgtatgggcatggagttctaggttgacaaaatttcctgctgaactttgaaggtttttttttttttttttttttttttaaactgtctttggtctggctttctctgacactgctctggaagggaaggaggctgctcttctttgcttttcaaagttggggtgtacattcaggttccctactctgcttccgttgacatccaaggtgaaggattccgttactacactgtagggtgggagttctggctccctagtaggcctccatggaaacctccatggctgggtggggtaatgccttattcttgctcccactggggactcaacagacaccacggggtggaggggagtggtcttgtcccatttcatcactgggaggtgataaaaatccttagtctctggtaggtctcctccacatgatccaagtggacgtgggaaaggggaacctcgttactgccagaggcggtggaagtccagggtctccactgaaaccacactgatggggtcattgttactgcctggtgggggatgatgcaatccccagctccctccttagctttctgtagcactactctggcgggggtgggctggatggggttcctcatcacagcccagaaacctaggctttctccttgtcttttatggatttgggtgagggtgggacgacagggtttcctgtggtgtttggtgagtattttcttaaaaaattttttgacttattagctgccctttttggtcctttggctagaagaaagctggcttttgtttgagcatttttgggtctgcatcaattggcatttccaggttgctgacttctctggctccaacaatgtgatacatgaggcaaggaaaaacccaggggactcatctctgctcactccttgggtcctgaggtcactagctgttctgcttctctctctgcctttcagaaccatcttatgtttgtcttatatgtaatgtgcagrgttttttgttatttctaatgtagattttcttctgccattacacatatttttaaacttaaattttttgctgttatatcatttacatacagtaaagtacacagattttaaggataccacttgattaatttttaatggttatatactcgtgtaatcaccatccagatcaagatacaggctatctccagcatagtataaggcttttcatgccccttccagtcaatacctatttaaaaataatcacggcagggcacggtggctcaagcctgtaatcccagcactttgggaggccgaggtgggcggatcaygaggtcaggagattgagaccatactggctaacatggtgaaaccctgttctctactaaaaatacaaaaaaaaattagccgggcatggtggcgggcacctgtagtcccagcaacttgggaggctgaggcaggggaatggcgtgaacccaggaggcggagcttgcagtgagccaagatcgcaccactgcactccagcctaggcgagagcaagactccgcctcaaaaaaaaaaagaaaaaaaaaatcactattctgatttctgtcactgtagcaattttgcccattcttgaacttcayataaatggaatcttgcagtatatgctcatgggtgtggcttcttctgctctacattgtgttggtagaattcatctgtgttgttgtatgtaattgtagttcattgtttttcattgctgcgtagtacgattcccatttttggctattatgaataaagttgttatgaatattcttatagatgtcttacagttaacaaaagtgttcctttctgttaggtttatacccaggattggaattgcttgttcaaaatttataaatatgtttagctttagtagattctgacagttttccaaattgtgtgccaattcatacctcatcagctatatatgacagttccacttgtttcatatccaacactttatattgttagtcttttttagccatattattagccattaatgtcatgttttcgtagctcattgtggttttaatctgcatttccctgatgactgattactcatgttaagcaccttttcatatgcttcttggccatttrgatatcttcttttgtgaggtacctattcaggtcttttcctgtttttcactatgttctctgttcttttcttactgattggtaggcattctttatattattgaatgtgagtactttgtcagacataagtattacaaaaatctttcttcagtctgcagcttgcctttttacacttaatagtgcttgtttttgtttttgtttttgagatggagtcttgcttcattgcccagactggaatgcaatggcttcatctaggctcactgcaacctctgcctcccaggttcaagtgattcttatgcctcaacctcctactgagtagctgggattacaggtgtgtgccaccacgcctggataattcttgtacttttaatagagacagggtttcaccatgttgtccagcctggtcttgaactcctgacctcaaatgatctgcctgcctcagcctcccaaagtgctgggattacaggcgtgagccactgggcccagccacttaatagtgctttttgattaacaagagatcttaagtctattttattgatcctttcctttctttactttttgatgtgttctgtttaagaaatatttgcctaaccaaagaccatgaatatacttttgtttgttttatcctagaagctttgttttacattttaattttagttccgtgatgtgatccatttcatatgaatttttatgtatgatataagttatacatcaaggttaattccttttcttccctcatgtggttgtccatttgacttaacatttatcaagacgattcttttcccactcaatttcaatggcatctttcttgtaaatcaggtatacgtttgtatttctggactctgttctttccattgcattaataccatgcaatcttaattactgtacctttaaagtaagtctcgttatttaatagtggaattctttcaattttgttattcagattgtttgggactattctaggtcctttgcatgaccatatacattttataatcagcttgtgaaattccacaattttgatggaattgcattgcatccctaatttgtagagagttgatattaacaatattgagtcttctagttaatgaagatgacatatctctccttacatatcttcaattttttttcagcagcattttgtagtttttagtgcagggtcctgaacatcttttgttagatttatttgtagttctttgattttttttcccatactattgtaaatggcattgctttttaaatgtcattttctagtttttactagcatatagaaatacagtagatttctcttgtatgttgacattgtatccagcaaccttgctaaatgtacttaattctaatgatgtttttaggttttttttattttatatgtatacagtcaggttttctgtgaatgacaattttacttcctagtttttgatctttatactttttatttcttgccttatttcactgggtaagacctctgatatgatgaataggttcatctgagtacagatatagtggtcttatacctgaattcagaggaaagtgcttaatatcttaccatctcatcagtgtcaaccagtatgttgatagctgtttttcttagatgcccttgatcagtttgagaagtttctgtccatttttacgttgctgagagtttttgtcatgaatggatgttgaattttaccaaatgccttttctgcatctcttgagacgattataatttttcttttttccagtttttttatttatttttattttttattttattttatattttattttatttttttattgttttttttatttttattttttatactttaagttttagggtacatgtgcacattgtgcgggttagttacatatgtatacatgtgccatgctggtgcgctgcacccactaactcatcatctagcattaggtatatctgccaatgctatcccttcccactccccccaccccaccacaggccccatagtgtgatattccccttcctgtgtccatgtgatctcattgttcatttcccacctatgagtgagaatatgcggtgtttggttttttgttcttgcgatagtttactgagaatgatgatttccagtttcatccatgtccctacaaaggacatgaactcatcattttttatggctgcatagtattccatggtgtatatgtgtcacattttcttaatccagtctatcattgttggacatttgggttggttccaagtctttgctattgtgaataatgccgcaataaacatacgtgtgcaggtgtctttatagcagcatgatttatagtcctttgggtatatacccagtaatgggatggctgggtcgaatggtgtttctagttctagatccctgaggaatctccacactgacttccacaatggttgaactagtttacagtcccaccaacagtgtaaaagtgttcctatttctccacatcctctccagcacctgttgtttcctgactttttaatgattgccattctaactggtgtgagatggtatgtcattgtggttttgatttgcatttctctgatggccagtgatgatgagcattttttcatgtgtcttttggctgcataaatgtcttcttttgagaagtgtctgttcatgtccttcgcccactttttgatggggttgtttgtttttttcttgtaaatttgtttgagttcattgtagattctggatattagccctttgtcagatgagtaggttgcgaaaattttctcccattttctaggttgcctgttcactctgatggtagtttcttttgctgtgcagaagctctttagtttaattagatcccatttgtcaattttgtcttttgttgccattgcttttggtgttttggacatgaagtccttgcccatgcctatgtcctgaatggtaatgcctaggttttcttctagggtttttatggttttaggtctaacatttaagtctttaatccatcttgaattgatttttgtataaggtgtaaggaagggatccagtttcagctttctacatatggctagccagttttcccagcaccatttattaaatagggaatcctttccccattgcttgtttttctcaggtttgtcaaagatcagatagttgtagatatgcggcgttatttctgagggctctgttctgttccattgatctatatctctgttttggtaccagtaccatgctgttttggttactgtagccttgtagtatagtttgaagtcaggtagtgtgatgcctccagctttgttcttttggcttaggattgccttggcgatgcgggctcttttttggttccatatgaactttaaagtagttttttccaattctgtgaagaaagtcattggtagcttgatggggatggcattgaatctgtaaattaccttgggcagtatggccattttcacgatattgattcttcctacctatgagcatggaatgttcttccatttgtttgtatcctcttttatttccttgagcagtggtttgtaattctccttgaagaggtccttcacatcccttgtaagttggattcctaggtattttattctctttgaagcaattgtgaatgggagttcactcatgatttggctctctgtttgtctgttattggtgtataagaatgcttgtgatttttgtacattgattttgtatcctgagactttgctgaagttgcttatcagcttaaggagattttgggctgagacaatggggttttctagatatacaatcatgtcatctgcaaacagggacaatttgactttctcttttcctttatttccttctcctgcctaattgccctggccagaacttccaacactatgttgaataggagtggtgagagagggcatccctgtcttgtgccagttttcaaagggaatgcttccagtttttgcccattcagtatgatattggctgtgggtttgtcatagatagctcttattattttgaaatacgtcccatcaatacctaatttattgagagtttttagcatgaagggttgttgaattttgtcaaaggctttttctgcatctattgagataatcatgtggtttttgtctttggctctgtttatatgctggattatatttattgatttgcgtatattgaaccagccttgcatgccagggatgaagcccacttgatcatggtggataagctttttgatgtgctgctggattcgttttgccagtattttattgaggatttttgcgtcaatgttcatcaaggatattggtctaaaattctcttttttggttgtgtctctgcccggctttggtatcagaatgatgctggcctcataaaatgagttagggaggattccctctttttctattgattggaatagtttcagaaggaatggtaccagttcctccttgtacctctggtagaattcggctgtgaatccatctggtcctggactctttttggttggtaaactattgattattgccacaatttcagagcctgttattggtctattcagagattcaacttcttcctggtttagtcttgggagagtgtatgtgtcgaggaatttatccatttcttctagattttctagtttatttgcgtagaggtgtttgtagtattctctgatggtagtttgtatttctgtgggatcggtggtgatatcccctttatcattttttattgtgtctatttgattcttctctctttttttctttattagtcttgctagcggtctatcaattttgttgatcctttcaaaaaaccagctcctggattcattaattttttgaagggttttttgtgtctctatttccttcagttctgctctgattttagttatttcttgccttctkctatcttttgaatgtgtttgctcttgcttttctagttcttttaattgtgatgttagggtgtcaattttggatctttcctgctttctcttgtgggcatttagtgctataaatttccctctacacactgctttgaatgtgtcccagagattctggtatgttgtgtctttgttctcgttggtttcaaagaacatctttatttctgccttcattgcgttatgtatccagtagtcattcaggagcaggttgttcagtttccatgtagttgagcggttttgagtgagattcttaatcctgagttctagtttgattgcagtgtggtctgagagatagtttgttataatctctgttcttttacatttgctgaggagagctttacttccaagtatgtggtcaattttggaataggtgtggtgtggtgctgaaaaaaatgtatattctgttgatttggggtggagagttctgtagatgtctattaggtttgcttggtgcagagctgagttcaattcctgggtatccttgttgactttctgtctcattgatctgtctaatgttgacagtggggtgttaaagtctcccattattaatgtgtgggagtctaagtctctttgtaggtcactcaggacttgctttatgaatctttgtgctcctgtattgggtgcatatatatttaggatagttagctcttcttgttgaattgatccctttaccattatgtaatggccttctttgtctcttttgatctttgttggtttaaagtctgttttatcagagactaggattgcaacccctgcctttttttgttttccatttgcttggtagatcttcctccatccttttattttgagcctatgtgtgtctctgcatgtgagatgggtttcctgaatacagcacactgatggktcttgactctttatccaatttgccagtctgtgtcttttaattggagcatttagtccatttacatttaaagttaatattgttatatgtgaatttgatcctgtcattatgatgttagctggttattttgctcattagttgatgcagtttcttcctagtctygatggtctttacattttggcatgattttgcagcggctggtaccattgttcctttccatgtttagcacttccttcaggagctcttttagggcaggcctggtggtgacaaaatctctcagcatttgcttgtctgtaaagtattttatttctccttcacttaygaagcttagtttggctggatatgaaattctgggttgaaaattcttttctttaagaatgttgaatattggtccccactctcttctggcttgtagggtttctgctgagagatctgctgttagtctgatggacttccctttgagggtaacccgacctttctctctggctgcccttaacattttttccatcatttcaactttggtgaatctgacaattatgtgtcttggagttgctcttctcaaggagtatctgtgtggcgttctctgtatttcctgaatctgaacgttggcctgccttgctagattggggaagttctcctggatcatatcctgcagtgttttccaacttggttccattctccccatcactttcaggtacaccaatcagrcgtagatttggtcttttcacatagtcccatatttcttggaggctttgctcatttctttttattcttttttctctaaacttcccttctcgcttcatttcatcttccattgctgataccctttcttccagttgatygcatcggctcctgaggcttctgcattcttcacgtagttctcgagccttggttttcagctccatcagctcctttaagcacttctctgtattggttattctagttatacattcttctaaatttttttcaaagttttcaacttctttgcctttggtttgaatgtcctcccgtagctcagagtaatttgatcgtctgaagccttcttctctcagcttgtcaaagtcattctccatccagctttgttccgttgctggtgaggaactgcgttcctttggaggaggagagacgctctgcgttttagagtttccagtttttctgttctgttttttccccatctttgtggttttatctacttttggtctttgatgatggtgatgtacagatgggtttttggtgtggatgtcctgtttgttagttttccttctaacagacaggaccctcagctgcaggtctgttggaataccctgctgtgtgaggtgtcagtgtgcccctgctggggggtgcctcccagttaggctgctcgggggtcaggggtcagggaaccacttgaggaggcagtctgcccgttctcagatctccagctgygtgctgggaaaaccactgctctcttcaaagctgtcagacagggacatttaagtctgcagaggttactgctgtctttttgtttgtctgtgcccttcccccagaggtggagcctacagaggcaggcaggcctccttgagctrtggtgggctccacccagttcgagcttcctggctgctttgtttacctaagcaagcctgggcaatggcgggcgcccctcccccagcctcgctgccrccttgctgtttgatctcagactgctgtgctagcaatcagcgagacaccgtgggtgtaggaccctctgagccaggtgcgggatataatatcgtggtgcgccgttttttaagccggtccgaaaagcgcaatattcgggtgggagtgacccaattttccaggtgcatccgtcacctctttctttgactcggaaagggaactccctgaccccttgcgcttcccaagtgaggcaatgcctcaccctgcttcagctcgtgcacggtgcccgcacccactgacctgcgcccactgtctggcactccctagtgagatsaacccggtacctcagatggaaatgcagaaatcacccatcttctgtgttgctcacgctgggagctgtataccggggctgttcctgttcggccatcttctttttttccagtttttttttttttttttttttttttttgagacggagtctcgctctgtcgcccaggctggagtgcagtggcgggatctcggctcactgcaagctccgcctcccgggttcacgccattctcctgcctcagcctcccaagtagctgggactacaggcgcccgccactatgcccggctaattttttgtatttttagtagagayggggtttcaccgttttagccgggatggtctcgatctcctgacctcgtgatccgcctgcctcggcctcccaaagtgctgggattacaggtgtgagccaccgcgcccggcctttttccagttttatgtagtgaattacatttattttcaaatgttaaaccagccttgcattcctgggataaacccacttggtcatgttatactattcttttttggatattattatattccatttactaatattttgttttatgtttacatctgtattcataagagattttggctacaattttttttttgtaatcttgtcggattttgatatcaaggttacattggcctttttaaaaaaaaaaaaaacagctgttgttacttgtcttgttctcctcttccttgcagctttttgttcctgttttatagaggtggtgttttttttttctctgttctatttaaggatgtcagtttcctgaagcatatttcttaatctttttcagaaatatattcgtcttccaagagatgatgatgcttttctctcatttgcaatgttttttgacagatcttttatttttcacttgctttcttgagtaaggagagctctrtctagatttgctgttttgccacaggtggttgaatgggttaccatgggcactgttctttgtgcttgcgagtgatggtcagatccccttctcagatctgtggctgaagaactggtttatgttcattgttcctagttraattcctagtaactagcaggcatttgcaccacgaaggtagaactttattgccttacagaataagctgaaatttctagagtgcattctgttagaattattcctgtctctgctttcactgaactttttgtgtgtaattattataaccaatgtaactaattttaattcaagagattaggtagctctgcctgtttattagtctctctctgtctctacgtgtgtgtgtatgtgtgtgtgtgtgtgtgtgtgtgtgtgtgtgtatgtgtgtgtgtgacccatgagtataaccaggactgaagggtaaaatgactgaaggtggaagacaaatgaacctgttattatagaagagaggtcatgagggccgatatttggatattttcttttgctttacatgacatcgcctttatttttatttatttatttatttttgagacggagtcttgctctgtctcccaggctagagtgcagtggcgcgatctgggctcactgcaagctctgtctcccgggttcacaccattctcctgcctcagcctctcgagtagctgggactacaggcgcccaccaccgtgcccagctaattttttttgtatttttagcagagatgaagtttcactgtgttagccaggatggtctcgatcttctgacctcgtgatccacccgcctcagcctccyacagtgctgggattacaggcagacatcacctttattttaagagtccaggtgtcagtgagaattatcaagatgtagcatcagaagattagaaggtcttcacaaccacatgatgaggactctagagtttgtagcctgggtgattgagagaaagacgtggcagaactaggattaaaaatagggaaattgagatttttctagggaaataaatgattgctttgatatgggttatattaagtgtgaggagctttccaggggcaggtgacatttagacctgaatgaagttcatgacagtggaaactaaagttatagtttgggaatcgcagagtgtggtgatagtgggaatgaaagaaacttcatgaatttttaataggagggtagagggcaggagagagggaatagtctgtaagatgttggggacatctcacatcctaaatgcaaatatctagccttgttgcttcatgcactcatctctccgctgatgttcccttggtccagggcaccatcttctcctaccttaatggctgtaattcctcctgactgggctctttctaccactttgactcttccagtccagtctctgtacagtatccagggtgagccttccagaagaccaatctgaacatgtcagttgactgcttaaaatccttcagctgctctccatgcttccagattaaaatccatacacctaatatggctttaaggccctttgagacctcaactctgtctgttagtataaaaataacacaaattgaataaccaaaatttattgaactcttttgaactttagaacttattccaaatagtttatatttgttgtcttgttaaattttcatgtttattctttgagtttatccttattaacaatcctatggagaaggtactgttagatccccattttacagatgagaaagtcacagagaggtttccagttgcacaaggtcacagagctatcaagtgtggaatgaataaatttacatcattatgttatttaatcctctccataatcctatgaagtaagtattkttatcactgccctttacaaatgaagtgactgaagtcagagatgttaggccgtttgtgtggtggagctgcaactggagcccagatcgatgtgattstaagtgtattttgtcttccatgctagtctgaccgcagcctcattsatagcacccctcacctctcaccttaatcacacgtgtagattcccttgtttaacttctgctcattctttaggtttcagctcaattagagctctggctgagaacccttaagcgagcatcccctttaccctcctgccgcacttgaaggcactttgttatcatcactggctgttagtgttctttgattgtctttctcatagtgtgtgggcttcatgaagtcaggtactgtgagcctcttgctcactgttaaaccttgagtgacttgcactgtatgtggcacataacggtactcagttgctgtatattgcataattacataaatgtttaactcagtgatgcagtttggtgttgactgggtttcgttcttaaaagaatataatcagtagtctatttatatgtttaactcccaggatttatatttgtgatggttccagataactgataatccccaaatcatgtggctttagcaatccgctttaggagtataaatatttatatttctgttatttttcttaggctaatgttgtgctttatctatggtgtaaatactgataatcagaagagaatggcaatccagaacgtgctggtttaactggtgaatgtagcctaggctgtctcacttgtgactagaatacaaagtcagttattcttacagtgatcattgaaagttattcctattccacctataagctggttattctctttgctaccacaggataagtagttatagcctggaattgaggagaaagaaatttatagtgtcccaatggcctactttttaatattttctcaggcaaattggtctgacctttcctaccttggtctgacttcctcataggaaaagtttcacattgcacaggaaagaacaatttagcaggaatataagttgcaaattattagttcagtggtactcaagcatgttcaggtgatgaagtacctaaaagtcatggtattctgtggaatactatgaaatatttatatattaaactttacattttttccctaaatcagatattattttatattacattccagaatagacagggagtagcaggtgataaaggtttaagaaaaatttgtggtaagaaaacttaaaattatattaccttattttttcatgcaaattgggaaaaggccatttttggcacctttgtctagcttccaaacctccagcatttaaggtagtgtagttagagaaccattaaattaattgaatatgggggagagaggagaagctgaaatgaaaggtgatgatatcaaggtttccaayttgggcctcataatacccttcatagacactggcgagtcaggagggagaactggcattgaggtcgagaaggatgaatttggttgattgtaaactaatgataggctgaggagagagatgcagtagacagaagagaagcacagtgcctgtcacctagcatggttctcaataattattggctgccatttgtcaccaggaagatagtgtagagatttggaaattatgggcatgaatgaataagaactgttttcaggctgaatatagtgaagtgagtttcaagatttgagcctcggggaatagaagagacaaagttaagccttgtagaatgctgttgggaagtcagtggaagtggaaattcagaaagggtgatttggtttaatggtgggttgtggatgttctgtgaggagatatagtctcagtaatgtgttgcctttattcattcatctaaagcagaaatctaggaattacctttgataccttccatgttattttatccccctaatctaatgataaggtgctgtcaagtttaccttcttaagtaggacacaaagagcacactgtaaaagagtaaactgaactttatcaaaattaaagtcttttgctcttcaaaacctgtcattaagaaaatgaaaagacaaaccacagacttctaaaaaacacatgcatttggccagttctttctatttccatttccaccttcatgtaaaacatatatcagctgggcatgttggctcacgcctgtaattttgggaggctgaggcaggaagattgcatgagcctaggagtttgagactagcctgggctaatagggagaccctgtctttacaaaagaaaaaaaaaatagctggatgtggtggtgcatggctgtagtcctggctacttgggaggctgaaggggaagaattgcttgagccaggaggttgaggctgcagtaagctgtgttcatgtcattgcactccagtctgggctrcagagtgagaccctgtctcaaaaaataaaataaaaaataaaatgtatcatattatatgtacatatgagaccctcataactcaataagacaatccaataaaaatggacaaaagatttgaaaagagtattaaagaagatatacaaatggaaaataagtgcaagaaaaaatgctcagcatcattttagtcattaggaaaatgcaaattaaaactacagtgagaaagctcctacacccccaatagaatggctaaaattacaaagtctgggctgggcacagggcttacacttaggtgggaggattgctcaaggatacaggactttgagaccctacctttaaattaaaaaaaaattttttttagttgttgactaggatgtatgtatgtagaagaagaggacctgtggacctttttttttttttttttccgcttgagacagggtcctactctgttgcccggagtggagtggcaraaccatggctcactgcagccttgaactcctgggctcaagcagtcctcttaagtagctgtgcacactgccacatctgcctaatttttaaatttttggtggagactgggtcttgctatgctccccaggctggtcttgaactcctggcctcaagcgatcctctctcttggcctctcaaagtgttgagtttacaggtgtgagccactgcactgggccagacctttatgcattgctggtaggctccgaggtgagccctggagttcaaaatcagctttctgaagtcattttcttgaactgccctctcttgccatctcctcagtgccctgcggctccctttatttaaccctgctctgctgtgtacttcccatgattgtgtatgtagtctgggcttcgcagtgagaggacagagtagaaaagaaagtaataggggtttgccctatcctcttaaggccacacttcctctggttgtagggaaaggttccttccctcactcaatgctttaggtacctgtaggctgctgcctcttttctacttcttgagcctgaactagccagcttctcttggaagttattcatgctgatgtccacgtccagtatttgggctgccttgagtctatgctgagtgataatggaggaacaaactcaaacacaccactggtttggtggtacttttaattagaatcttctatcccatttcatctgctactctactttctaggttcctcaaatagcgctccatgaattctcccctggttttatagaggtattttctcgttgtggagagacagggtggagtgtgcctgttactgggagccagaacttctagatttctttttatttattttgctttgcgttcattggtccttttaaatgtgtgaatgtgtatctgttgttagttctgggaagttctctgtattttcagaccaagaatgaagttaagstagaaatcttaagagatagctagagtattaaaaacagctgttggctatgtctcatcctcttctcttccagagtattgatttgtcttaatgttttacttctgcgtttatcttgtgtagcttttgttttctattttctgtttttctttttgaactctattttgtatcatttctttaagttcatgaattctctccctggttgtatctttcctgctcttaagtcatccgttcagttattcattcttattttgagaactattttgttctttttcagttttccttggtcatgtcatagtttcttactgtttactcatttttaatcttttaaaaatttatttaagcttattaaatattccatattctgtctcccataattctaatacctgaagtctgaaggtctgactctgccatcttttatttctgaggttcttatttatgggccttgtttccccagggttttctgatttttgccagtgagctcatatttcttggagctttctgtgagaaaaattttgaagccgagtttgaagtggatttttccagagaaggtttacatattttgttagtgtcctgaagccactcttagtttgggaccacttcggtttaaattctggggttgagggttttttttktttgtttgtttgtttgtttgttttcagagagtctcactctgttgcctagggtggagtgcagtggcagtatcctggctgactgcagccttgaactcctgggctcaagctaacatcctgcctcagcctcccgagtagccaagactacaggcgtgtaccaccatgccctgctgattttttaatttttttttattttttcctgatggagctggggtcttgctctgctaaccaggctggtctcatattcctgggctcagcttacccaagtgctagaattacagatgtgagccaccatgcctggcctgttgagatttttttgaccactcagtagcagtcccttgtgagggcctgcttgtgtttgaactggtggaaaaatttccctttctcagtgctgagttttgaggctagtggtttttatgacagttcctgagatgtgtatgtgtgtggatgggtttctttcttcatcaccttggtcatcccactttaaatggtgggagagggatgtctgttacacttttctccttaggctgaatgttcgttttgtcttgaattccttgagccccttagattgggagaatggagcatgcattggactacataaatatcttcaaggagaaagtgagtttttgtgttttggtaaccctgttaggtttctatcttcacttagttctttgtctgaatctttgttcttttctttttttctttttttttttttgagtcagagtctcactctatcgcccaggctggtgtgcagtggcataatctcggctcagtgccacctccacctcctgggttcaagtgattctcctacctcagcctcccaagtagctgggattacaggcacatgctactatgcctggctaattttttatatttttagtagagatggggcttcactatgttggccaggctggtcttgaactcctgatctcaagtgatccacccgccttggcctctcatagtgctgggattacaggtgtgaaccaccatacccgaccgaatctttgttattttcttgcaagctcatcaatgtatttatctgagaagatggaaaaaaaccattatttatagttttcagtggaggatctgaagggtacttagtaggaatttgcaagtggcatgcagctatggtcccagcacctagggaggctgaagtgggaggattgcttgaggctggcagttcaagggtgcagtgtgctatgatcatgcctgtgaatagtcactgcaccccagcccaggcaatatggcagcaccctgtctcttaaaaaaaaaaaaaaggaacttgcagctgcagtgtttctgagtttcaatcagggtgattctgctagcattctccagcctctgcatgagcattcatacctctgtactttgctcagcatgtgtctcttgtttaaaatccccccactcctctccacctagccaaacccagttcattctgcaatgtgaacaatcaagtttcacctcttcatggtgcttctcttgaatgctgtagctcactggttcccaaatgtttggaatattttaaagtacagacttaaaaacaaattttgtggagttacatcaaaatgatcatctcctgtcaccattatttttgaaaagaaattacattttcatatctraaaggcaggaggaatatgatgtccaattaaggatagtttttataattgaattaaatatctttatatggaaagtacactgtattgtccccgtttttctcattttgctactgattagaaaaagcctcattgcatcctatccgctgataatcaggaccacaaccttagctcagaatgatgtcttcaatttgcaaacccacagcattttgttttatcaattcgtggcagccagtcatttatttctattgatttcaaacagcccatgtttggctgtttacattttatgttttgtctccttgacttggttgtaagctccttaggagccattatctgtgtgtatttagattactcataaatatgtgttgaatgagttaaatttagatacctcggatgatggttgaaacctagcaatatttatagagcacacatttgagtatatcacagttctgaacgttgtttacttctggaggaaaaagaagttttaatgtgaatcatgagtcacttactcatctctctcctcctcagggaatttcattcacttaacaaattcaccaagcgcttgtttaaaaaccaggtcttttgttagggatctgggaatacagaggtgaagtgaaacaaagttcccagtgtagtaggtaatatgtatatataagtacaaagcatagaataccacctgggaagccttataacagggctttgaaaccagttttgtgacggtgtggagagagcaactgagctttgtaagggggtgagagaagcctccagagaggaggaggcatttgttcattcactttccattcattcagcaaatatctcttaagtgcctactacttgccaagcactgttctagatgcatcttgaataaataggacattgttaggagatggaacacattttaggtggggaaattatgataaagagcatgccctttgaagtaagaacagacctgggcttgagttcatacactgccacttactagatatttgtctttgggcaagcaattcaatttctagaagattcttacttttgtaaagtgctgtagatcctccctccctcacagtatgtcatgtgggtaaagtgaggtgctgtatataaaattaagcttagcacagtgcccagcccctctgaaatagtgcaataagtgacaaatgtatatacaaggcatgtaagtgattgaggcctgatggtaagattaacatgactaaaatgtgggggcatgtgggttggtagggggtggtgggcagatgaagctgataagtctggtctcacygaggctaaattgcaaatagtcttgcatcrcatgtcctgctaatgacggtcttttaactcctgaatgcatttgggagcctttgaggtttacattgtgtttttgtcttttcttttttaaactatgcagtggcatgctgagctgtagcatagtgattagggacatggactctggagccaaatctgcctgggttctagtcccagctgtctcacttactaaatgtttgactttaactgatctgttcgttagtttcttcattggtaaactggatgataatcatatctatcttaaatgtttatcttgttttgtttgtacaatgctctttgaatcactttttttttttwaaaaacatataatcctgtacgtatagtgggccagtgggccatgagccaccatgcccagaccattctttattcttattctttattcttttttattcttattctttattattattattcttattatttttgagacggcatctcactctgtcacccaggctggagtgcagtggcgcgatctcggctccccgcaacccctgcctctcaggttcaagcaattctcctgcctcagccacttgagtagctgggattacaggtgcccacgaccacacccggctaatttttgtatttttagtagagacagggtttcaccatgttggccaggctggtcttcaactcctgacctcaagtgatccatctgccttggcatctcaaagtgctgggatattattttattttaccttctgggatacatgtgtaggatgtgcaggtttgttacataggtaaatgtgtgccatggtggtttgctgcacctgtcaatccatcacctaggtattaagccccacatgtattagctatttaccctgatgctctccctctgtttttgtattcttataaatattcttgggtttcctcaggggagtaatctgaggcagtcataggctcacttctttcttttccatctttcaaggcattgctgcactttgttgcctaatgtcttgaaaaccattgtttcatatgttttgtctatgttactttgaaataatgtgctccttccgagtcttgctttttaaggtttgttaagtgggattggagttgtgctcagtctagggctagactaggcaacctagaattttattctccatttctaaggtaatactctattgtgtactctatccaatgcaccatgaacatgagttttccacttcggctggggggaataggcattatttctaaccctgtgtgagtaccagctactgcacctgtaatcttttttgctggttctttgtgcaggcttaagttatttcctcacatacacatgctaatcagtacttagctatatacttgagggggctcttgcagatctctggagttctttctctgtgcagctctcttcactccagcactctgtgctgcaaactcaactgccttggtttccctggacgcttagctctgtctctcagctccaggtgtttgctgggctttgcttaggtcccccctccttgcaccataatctggaaactctcaaagtggtgagctggggcatcagagggctcagctcacttgtttacttctctcagggatcactgtgctttgttgtctgttctccagtctcttgaaaaacattgttcgagagaaggatggatggatcgatggaattttggttgtttcagatggaagggtaaatgtggtccatgttactccatctctgctggatttgagattccagtaaatttgttatatacttatttaaatttttgatagcctgctactgccggtataagatggtatctgatttagtacgattttatttattattattaaagtgtatatttcaaggtcttctaaagagtctcacgatttctaggttgtgtgccatcttggcacattgagaagaactactgttcttttatagtagttccaaaatccaactgatcagaatcacttaggaaaataggttcatagatcaatagattatcaaaatcacttttcagaaaatagatacctgggctttatttcccacctaatgaatcagtcttcagtggtagaacctgggaatctgatttaaaaaacttctaggtgatttgagactgagtcagtatagtgtacgttacgttgttaagagcacgagttccatggtgactgtgatctatgatgacaactcactaaggtccaaatggagcagtggcagagggagaggcaagttcttctcagaaaagggaacttgggaccatgaaggagagaggagctcagtgcttctgggagacatggggaaggcaccactctgtaattctggatctccctgaagtcaggttgtgagctctctggatggctcaaaggactactcaaggagtgctgagaacctgagctcactgttctgaaggccttttcagttgcccttaggtgctaacacaacagccagacactatggtttttgaagggtgtgtggaggagaaaaacaattgggcctataataaggttcattaaaaaaaaattagtggaataggggttacatgggtatatgcagttgcccaagttccttgaactagacacttacaatgagtgcattttagtgtatgtatattagcatacatgtaattgtgaggatacaattatatgttggaggtataaagttgattttaaaaattcaagaatatagactctagagccacactctctgggttcaaattccagctctatctcttacaaactgtgtgaacttggacaagcttctgaacttgtatttcagtttcctcatctgtaaaatgagaatgatggtaatagtagttctttcatagagttgttgggaaggttaagtgaaataatagatgaaaagtgcttagaaaaatatctgacacatatttaagtgtttagtacatattaacaagatttagaagtgacttggtcttctgcagaatatctgctcttcttagatggggtaatggaaataaccttcccctcacaggcttggcgggagggttaaataagaaagaacataaaagcaagtcatcaatgaaacaaggggttcttgttgcatattcctccataaatagcttcatgaacgccttgacatttttatgtaaaaaatattccatttaagcacatttttctggggagatggtgaagcttttcatggcctcctcagagaagtctgtggcccaccattcccccagccactctaaacaggtgtgagtaatttttggacaggcaacgtggtgtggtggaaaaggcatgggttttggaatcttaaaaccagggttcagttggagttctaccacttcctggcctcagtttcccttactgtaaaacaaggaaaataccaccatcttattacctgacacggttttgacaatcagcttcagaaacatatgtgagttctaaggtaaccataaagtattttacagatgttcactttattactgactgaggggcataagttgcacatccatggactcttttgaattttttttttttcccgaagatggagtttcactcttgttgcccaggctggagtgcaatggtgccgtcttggctgactgcagcctctgccttccaggttcaagcgattctcctgattcagcctcccaagtagctggggttacagctgtgtgccaccaggcctggctaatttttgtatttttagtagagacggggtttcaccatgttggccaggctggtcttgaactcctgacctcaggtgatctacctgcctcggcctcccaaagtgctggaattacaggtatgagccaccacgcccggcctcttttgatttttatacattgcatttattcagtattttttttcctctgtagaggagagactttttcttcagttttggtaaaatgagaatttctttctgactgcacaatccatcccttgttcttaaaatccctttatttattgcctagactaatgtttctattcggatagttccctattttctggattgcttttagtgacggtatttgaaagcctaatggttttgagtctttgaaatacacagtaatatgtggattacttataaagcctattattggtaaggtgaagccattttatttttatatgatacgtgataataccctttacattagtttaacatcttttagtttacaaagcactttctcatttttctctcatttgatccctgaaacaacttttgagatgagcagggcaggtatatatcttgacagaggaggaagccgaaaggttaaatggcttgtcctaatcccataacaagtaagggatctacctgggatttgaacccaagcctcctgatgtttagtttggggttctttccatagaaccacatgtcattcctgtgagaaagtcttggtaaaaggaaggtcagagaaattggtatttaatgaatgattttaaaaaaatatttttccaggaactagaatcttatagaaaagttggcagtacagtgtaaagaacttaaaatacacacacacacacacacacacacacacacacacacacacacacacacagtttaaagcacggtattgacctgatgcatcatcacccttgaatgtttcagtgtgcttctcctacaaacaaggttattctcccctctaacgcaatgcaaacatcaaaatcagcaagttaatggcaatttgttactacgtctaatcctaagactgcattcaggtttcactagtggtcccaataacatcctttacagcaaaagaatcacacattgcatttagttgtcatttctctttagtttcctttagtctggaagagattttcagcctttccttgattttcatgacgttgacacttttgaagattaaggccagatattttctagaaggtccttccacttggttttgtctgatgtttcttcaggtgtagcatctccgacaggaatatcgcagcagtgatggtgtgccctgctctttgcggtccagcagtttcttccattactgatggtgatcactttgacttgactaggtttttgccaaacttctgcattgaaagttactctcttctcccttgtattcagtattttgtgggggaggtactttgaaactgtgtaaatataccatttctcattaaacttttcaatttattcccttatttagatgcgtatgaactcatggcttcttgttttatttgatggatccaaatctgttaatatccttactgatttggatgctcagactgccccagatttggccagtggaagccctttcaggcttgctcccrtgtcccttcaatgtatccccatcattctttgagcacttctttgcttcctggcacaaaaaatgttccaagttcatctagcacgttccctgtcttagtgctagaatcagctatttctcctaggagccctggttccttttagaggagaattgtatttagaagccaaggcctgggaattaggtgtgctcattgctgttggggtgttgctgctcccaggccctcccagtagccagagctgggaaatatgtgtgcatgtgaaaagtcaggttacatttatgctttatttttctatcaagttatatatatacatataaaccttgagcacattctaatatctkcatttcaaatccaactttgtataagtcatgttggttttctgttaacttcaactgtaagaaaccagccttccccatgtcttccaagtagccttgggttcagattaggcacacggccccttcacctccaccctgtgtgcatgctcgcctccttcttcaccttgctttcttggcatcacaaggacttgatggtggttctccacacctcctgccccactgccctgcttggactctgactcccactcactctgggaagcctcctcctacccaacatggacgatctcctcatgcctgcttgggcactggcctccattctcgggggccctaatgcttagacatgctcctcaccctctgcagctctgacaccctgtgttgggatgccctcacatgggtaccccctcattctgcctgtgcttcaacaccccaggcccagctgtgctgtgcgtgaatacccttccaccccactcaggttctgacttcccacaccaggttgttccctgagtagatgtcttcctcatcagttggattgtgcatcttatgccaggacatccctcagcatggatgttgccccttcatagggacaccttccttgccccgcccaggctctgacatctcacactgggctgtcaccagcatgaacgtctacctcactctgcctacctaacaggtttaggactaaactgttcagaaagggaaggggaggtttttacatttttgtaaggtcaaaaatgtttattgataatgagataaatatcacctttgcaaatgcccttaatgggtaaagcctagattttacactgcagctcagcatatgagacaacttattaacactgtgtgttgtactgcacattgctgaggggtgttcaggctttgtctctctgcttggaatgcagctaaccctcctccagttaccttgcttgcacttagaggcttaagaatcttcccgtagggatatatggaaggtaaacctttgtgactcttttcgtagcaatatctgcgtatcttcattaatctgatcctgagaacattattagaaatgaagttaagtgtagtcttgaaacgacttgtttgtgtaattacacaactaagttaattttctaacaagtctcaacaatgactgcattctcctatggaggtgttaacttgttatgggctagaaagcactctttgatacaatgttttcagcctggaaaaaaaggctttaatttcagagtccagtgaaacaaatggagacttgttggaaattttaacactacctttttgcttgtttttctagcttaaaggactcaatgtttattaggtggtgtttgctagtgcgttctgaagtgtatacagtttcttttgaccatgttgtcaagtttaagagagttcaattggtatgaatttttaaacggtacacctcagccccttcagcatgtaagtttgtaactaaggaaacactgcgctgaagctggtttgaagttttgaagaccgtgaaawgagtaaggggtcctaataactatttcgtttcaggtctgtagctctaaattacccttaaaaggactagggcctaccattgtggcatggttaccatatgcaacacagattcattttatgaggagttaatgttacatttttctcctaatctcatatattctaattgaggaaaaktagatcctaattaaaagctgatgatccagcagagtgatcaatagcatgatgccttgaaaaaaaaaacaaaacaaaaaacgccattaagctttgctgctgcctaaatactgtcaaagcctttgtctatttcatggcttcaagctgagtgtacttaatctttttgagaacatggtcctggctgggtgtggtggctcacgcctgtaatcccagaactttgggaggctgagaygggcagataagttgaggtcaagagttcaggaccagcctgggcaacatggtgaaaccccatctctcctaaaattacaaaaatcccggacatggtggcaggtgcctgtaatcccagctacttgggaggatgaggcaggataatcacttgaacccgggaggcggaggttgcagtgagctgagatcatgccactgcactccagcctgggcaacagagtgagactatctcgaaaagaaaaaaaaagaacatggtcctgagcactgagcatgacccttccggtgcactgagaactgtgttcagcagagagatcttgaatagaaatgctctattggcttaccctcagccttcattctcccagaagcaaaaactgagcagacctcccttctttcaaaaacgttttagctgtttgtatttgccatttttcagtgtttaagagctgaggctgttgtcagcaggtgtgacttattgagaacttttactccaaaggaaaacatctttacagagtaataggtgtaagcagtgtgtattctgtaaattacctcttgtcagagaaagagaagtgattagtgggagctggaaacgtgtcagatgttggaggaaaactcattcatgaaacatttattgagccaggtgtcagactagggttatgagaagacacagttggtaccctcaaggagctgccagtctagtggggaagaatgtattatattttatctgagacacaccagtggttctcaaccttgactgtactttggaataagtttaggaattaaaaagtatcagtgcctggagattctgatttaattggtctgcgatatagactgggcatcaggatttttaaaagccccccaggtaattgtaattgtaccagggttggatatggtgagagcctggagagtgggaagtacagggtgcttgggagcataaaggtggggcacttaacccagtctaggctgtgtgcgtgcgtctgtgtgtgtgtgtgtgagagagagagtgagtgtgtgtgtgtgtgtgtgtgtgtgtgtgtgtgcgcgcgcgctcgcaggtcaggtgggagatgggagggttgttgaacaataatacttcctagagaagaggaagtgcctgagtttgtcaagtgaaaaagcctggaaagactgttcttggcaaaaaagcaattgaataatgtagaatagtgaagtggttattgtctttggagttagttccatgctgattctgctgcttggtcattttgtctttggccaatttattctctgtgagcttcagtgtcctcatctctaaaccgggagtagtattacctgtggggttgttgaggactaattgaggtaatgcatgtgaagtgcttaggatcatggctggcacataggaagcagtaagtggtgttagctgtatggaaatggtataattgtcctagaattagggcatgcatgcatggtttgcttagagagctacaagtagatctatatggctggattgtagggtacaagactgaagaagatggggggtgggaggcaaaaaaaatgcttggcaggtgggcagggttaggagtctataggagaatgaaacaattaataatgggatatcatggcagagccaggacatttccatggtaatatcttaagatgtatcatgaagtgttctgggaaaacttgggtccatattggaaaattggctctgaatgtggcattctcagcatcattacatgtaccaaattagcagtgagtgttaataggacagaaataggattttcagttcctttagccaaaaagttaaaaatattaaacatcytgaagagtaatggagggataagcaatctcaaggtggtcgcagagagcctctggaaattgttatagtcttaattgtttacaggcttaatgaaaataccaactaagggggttgcttggctatttgcatttagaggaggcacttttttatttttgatttgcagagaaatagagaatgcttctatctgcgttggcttccctggcccttaaaataactgatgtatatttgttggtatgttacataacttgtcacaacattactcaccacttcttccataaggcaacatggaaatgatcatggataagcatgaccataacttataattatagaccaatttgttcttagcattttagctcttttttttttttttttttgagactgtcataatccttggctccatgtaatggaatagaactctaccagctgtttgaactgagtaagaatcttaggtggctttattatgactcattagagtgaggcagtaactacagatagtggtagaagaagaggaataaccttccttgtttccacaaatgccttttttctttgaaatttatcttttattgcaaacgcactattgaaataatggattactgtggtatcccctatgtttatgatgtatattctaaattatctggaagaattctacttaactggtagttcttaaagtatggtcacgggtccagcagcatcaggatgacttggagacttgttagaaatacaattcttgggtcctacctgagacactctggggatgggaactgaaatcttttagttaagccctccaggtgactatagtacttgctaaagtttgagaatcgtggaactggatgatcacacccatcatttattgaaatcttttagacctcaggaaggcaactctattctttatgccttctacccagtatttaggtggcactggctgtgtgccagtcacttcccaggcaccagggaaacactccttgacatgatagacaagatccctgctctccagcagcttacatttagagaaaggagactgactgtaaaccaagattatggcaggtataatgtggagaattacagttaggtgatagagtgtgtgttggggaaggtctttctgaggaggccaaatataagctgagttttcaatgccaagaaggaccacctgtgtgaagatcaatataaaggactgtaagatgggacttctctttggtgtgtttgaggagcagaaagaaggtcattgtggctggagttcagtgggcaaggggagagaggtataaaatgaagttggacaggtaggcagaggccagatcatgtaggactttgtaggcattgctaaggactgccaccttctttttctgttttgtttgtttaaattgtggtaaatttcacataagacttcccatcttaaccacgttcaagtgtacagttcaaaggtattatgtgtattcatattgtggggcaacaattgtcaatgtgcagctccaggactacaactttgacttgactttgagtggtgtggggagcttttaggagatttgagcaaagaagtgacataacctgaacttcagaataaaaggattactgtctgttaatgttgtgatctgactctatagaggggcaaggaagaaagcagggrgacccatcaggagggtgctgcagtaatcgaggtgatatgatagtgatctatcaaggatggttgtatttgggggtgctgagaaacgttgagattctggatgtattttgatggtagaatcagtagaattttctgattggttgactgtggcatatgaaacgggagtcgaggatgacattaagttttgttagtctcagcaactagtagagttcaggagatgcaggtttgagggagaaaaatatgatatgttaaattagaaatgcttcttagatgcccaaatgggattttttttttttttttttgaaacaaggttttgctatgttgctcaggctggtctcaaactcctggcctcaaacaatcctcctgcgttggcctctccagtagctgggcatcccccaccatgcctggcccagtggggatgttgagtaggcagctgggtaagggagtctggagtcagggaagaagtagtcaggttggagatgtgactggggcttgtatgcatggtaatgaaagcccagagactgaatgagatcatctaagcaatgagtggagacagggacagtaggagagctaacctgagaaggaattcgcaaaggagtagccagtgaggtaggaagaggatcaacagagagcaacgtcctggaagccaagaaaagaaagacattcaaggaggagggcagatggatgaactatcaaatgctattgacaggccgagtaagatgagcactgagaattgagcatttaaatacattttagcaatgcagaggtctgtggttaccttgaccaagttgtttcagtggtgtcgtgggttcagaagcctggttggagtatgttagagaaaggaagaagcagcagaaacaatgagtatatacattaggccatttttcacttagatagcagggctgtacaaaacaccctgtggtacaggataatgtgttggtgtccccgtgttttaaagtttggatataacacctttkcatgctcattttatttcaatttttaaaatgcataaaaataaattaaaaatggaaacttgagtaaaaatgtgggaagctctaaagaacctccatgaagtcctagggtcctgaagaacacactttgaaggctgttatattaatccaaaggaatgaaattctgagatgaaattcagccatttgcaaactaggcttaagaaagacattttgaggtttcagagagaatcttcctgatgctcttcagattatactacctattactcatgaaagaacctttgaacttccctttctttcatcaaatgttctaccttaagatcttttgaatgaaaggggtgtttgcatatggtattttccacaaatatttggtcccatatgccaaagatgccaagatcattttgtaccctcttgcagggaaaaaagagcacaacaattttttaaggtcctcttgaaacttcagtttacttaatttttttaagtaagatactgtgacttaatgtctgattttaaaaataactcagtttgacaaggtatatttaaataccttgaattttagagcagccaggtctttgctacagacgcttgaaagcaaaagcccatgtttctctctgggggagaaatgacgattttacacccccgaaataagtagattcctgattcacaaaacacttatttttctttcccctcctaaggaagtagagggagtattaccattttttagtgagtgtaaaatgccattatttataatataagcctttatttaaggtattactaggaaaaaatgccggctcttagaattgtaaaatgctgtcggttgtaagagatatgaaaacgtggggggaaacagttcattctagaatcgagtgaaataggatttgataaacaggaggcatgagttctggtcctggccatgtttctagacaagtcactttagaatccctttgcatgaggttgctcatttgtatggttgtagtaatcctgacacacctatctctcaggattatgatgacgatgaaatgagataactgagattgctattttgaaaagtagatgccgctgggcatattaaaagtatttatttgatgtaaataaatccttagagatgattaggcaactcagaaggtttcttacctcatgtttgttgtcagatttaaaatagaattaagttacagatatttgaaagtacaacattttcttctgctacatgatttttatttcatctggaaacatctttttatggtagttttgaaattaaagagaaaatgtaaaaataatataaccacagtattcttattatctagaattaaccataaacattctgttctgtgatcttttaaaaatttatgaactattggctgggtgcagtggctcccagcactttgggaggccaaggcgggtggattacttgaggtcaggaattcgagaccagcctggccaacatggtgaaaccccatctctactaaaatacaaaagattagctgggcgtggtggtgtgttcctgtaatccaagctacttgggaggctgaggcaggagaatcgcttgaacctgggaagcagaggttgcagtgagctgagattgtgccactgcacttcagcctggatgacagagtgagactctgtctcaaaataaatacgtaaataaacaaatttatgaactgttatgaaataaacaagtaagagtataataataaaaattcatacagttaccattgccaatacaggtgaaggcccattgaatcctgaagatcgtgaacttatcaaggttatatagctatgtgggaacagtgtcttacgtttagattggcatcttgtcttcacagtagtctagtgagatacactgttcctcttgtttaagtcttgaaaacctgtacataagcaagttaatcttgtcacattcgtgttttattctggaatatactgaggagagggctaatttgtgctggtgttgccttggtctgagtttcctcaaatttctacctctgggtttggtgatccagctgtggaaattggaaatgtgacatctgtaaaaccatagtaatggctagcctattatgtgccagacatcatgcctagacaatttgtgtgtgtgtgtgtgtgtgtataattttattattcatttttgagacagcatctcactctgttacccaggctggagtgcagtagcgtgatcttagctcactgcaacctctgcctcctgggctcaagtgatcctcccaccttagcctcccaagtagcttgcattataggtgtgcaccaccatgtctggctgatttttgcatttttagtagagacagggttttgctatattgcccaggctggttttgaactcctggcctcaagtgatcctcccaccttggcctcccaaagtgctgggattacaggtgtgagccaccacacctgacctgtatatatatatatttcaagttttacagtaattctttggctaagtgttttcattttgtagtttaggaaggcatggtctcagagaaatagtgtagcttgtccaaagttccacggccattaagttgtgagctaatgatttcaaggaagatctgtttaataccatagcccacatgttctataccatgctgcctcaatctttgtcagtaatcatgatctgtttcttttgtaggcagaatccagagaccacatttgaagtatatgttgaagtggcctatcccaggacaggtggcactctttcaggtactttgcatgtttgattatgatatggtgtgttacttattgtttgagatagctatgcacgtgagataatatgtgaatatgagtaaattgttatttgtctttaagtatgtttaagtgcctttttccttttattcatgcycacattatcctaggaagaatggagaatgaaaacacagtgaatagtctgaattaagagttcaagcataataggcttgaagtatggctttattcattgtaatcattgggtcttggtttgcatctttcacagatgcctggaagtcaactatttagtgtgaaatattgtcaccttgctaatgagcagggcttcacctctagtctaccaatctaatggtagaattagattataggatacaaaataatataaaggaaattctctgccactaatctagaaggagatgcttggacttaatttagtaaattttatgtctgctggcaaaagaaggttgaaaattagttgaaggaaacacctcctctggctttagcttttgggctaatttgaatatgtgttcctggacaagagggtcctaggaaggaccagggtatcttgtgcaggcagcatatatttcttcttaaaatctttcttggttaatgagaaaaataaccttatgatctagtgttctttttcttggtgcctaagaggtgatacattttgccaaaggtatgtttaggactcttggtccacccacaaaaacacctgcatataataatattatttttttttttttgagatggagttttgctcttgttgcccaggctggagtgcaatggcgtgatcttggctcaccgcaacctctgcctcccgggttcaagtgattctcctgtctcagcctcccgagtagctgggattataggcatgtgccaccacgcccagctaattttgtatttttaatagagacagggcttctccgtgttggtcaggcacggagaaggcatttgttaatatgaacaaaatctgaaaggtacagatgaaatggaagaatgaacaaagtgaatagcatttatactacttcctatttcagccatctaattcctctccccatagacaacacctttgtttaactctacagtttattttttaaacttttattttatgtatttattttcatgagatggaattgctctcttgtcacccaggctggagtgcaatggcacaatctcggctcactgcagcttccgcctcctgggtcaagtagttctcctgcctcagcctcccaagtagctgggattacaggcgcccgccaccactcccagctaacttttatatttttagtaaagacaggtttcaccatgttggccaggctggtcttgagctcctgacctcaggtgatctacccacctcggcctcccaaagtgctgggattacaggtatgagccaccatgcccggcctgtttttttaactttttgttttgcaagtattttattttattattattatttttgagacggcatcttgcactgtcrcccaggctggagtgcaatggcatgatctcggctcactgcaacctccgcctcctggrttcaagcaattcttctgcctcagccttccaagtagctgggattacaggtgcccaccaccacgtcyggctaattttttgtatttttagtagagacggggtttcactatgttggccaggctgtctcgaactcttgacctcgttatccgcctgcctcagcctcccaaagtgttgggattacttacaggcgtgagccaccgcgcctggcccttattttttaattagtataagtttaggggttacaagagcagttgtgttacatgcatatattgcatagtggtgaagtctgggcttttagtgtacccatcacctgaatagtgtacattgtacccattaagtaatttcttatccctcagcccctcccacccttctgagtctccagtgcctattattccacactctatgaccacgtgtacacatcatttagttcccacttataggtgagaacatgctgtatttgactttctatttcacttaaaagaatggcctccagttccatccatggaactgcaaaagacattatttcattcttttttatggctgagtagtattccacattttctttatccaattgcccattggtggacacttatattgattctgtatctttgctattgtaaatagtgcttctataaaaatatgaatgcagttatctttttaatatgatttattttcctttgggtatatactcggtaatgggattgctggatcgaatgaattgttttgagactattttaagagttacaaggacagtccagtgcgtatgctctttccttagatttgtcaattgttattattttgctgcatttgctttatcacccccccaatacatacacagcacatatgtgtgcatgtgagtatacacacacagaattattgctggatcatttaagagtgagttgcagacattatgacccttcacccctgcatatccaggagatattctggatatatctcctaagaataaagacatattcttatatacccctagtataatggttgaaatcagaaaatttaatattgatataatgtcagttgtccatatttaaatttaatcaattgttatatcatgtcctttacagcattttccctatgacccagaatccaatccggaatcatgcagtccatttagttttcatgtcagtttacttcctttcagcctagaataatttttacagcctttctttgtcttttttgacatgtttttgaagaatttgggtctgttgttttgtagaaagttcctggatttgtatctgtctgattggatcttcatgattagatgcaggttattggtttttggtaaaagtatctcaaaagtgttatgtatttttcagtgcatccagtaagcagaccatgatatctgtcctgttatttgtgaaaaagtacataaaacatatgtatagtttaacaaataagtataaattgagtaaccatgttattatgatccaggttaagaaatataatgttatccagttcttcagaaatactggtcctggcaagagggacccctgccttggcctgatgctttagaaggatctgctttgtccctcctctaccartgccctttccacagggcaaggagtctctggggcctacggaacatggtcacttggagactaaacccttccatcctagaccatgctttgagcacccagcatctcagaacttcttgcccaaatggccttgagcttgtttctggagcctgtgtgagtctctcccctggggtctgtcctcctgggagtggactatgctactggtgtatacatccctaggtctaagggtggcctaaggatagctgtcagtggggaatagggtatgggatagagcttgcagtacaggatggagagggggctgtgggcagtgagccaatggccaatttgccctgcaccactgcttttctccatggaatgcaaaatacaaaaacacaatatgaacctggccttctagtcagttgtaaaggtatatttattatggcaggaggatagaaaatatttaatagtttgtatgcttgttttaaaacttttaaatatttaaatattcagatgtatggtctgtaggtctctatttgaacccttgcctaagccctgtaaatgttacaggtgggtttgcccagcaccccagaggcccctccctccctgccttcagaggtaactactatcctgacttttatgataatcatctctttgtttttcttcatagttttgctacataagtatacctcattgaaaaaatataattgaattgtgccgccttctgaattttatagaaatggaattattctgtatgtagctctgctgcttttttgctcaattatgtttgaaagggtcttccrtgttgtgtgtaactgcagtcatagattttcattgctgtgtagtgtactatagaattatttcagaatttagttatccattctactgttgacctttgaagttgttcgcagtttttggctactataagccatgctactgtgacctttcctacgtatgaatcctggcacatgtaaacatmcatttccatatagaacatacttgattactgaatcatgccatacttttacaaaatggattgtgccagtctgtactcccacctgcagtgtttggtagtctacacttactgctctacaacttcatcagcccttggtacagttagatttgacttttgccaacctgatggttatatagtagtatctccttgttgttttttatttgctttttgttgaagactaatgagattgaaccccttcttatatgcttactggcttcttacttatttgtttgtttattagttagagacaaagtcttgctcctttgcccagctgaagtgcagtggcgtgatcatagttcattgcagcctcgaactcctgggctcaagtgttcctcccaccttagcctccttagtagatggtactagcctccttagtagctggtataggcttattggcctcgtgaatatcttttataaagtactcattcaggctacttgctcatttttaaaattgagttttctaccttttcctcattggtttataagaaattgtttatatactatagatattaattatctggttatatgtgttatagatatcttctatggtttgtctttgtatctttgaccaaaacttcttggttttaatatggtataatttatcaatattttcctactctacaaagatattttccaatatttcctttttttcgttttttttttttttttactttttaaattttatgtagagatgggctcttactttgttgcccaggctgatatcaaactcctggatcaagcgatcctcccacttcagactccaaagtgttgggattatggatgtgagccacctctccaggcccaatattttcttttaagggatagatagggccgggtgcagtggcttacgcctgtaatcccagcactttgagaggtcaaggtgggcggatcacaaggtcaagagttcgagaccagcctagtcaacatggtaaaaccccgtctctattaaaaatacaaaaactagccaggcatggtggtgcatgcctgtagtcccagctgctcgggtggctgaggcaggaggatcgcttgaacctgggaggcggagcttgcagtgagctgagattgtgccactgcactccagcctgggtgacagagtgagactccgtctcaaaaaaaaaaaaagagagatagataattttgccttttacatctaagtctttactaaggatattagttttctattggatgattaatattcagaaaagttaacctctaaatttgattcctcatcggtgatttttaaaaattgggaaactaaataaaacttatttactacaatatgctatgtctgtacttaaaacattttataaagtgatcaggtacttcaaaccatacctaaaacattacctaatgataaaaagatgtgaggtgataaagggtaaactttgaggacagttcttttttccattgattgcttttaatgtctacactagtgaagtcatgtattgtaaactgtccctcatgtgttctgtgctctgaagagcatctcatgacatctgtggaagggcatgtgatctgtcagttctacttagaaattgcattaagacccctaacactgaattggaacactttccaaagattgtacaaataaaatttgagtacacaagctgaactccatattttaggaattcataagattttctagttactagttaccagtgaataaactgtcacttaatatttgatttcaggtacctttgtcggtttctacagctttatttgtttttaatacaacttatgtttgcctttttctaatatttaatgcattatttttgccattttagatgattacaaagaatctgctttaagattagtctttgttcctaggatctgcatctctgatctgtgccaaagtatctgaaaaacttagatataaaccttacgctgtacagtactagtgtctgggcataatcttccctttgaagtttgtttgcatccccctagagggattaattccctgctgtgagaaggtgggttagaaagcactgaaactactttatgggtctttaattggaggatttagtatacattttgttctataaacttctgtgggagtttcattcttacaatttttcttatactgtggtatgttatattttcattgtaaattaaagtacatatactcaaatttttcttgttatttagtgcatactgacagattatcctggtgtgtgtgtttttttccatttgtctttaaatttttaatagcttgttttctgattagttcttgagtatgtaaaattttaaacttcttggaaaatgatgaacaagagaaaaattatcactcaataactactgttaatgtttcagtatatttacttccttattgtcttcttttgtgtgtgtgaatgtgtgtgtaaataaaatataaaaactttttttctgaactctcagctrtatgtgttttcctcactctctccaattattcattaagctttccctaaaattattaatgttgatttgcagaaatcattttagttgctatgaattattacatcatgtttatgttctacatttacttataacggaatcttcaggttgtttccaaagttctcttgttataaatgatgtagtgaacatctttgtgtataatgcttgtcagtttatgtatgtaatttaaatgcttaaaaaaagtcatatcattttgaggagatctttgatctactttgttcttaatttttgtatgcttatttttttttgccacacttcattttgtgactccaattggtgtattkgtttaagaacctacctttacatagggatcccagaaaatcaagacagttagctcaaattgcaaaaactctgaagtctgaattcagtctgtgcgaccaaaggtctcggaagagggtgctcttgtaagagagatcagcctgcaaggtcccatgatcagatgrcactggccacacaaaaactctggaatgcatttcaaacacaagtgtctcattacagctggcatcttagcctgcagcgggcactcttcttgggcagatgcttagcactgggagactggcagcatcaggttcttcagaaatgcttggcagaccagcttcctcctgtgtctaccccacatccccctaccccaacccccagcattttcagtgcattagcccaatggccactttttaaaaagaatggggtggttaggttgagaaactgtcggggaactctgaaaggcatgcctaagacatggtgctttggttgctgagtttctcagatacgtgggtgttaagcagcaacataaaaaaaaatctttgcttagaatctcttaactaactatacacatttctatattagcagtatcatgaagaaaactgagtttttgctgacttaaaatattgagagccagatttgttattctgaagtttaactttcattttacaggactgtaaattgtggtctaggagcttcacctgaatatctgtgatcacaatggatactcaaaattattagacatttttaaaaagctgatttaaaaaacatgatgctggctgggtgtagtgtctcacgcctgtaatcctagcactttgggaggctgaggcaggtggattgctggagctcaggagtttaagaccagcctgggcaacatgatgaaaccctgtctttactaaacatacaaaaacatagctgggtatggtggtgcatgcctgtggtcctagctactcagaaggctgaggtgtgagatcacttgagtccaggaggtagatgttgcagtgaaccaagattgtgccactgcactatagcccaggcaacagacctagaccctgtctcaataataataataagattaaaaacaacttgttgtctcctgagaagtggtatggcggggggagctcttttgagagtcaaattttattccagattaaaatgttctagagagatattaattaaattcatcttattttttttcagtaataatgacagtgaatgacagcaagcttgaagaatggcaatagaatagctaactttccttgagtccttattatgccccaggcacttttcttaatattactttcttaaagctcgaacaattctctaaagatggctcttatrtttgaggaaactgagactcaaagaggtttacttgcccaggttggacaaccacaaagtcgtagaaccatgaaaaaatagctggtgaggccagccacggtggttcacacctataatcccagcactttgggaggctraggtgggcggatcacgaggtcaggagatcgagaccatcctggtcaacatggtgaaaccccgtctctactaaaaatacaaaaatcagctgggtgtggtggcatgcacctgtaattcaagctactcaggaggctgaggcaggagaatcgcttgaacctgggaggcagagattgcagtgaaccyagatcacrccactgcactccagcctggcaacaaagcaagactccgtctcaaaaaaaaaaaaaaaaaaattagccgggcatggtggcgggcacttgtaatctcagctacttaggaggctgaggcaggaaaatggcttgaacctgggaggtggaggttgcagtgagccgcgatcacatcactgtattccagccggggcggcagagtgagactccatctcagaaaaaaaaaaaaaaagctgattaatattacctgtatgtgcagtggttagaacagtcagataaggttaatgtgggggcagataaatcaggattgtacagaaaatcaggggatatgtggttttattcatgaactatacaagggattcttatatttgtctgttaagtcagcacgattacttcagctattctatattttttttatcttgcattttccagtgaaagtgaatccatcttatggagtgttagggctgggccctgattctttttttttttttttttttttgagacagggtcttgctctcatcacccaggcactcttacataacagtttcaatggcgtgatcatggttcactgcagctttgaccttccagacttaggtgatcctcccacctcagcctccccagtagctgggactacaggtgcacaccaccacactcagctaatttttgtagagatagggtcttgccatgttgcccaggctggtcacgaactcctgggctcaagagatcctcccacctcagcctcccaaagtgttgggattayaggcatgagccaccgcacctggcctggaccctgattcttgatactatagttgggrcaaattgccactcactcaaaagacatggattgttaaaaacatttttgtaaattttcctggctctgagtacttgacatgctagttagaaaaagtcttgtttgggatagagatgtggaaattcatctaactgtgcttttttcaactgattttaaagtcagggatagctgacttgtttagaaaaagaaagctttactcaagatatcactatgagcttgtaatatgctttgtctctttttctcaagattgctgtaataatgattatttctttaaactggaggtgagcctaatgagagctcattataataaaattcttgcccaccacctaatgaagtaagaaatattattctaattatataggtaagaaaaagagggctccatgagcgcagagattatgtcttgcttgcacttgtatgctttggtagctagaagagtgcctggcatacrttaggccctcaagtatttaatgattaaatcttagagctaggaagcaacttgtccaaagaacagagtgacagagttgggatttgaattctagtgtgactgtattctttaaagaaatttatgaaagctatcacacaaattatataatgcatatgtatgtatacagtttaaagaataaatgaaaatgcacatatccaccactcaacttagaaaacagaacattttgtatctttgagtactccatttatgcctctctcaatttgcctttctctactgagatcacattttgaattttacgttaattgtatatccctgcttgaagcttgtgctttttatatactatggtgatgctctaaattggttatatagaatgagtttgaattgctgttcttaggaagtaacaaagtgagccatatattttcttttcttaatgcttagttatttgaagcagatcccagatttcttctttttcctaaagtgcgcaatttaggggccatctgggtataaattatgatataggggagccttagaatttttgctttattcatgacactgtggttcttcttgctgtgttagtggttcacagtattaggcctcaggccttctatggtggaccgggaattcattgatttactaaactttgaaatccttttgagcagtgagtttgttgaatttttaaaattccctccacatgccaatctcagagcctcattttctcaactctaaaatggggcactaatagtacctrttttagttgaaagattaaatgggagtgcaccatgcatgggacatggaaagttctttataaatgggagctgttattttaacttacttttgtttaaagcaagagtttatatctgtgtggaactctgctactcagcaactgttatcaaattgacataactgaaaaacagaaagtaaargtaactagacaaagtagatttctcagagtctatccattaaaacttaagttctttaatcacagaaaagccctcagcttatgccctgagtgcttcagtatgccgggaagatttctctgtgcaayattgctcagcagttactgatcgtgtcaatgacatcaatcattgcatcagtcaggatccttttcactggaagtgacagaaacccagtgaaatccgacttgaacaacaaagggaatttactggctcttaacactgagaagtccagtggtaaaactggctttaggttttgctgaatctaggttttctactcatattttcagaaattttccctatctcttgattctctgtcttctgtgttgggttcatttctgggcaggtgctccctataaagtggcaaagatggttatgaataaatccaagcttatgttccatcagtttaacacccaaatagaaaaagagtgtcttacagtatcttgagccatagtcccaaggctgactctagtaggccctgtttggatcacgtacccattcatgaaccaataaccatgacttttgagttgttgattggaggataagggagtgtgttgggggagcagggggagaactgggggagctgttcaggaccacctggatcctatagcctgagaatggggcagggtggttcctcagaggaaaatctggtgctattactggaggaagggagaacggatgctgggccgccaaaacagatgtctactgcagccatcaagaaaatgtttgattcaaaatattctttccaaaaaagcagtgagataataatgaagcttggaaacatttataactaaaatgatttaaatcaagttttaatgcttaaaaatascgatcttcaggtttcttgaaaactgccatgtaagactgatttccccaggagtctacatgcccgaggtcttattatcacacttctaaatcattaatcacctattctttgagtgttcactttagactgtgctagactctgtagagagtggaacgttcaccctataaaacaggaactagacctcatgttttaaatgcttagaagactttttttaaaaaaacctttaggaagttacattctagcttttgaacttctkttggtattatttcacaacacattttgcatttccttctttatgttacattgaaaacatgcagtccgctcaaaggctttctttagaaaaagaaagctttactgaagatatcactgtgagcttgctttgcccagcagaagactttaataagttgctcaatttaaagacagttttcttacctttaatatrttcttagacattagaattttctgctatcacgaagccttatttgaggagaagatagatgcagataaattgctgtctagattataacaatgtccttaattatctttgaataatttgtaataaaaacagtataatggccagtctgtagactttgaaatcaaacagacttaggttcagatttcttttgccactcattaattgtttgactttgggaaagctatttaaactaaattctggtttgcccattgtttaagtgggacttctatctacttggcaggttgttttgtaaattagagataatatgtactaaaatgctcagcacaggaagtggtacaaaccagcattcttgtggtgatgtaatttaacgtcacccttaaattaaaaacataaaaaccctaaactccaaaccaaaatcaaacaacacaacttccggaaattgtgctatcattaagaaatgaaatttttgtgatagaatttatgtaaattcctttttgaagggattcaaatattagaatgatagtcattattactatatgaaagatatgacaacttgataaaaagaacactgcctgaactgactaattttctttttcagaaaatgtagaattaattctgagttgttcccagamaaacayactttgggcacatgaataattcaacctatatatttttttcttccacttatgtgtcacagtttaacaagaacccagtgatcaatcctcagctaccagagtttttatttaaactgtctacttgtgagaaagagccagatgctgagaaaataagctaggattagaaatgtattaaaacaacccatttctggaatatggtctaaagtttgtgtgtatttagcccagttttctgtcctcgcagtaatgatcctgatactcagaatgatagaattgacttcttgaacataaagcacattttccattggtttgttaggttgtgcttaccatgaaaggaaaagtgacaaaagtatttgggaaagattttatacacagaccaaaatgaaaaatattttcatcatggcygtccaggaagtagaaaatcagctaagtgctaagtggaacattcatttcctctttctagtattttggttaacggaaatacatccccccaaaatgcccccaaaatatagttagagaaatttggtttagaggatggtttctagagtcaggtcatgtgggtcaaaattctggctcccctacttaggacatatccctgtgtaattttgggcaaattacttaatttccttccttgttttagttccctatgctgtaaaatggggataaatggggatgatgataatatctcatattatcatcacatttgaggattcagaaacacagtwtttaaagaattaagcacagggcatggcacagagtttctctcagtttgaactatcatgaagaaaaacatgaaatttgttttgatccttcaaactggaaattgaggatcatcargagtctgccctggggggacatcccctgatcctgtcctcctcattctgagccttctcattctgcacacatggtggaggggccctgggaccagtcctaaggcagttccaggcccagggccttgggaatgctgctttaggtttctttcttacctctaacagccccagcaagtccagtttaggctttaaaaaagttcttaatccctggggtggaccctggaacaagctgacctaatttctcttgtttttgctgaatggaaattgagttgacttgggttttatttaggcttcgtggggcctgctgcaggatcaaagctcaggtctagacccaattgaagttgagatttagatttagagctgaccactgctacatttttcacttcttgttttgaaagcttttttttaattacacagtttattcagcaatatttattataaatgcgaaaggtgctggggatgggtgaggacattccagcagaaggaagagcatctgcaaagctatggagggatatttaattttctttttattaatcaaaaatatgactcaggttctgattagtatgtagggaccctgtacagtcatgctcagtctaagaatatcagctccaagagggcaaggatcatttacttggttcactgatgtgtccccagcacctagaacagtgactggaatgtagtaggcactcagtgtgtatttgttggaccaataaatgagttgacacaattccaactgattgcagagaacctagatattttgattcatctccacagttttattgttgataaatatctcatttccagtaggttgaatggctactccatttgctgtattgtttttttaatggaaattcatgggtaggtctagggggagggcatttatattagcggcaggagttctgctgcagttttctctcccgcgatttttctggaagatgttattctgccttttctatgagcagacgtgcttaggacgaaaagtttaaaggaaggcgctctcacattcgtctccctgggcgaggaatgccttttcctccccatttaccaagtgtccatcagacttcccacagtacaatgaggcatttaccccgggcctcggcgtcagcctgtactttttacattttaggctttttctgccacccctgggaaactgccctgtggtctggaatcatgggaatttgtgtcactaaaagctgtttccccaccctctcctctagcagaagcagtgtgtgtatacagcaggaagagctttggacttgggttttaattatggctctgcaactaatagtgatctgaccttggggaaattattcatctttttttggttgaattttctcatttgcaaataaaacttggataatgcttatcttttagaattgccatgaggattaaataaaatactaatcataaaataattaacagtgcctggttagttttctttcttctgtcacatcaaatcattgttttccactcttttagcttcttggcacaaaaggacagctatattatttttcatagtgtagaggactatagagtctttgaaactctcgataatgattttctgtgtgttttttttttttgagtgaagcaatatggagttttgttaatatattttcaatgacatggaaacagtcctttaaaaaaaaaatctcatatatttaatttaaaacttttccagactatgaacctaaagtcaggatcttcggatatagttcttgtgcccatactcagcttcctatagaggacatagcatgtttaagctttggggagagagagaaaaatatatgtgtggtgaaagagatattttagcctgcttttgtaactttagctttgctatgcaatgtgccaaaagttatttctccctagggagtgcctctttcaacagtttgcgaaggcagcataaattctcacttggtgttcaaggaagatggtaatacaatttagtacaaccaaagttgttttttttttttttaacttgttagaaaccaaaatgtgattgcagtggcaaatttgtcagcacactcgagtttaacaagtgttcgaaggattagtaaaggaaatgtagtttactctgcagcttttatgacaaagaatttaaaaggttttgctctaagccccaccatgtgtttcttccttttctccaaaacatacctttaagttgaaaagagagatgaatctcttagggagaaactattaactctgagggagtttatcattgtttgagaggaagcagagcatttacatttgaatcaactctgagtgtagcttgtgccctaatctcattccttctagaagttggtgaggagtttaagtacttcctactttgtgttctggtcctcrtagtgccatcctaattttcctggggatcatacatttcgtaattcaaagtaagcaaactggacacggtgccttggttatgcatggaaatattttctgtagttgtcaaagttctctaagtagggccattggccagaattgtctcattgtcatcgcacttattaccatgctaaaaatgctataaaaaagaccaaatactacagaaagtttgaaaaagagataaaatataagcacctccatcacaatcctattttcaagttttgaagattcccatttgatgtatttgcagttgaggtacagtttaaatgagagaaagcaagatcttaatgttgaccacaaacattttcatcagtttttcatggctgcatcagagttttatagtttgatcaactagctcctgattgttatacatataaatcagctcctttaaaataagaccagttaatactactctcttatttgtggacttctgtggccaaatctttggtactgccttttttcgggggtgaggggtggtggaygggaaggaaggtagaggaacagagagaggctgactgtgccaaagataaactatgttacagatggaaatgtttttttctaagtccaaaatctataagaaaccttaaagtgagccattttctgagatcaaaaatgtgtaaacttgtgttagtgttttgctctgtggtgaatgaaagcaccactactttttaaaaagccacatttatggatctttaggttcttttaatacttgcttctatgttttactttttaattttacttgaagaacattcttctgatggaggatttaggtcatgttagctcaaagaaaatagaaaccatctacctaaagacttggtgggagaaattctttgtatttgctctcatatcttgttagacagctgtgttccggactcaggactggattttgcttttgtagcagctgtgagatcctcaccttacaaacataaaatgttcctgctaaaagtttatttatgtgactagggaccatcattgaaacccatcccaaagaaatggaatgtatataatatactttatgggtgtcagatgaagaactcttgttggagctagtgtttaattaaacccaatggcctttaagaattaaaaaaaaawttttttttattaggaattagtacgttagagcttggaagtagcttatgttcattccttagcggttgggacaagaattttgcttttgctgaaagagcctgtgtagtatggtactagcttaaaatgatttgcctggcatttgcactgggcatatttggaaaggaaagcctctttgtgttgtgcatttaaaaaaagtgtctgtaagtgtgcttagaaaatggcagcatttgctggtcttggctgtcaatgtcttgctgctcctaactgtgtttaaccagaaagggaaactcagagtagaaaaagtctcactcccaagactttacaagaaaacccctctttgttgatttatatatatattttttaaaggagcttgacatcttcatcaagttcacagtgggcttgctttgtttgctttctcttgaatgcttgataagatttttcttctattgttttgtgcagcaagaacagatctttccatggctggggtgggttttttgtaaatccacaatatggtcattgtctggtggtgaataattgtggctgctttttgtacaaccagaactaaggctttggctgtgaacagattccttcttagcgtgaaaagggactaatccatgtaaatacagccccaaaataaagctttacagaaaaaggggaaggccgctaagcaggagggcacaggtcagcaatttaacctttaacctaacaaataagaagcatgaaagttccagaattggtttacaaaagaaagctcctgtgatctgtcagtttttcttttcaggagggaactgggtgagagatctgactgacagctagtgccttttaactgcagactgaaattaactgccaaattgaaacttgaatatttgaaggagaatttttcttaaataaattgagatggcagaataggccttataagcactggtcagggtcttacatgggatttttatcctggaagggggttgggggaggaataggcattggactggactaccttaagatcccttccaagtttgataaagagaatgtggtctgactcttactagtcaaattagacatgaactttgcagtttaaggccagatgaaactccccttccgtagtattatcactgattaccctttgtagacttttcatggcttcataaattaattgcagcctttactaaagatttaagagctttttgtaaatgttattgatgttttccacaaaacattaattacgaaaagatagccatcttgagatttcacaatatgcacaacttttatggcccagtgcattatgagaaactctattgtgtggtgccgagcactgtaaagcggaggacataggctttctttcatgtactgctgttttgttccrcatgcttaggcattattagcagatacaactgagtaagctaaagcagcagagatgaagtataggtgtttattaggcaatgcactggggaaatgggaagctgtgaaaaatgagggactgccttgtctgttccatgggcttgaagagttaagaaaataaggtttgtgtagagtggtaagtcttacttttgtgctgttgtactcatttacaaactttgcaaacagtttgtatttatttaatcacaataggtaatcttgttaatgagtgttagtttttgcttaaagcataagagatctgatgtcagctgttctatctcactatggagaattctgtaactgatagaaactttaattactgggaatcattcagattaaaaacaaacaatgaacgaatgactagagtaggctccctgtagaataatagaataatataagaatagtcattatactatgtaacaaaacaaaatgtcaggggtgattctgttttagtttttcagttgtccatggtatatttgtctaggttgtctaaaatttgttctaagggcttattgacctacctcagtttccctaaagtatttagagrccagagacaacrtaacgttgcagattaaaatgagcataaagttaagtggccaccctcacttagctcaggcgtgcaccttctctttcctagctgattaccatggcctcctarctggcctttatgctttccttcacatccatatttaatgctgtcatctcagcaatcttttaaaaacacagctgagaccacaatattccctttgtaacacctttctgtggtcctctgtcaccccaagctaaagtcaagctcattagcagggcaaatgaggtcttccatgctccatcctttcyctatccagcttcatcttagtccactcctctcctctccttttaaataygcatttcccaatatgtctcaaccaaatttcatacattttttaaaatttccatattatatttggcttcccccaaatgtaagaaggtctaatatctttaaaatggggaatctaatgatgatggctttgcaaatggctagcatttgtataggcttcacactttgtaagcattcccatgttcttttatttaatcttcacagcaacgatgcagaatgggcaatgttttctgggagatgcttgatgaatatttggatggatggatgaataaatgaatgagtggtgcatggagtcagaaaactggagttacagtccaaattcttattaaccatgtaattttaaataggtaatttaacctctctgaacctatttgctaatctgtaaaattaggtctatacctgcattgtctgtcacactagatggcaaaataatgaaataatgtgtagtaaatagaaataccattcaaaatgtaaaccccatgcaaatgttagttcctgttattaatattcttaatttattccaggtcctgtaaatgaagagaaagtgttcatggatatagatagatttgtgttttaatgactaaaaggacatcagaactgtttttatttatgtagaaaagtgtaagcctattttgttagcatacagaaaactgtatactattgtttccttttataaagaaaatgtcaggtttatactgttagtaagtgctaacaaaggtgcacatactgtatggtaggtggatgttcagatacagtatctagaggttcctttttgctatgcattcttcctggattggttctcaagaaccttagggctatgtttgccttctagctctgtgaactacacatgactattttagtatgttattatttttgtatggatttttttggtatgcatttttgtatgctattataatccctggcataatctttcctccttttattttccctttgtccttacaccctcggtttacatgtgtatttttaatcttttaactataagtatttttgtaagtcatttcaaattgtttatggaatgtggtggatgataaattctccaagtaagatctcagtcacacttggtttctcctattgcctacagactgatcatttctcagcttgtgtctttggccctgacttccragtgccagacctgggtcctcagctctctgtccgtagctgtttctccatcctacatgggcatctcaaattgaatttaacctcctcccctcgaccaaccttttacccccactgccagtcacctagcaaaacaaaatggaaacgccgatcctaatcctaaactgttccttctatccacggtcttgttgaagggcatttgtacccactcacttactaatgctagaagcctgaaagtcaccctagactctcaccctacatccaattaaatctgagtattttttaaagatttaaaaaaagctttagaaagattttaaacaatatcaaagttacagaaaagttgtaattgcactgcaaataattttttcttctgcacaatttgggaataagttactgatctcaacctcgactacgtcagtcgactaygtcgactactgcaaacaaggtgattctcctgcacaaccacaatgtggtatcaaagtgaggaaattaacattgataccgtactaccatctaattctcagttttggcacttgtcccagtaatgttctttaaagcaaaaggattctgttcagaatcacaaattgcgtttagtttatttaatgtttctttctttcttttcttttttttttttttttttgagayggagtctcgctctgtcgcccaggctggagtgcagtggcaagatctctgctcactgcaagctccgcctcccgggttcacgccattctcctgcctcagcytcctgagtagctgggactacaggcgtccgccaccacgcccagctaattttttgtatttttagtagagatggggtttcactgtgttagccaggatggtctcgatctcctgacctcgtgatccacccgcctcggcctcccraagtgctgggattacaggtgtgagccactgcccctggccagtttaatgtttctttagtctcccttaggaaaggttctcagtctttccttgactttgatgaccttgacatttgaaggttacaagcctcaatttgggtttgtctggtgtttccttatgattaggtttaggttgagcatcttgagtggaaatattatagaagtgatgctgtgcttttcttgttatatcacataatacacaattttgatttggccctttactggtgatgatcttttgatcacttgattaaagtagtctttgccaggcttgtctactgaaaagttcctccttacttactcctttttaattaacaattgttttgggggaaagtactttgaaattatgtaaatattccatttctcattaaactttcagtttatttgtttatttgactttggacttactcctttcttattcaaggttgttactgaattgttcaaattatttgagtgaattgaattattcaatttgttccagctttgatcattaggagccaacttgaagggctcttgtgttcttttgactggtcctcatcattctctgggttctcctttgctttctggtgcaagatgttctgtgctcatcwtttagtttcttttccttagccatgaaatctgccattttcccaaggttccttttggtggagaatgctatttaaaagccaaaattttgattctatgtgtgttcattgctatggtggtgttgctgcttctaggccttcttggtggtcagggtcagagagtacatctatatgtatttctgcatctatctgtgtatattgaaaagtgtgagtccacaccagtacttccgatttcaaccaataccaycgattcattcaagttttctccctttccatatttgtaacttctctcttcaactgtgagaagcctggttcccattatccttaatatatttacttattaatcccttgtacatgactactctgtcatcatggctgccaccaatgcctacccagtgtggatgtcttccttaactcaattggggctctgataccctgtgtcgctctgcctcttctgcctgaatgcccacctcatccaccttggtctttgacaagccctgccaggctggtccttctgtgtgggtgctctcttcactttgaattttgacaccccgtgcatggctgccatgtccttccatgttgttccctgcataatcctcctcaggatctgacaccctatcaggtggcccctgcatggaaagttccttaccctgctcaggtgctctgacacctcacaccagatcatcttttaacatggacacgcttctcaaactgcgttgacactgacaccccctgccatgcagctgttccctgtggatgactgtgtatccctgcttgggctttttctccccacactagttcactctcctctgtgggcacccttgtcacaattgggttctgacaccctatgttagattactctagacagtgtgggcgctcttctcgcactggttgcactytgagtccccatattgtgcaagccctcctatgtggatgccatccttacctactctggactactgtggctacttctcaccaagtatggacgtgtacctcgacttaaggattaaattgtcaattaggaagagaaagtaaagtctaatttcttgatcttttcctatgtttttttctcccttgttatccaattcattgccattgacttagttctggccttccttattctttcttggattactgccacttaattggttttctttatttttgagacrgagttttgctcttgttgcccaggctggagtgcaatggcgcgatctcggctcaatgcaacctccgcctcccgggttcaagcgattttcctgcctcagcctcccgagtagctgggattacaggcatgtgccaccatgcctgactaattttctatttttagcagaggtggggtttctccatgttggtcaggctggtcttgaactcccgacctcaggtgatccgcctgcctcagcctcacaaagtgctgggattacaggtgtgagccgccgcacctggacacttaattggtttccttagctggagtcttatcccttccaaccccttttcttctgtcctgctgtcataatgtgtgttttaaacaaatataatcatgccagtcttctgcttaaaccttataatgcctcttcattacctacagggtaatactcaaatcttagcgtggcacagaaggctcctcatcacttggctgacctctcctcctttgtcgctcactactgcctgtcattgaccttctgcactagctgagccactttagtctattttctttcataccttaggatctggtctttctcttttctgtacaatactctttctccctattttcctggtttatttccattgtcctttataacttagacaaggtgccacctcttttaggaggccttctctaatcctccatttttttctgtctacccttgcttccccctctctgccatccttcacagacttggttagataccctccctcttggcaccctgcatatcgtattataattgtcttttctgtttttcttgagggcaggaaccttcttgcttgaattctcccttgaagaataatcstattcagtaggtagctagctaaatgaagagatatttaaaaatatctcattcagtggaatttgttatgtccaaataagcaaggcaatgttagtatcagttgtttgtgaggcttttgaaatagctccatttacatagaactggacattataattgtgttttttagagtggagttttacctatggttacatttacttctagagtatctccagggacttatcttgtttttcttagcaaggtagaaaagagatttagagtatatgaaggatcggttcattatcttctatttcccttccactgcatttattaccactttgcatgcagtaggttgtggcaatgtctggtactatctcggtagctgataagatgaagatatattcgaccaagagacagaagaggagagagaaacttcatgtgaactggtaaccatttgcttaaattgattaaatcagttgcttcattttttatttcattttacttatttttatttttatttttttttttgagacagagtatcactctgtcacccaggctggagtgcaatggcatgatctcagctcactgcaccctctgcgtcctgggttcaagtgattctcctgcctcagcctcctgagtagctgggactacaggtgcatgccaccatacccggctaatttttgtatttttagtagagctaggttttactatgttggccaggctggtctcaaactcctgacctcaggtgatccacccacctcggcctcccaaagtgctgggattacaggtgtgaaccaccgtgcccagcttcattttttatttttttgttttactttgctttctgggtcattttgaattttatttttaaatctgagacaaaatattaaacatctgggtcctattacatgtagacgttctttacaaatgttgtgattgggatcaaggaacagtctgaagttcccgggcaggagaatcagctgagggctaggatgaatgttgccatttgtgttgagagaccagcaaggttgatttttgccagcagaaatgtagaaagaatgatcttgctcaaaatgagttaatgcagtgggttaaaaatgaatttgtaaatactttcatctgcctcagttattgctgcctaatatttgtttcacccacggtttctcttttcctgcaaattatgtgtacagtgtgattgactttctaaaggtgttgatatatactaatatatcctaatattctaaaggtgatgatacatatattttttttcccatgaaaatatcttagaagtaggtgtattgtaatagttacctaaaggaaatgcttcttaatctgagacattttccggcccattgagaggaacagtagcttttttgagaggctggcatctcaagatagaaagatgtctctaagtattgccctggagtgctactgaatgatttctttactctgtcattgagcccttattgtgtcaaaaaacaaatctcttggagaccctcacagaaagatttgtttcctaaaacctgagtgctagctagagctcataatttttgtgtttttttgagacagagtctcactctgtcacccaggytggagtacagtggtgtgatctcggctcactgcaacctctgtctcccaggttcaagtgattctcatgcctcagcctcccatgtagctgggattacaggcgcctgccaccatgcctggctaatttctgtatttttagtagagatggggttttaccaggttggccaggctggtctcgaactcctgaactcaagtcatccgcctacctcaccctcccaaagtgctgggattacaggtgtgagccaccacgcccggcctagagctcataatttcagtctcctcaatttaaggggtttttacaaaagtgttccaaatgaaatattttctcccccgcttctattcttttgtacaacagttgaggagtcaacctatacttgccttattgataactgatcactggttatttataataaaatttaaaggctgggcgtggtggctcatgcctgtaatcccagcaytttgggaggctgagaccggcggatcatgaggtcagaagttcgagaccagcctggccaacatggtgaaacctcgtgtctactaaaaataataaaattagctggatgtggtggtgttcacctgtaatcccagttacttggggaggctgaggcaggagaatggctttaacccaggcggtggaggttgcagtgagccaagattatgccactgcattctagcctgggtgacagagcaggattccatctcaaaaccaaaaaagaaaaaaagaaaaaaaaaagaaagaaaaacaatttaaaatgaaacatctttggaaggttttttctttctttttaaaaactagttgcactcttatcagccaatgtttttgagctgtgtcaggctattaaaatgcaggtttatagggtggtgttttcaggatgttcctgagaatcagtcctgagtttcagtattccctctgctgctgtggtggataaggtgaacattcttatttttaattgcttagctttcctaaatgtttaactgaggcccgtcgcataagtgcactgggagtgtgctgttatattcattagtgtggctttggatggcctgagtccatgacagactggctttcttcatatacttattcataaattcaaacaagtctttgaaggacttaatgctatggatataaataaaacactttctttttgaggagtttacatctgatgagggaaataaatagtcaaccagtagccatacattatttgggataaatagagacaggcacaaagtgctgtggcagctcagcagaggcagcagggagcaaacagttttatacccagttgctatggaaatctgtgtatcctcagcctccccaaggtccccaaaagtgccatccttacatcagcagctcagacccctcaatctccggaactaaatcaggcttaggtgaggatgagaaacttagatatgacttcttaagtatagcttctcaagtacaggccctctcaatttgtaaactaaagagagaagttaactgttccccgtccctaccaccaccactcttccccagagtgtaatggcgggacaggcagaagataactgccgaagacactgattgtttaaaagggggccagcaggaggcacgttggagcacatagcactcaatagcggtccccaaatacgctgggcaaatgttggaagtttcctgatggagactcagtcctgctctagcctgagagtggctcaccatggctcttagttctaccttctgggcttttggattctgaatcgtccttctttaaataaaagagaacctgtgtttgcaactgagtggtttctcagcctgcttctggtctgtaaagtttagtgagtcaacagcctattgttttttcatttgtattttctttgttcctttcagtccaggctagctgtgtttctccccgtaggagcctcttaaaaactcctttgttgtcctgtgaatctgctggagtttactccttgacataatattcatacccacaaatgtctttgagataagcccgccttttctactttggttttctagtgagaccactgaggaacaacagttgtaagcttcttagaagccctgttgtttaactgaatggttctctatgatggtgccaccttaggtcttttggaggtcttgcaaagaattttaaaatcacccccttagctttttcttatcctaagagtaccctggatttgatctttacccagaggccatttcgtaattttaacatcatttattgtctggagaggctagaaaggagtaaacaaattgagttctatacatagaatagtagtaataaaaaggaacaaggtattgctatattcaacaacatggatggatctcaacataattatcttgagtgaaagaagccagacaaaaagagtacatactttctgattccatttatataaaagcctagaaagtacaaactaatgtatagtgacagaaagcacaccagtggttccctagggatgggtggtggggagtgcagcaggagggatagattacggaggagcacaaagaaacttttggggttgattgattgtggtgatggtttaatggatgtacacatatgtcaaaactcatcaaattatacacttccatgcttgtgttttcttatttttttttcattcttgtgttgaagacgtgtctcttgaaagcaatatatagttggatcttttaaaatccagtcatcttacctgtattttttactggaaatgctttttatgcttcatttttttattcctttcttttggattatttaagcattttaatcattcaattttttcccttttatcatttgggacttaaatactatttctgtgcctttaactgatacactgaaaataatggtggctatgacttagtagtgcttattttataccagtcattgttttatatgctttacctatattaactctyttaatcatcacaaaaaccctatgggatagatactgttactgtctcaattttacagatggggaaaccatggcatggcgagcttatgtaatctgtccaaggccacagagctatcaagtagtagggctgggatttgaacccaggtcgtgtgctttcagtgtccataatgttaactaatacaggcatacctcagagatattgcaggttcagtttagttgcagaccacaataaagtgaatagcgcaataaagtgagtcacaaatttatttggtgtcccaatgcatgtaaagttatgtttatactctactattgtctattaattgtataatagcattatgtttaaaaaggtacatatcatgatttaaaaatattttattgctaaaaattgctaacaatcaacttgtaatctttttgatcgcaaacgatcttgtctaaatgttgatggctaccggctggtcaggatggtggctgctgaaggctgggatggctgtggcaattttttaaagtaagacagcaatgaagtttgctgcattgattgactcttcctttcacgaaagattactctgtaggatgtgatgctctttaatagcattttacccccagtcgaactccttttagaatcggaaacctctcaaacgctgctactggtttatcaaccaggtttgtgtaatattataaatgctttcttgtcatttcaacaatgtttacaatgttttcaccaaaagtagtttccatctcaagaaaggacattctttgctcatttgtaagaagcaacttctcatccattcaaattttatcatgagatcgcagcaattcagtcccattttcaggttctgcttttagttctggttctcttgtagcttctatcacatctgcattacttcctccactgaagtcttaaatacctcaatgtcatccaggagggctggaatcagcttcttccaaactcttgttaatgttggtattttgacctcccacaaatcacaattgttcttaatggcatctagaatggtgaattctttccagaaggttttcaatttattttgcccaaacccatcagaggaataactatatattgcagctatagccttatgtatttcttagacttcaaagtcaaaattactccttgatccaggggctgcagaatggatgttgtgttagcaggcctggcaacagccttcatctccttgtatatctccatcagagctgttggatgaccaggtgcattgtctttttttctgagtagtaggtttcaacagtgggtttagactatttattatgttggtgcaaaagtaattgtggtttgtgtcattactcaatggcaaaaaccagaataatttttgcaccaacctaaatagtaatacatgctataaaatgatgtgctggcatccaggctttgttccatttatagagcacaggcaaagtagatttagcgtaatattatacttaagaaccytaggattttcagaatggtcgatgagcattggtttgaatttaaagtcaccagctgcattagctcctaacaaaagattcatcctgtcctttgaagctggttttgacatctcctctctagctatgaaagtcctagatggcattttcttctaatataaggtggtttcatctacattgaaaatcttttgttagtgtagccacctttatcaatgatcttagcttgaacttctggataacttgttgcagcttctgcaccaggatttgcagcttcaccttgcacttttttatgttatggagatggcattttcccttaaacctcatgaaccaacctctgctagtttcaaactctcctgcagcttcctcacctctctcagccttcatagaattgaagagagtcagggccttgatgtggatcaggcttttgtgtaagggaatgttgtggctggtttgatctgtccagaccactaaaactttcatgtatcagcaatcaggctgtttcactttattatcattcatgtgttactgaagtagtacttttctttttcttcaagaacatttcctttggattcgcagttgggctgtttggtacaagaagacgaactttgagcctatcttgactttcaatatgccttcgtcactgctaagcttaattatgtttagcttttgatttaaagacatgcaactcctcctttcagttgaatactcagaggccattgtagggtgaattatgggcttaatgtcaatattattgtgtctcaaggaataaggaggcccaaggaagagaaagatgggagaatggctggttggtggaacagtcagaacacacacacatttattgacgaagtttgccatcttatatgggcatggtttatggcaccccaaaacaattacaacagcaacatcaaagatcattgatcactgatcatcataacagatataataataatttaaagagtttgaaatattgcaaaaaattcccaaaatgtgacacagagacakgaaatgacttgctctatccagggttgtcatatactttcaatttgtttttttttttttttttttttttttttttaaagcagtatctttgaagtgcaataaaacaaactatgcccatacaaatcaacagtttctgagaaatttttgcatgtttatttaactttaattggcrtctttaccctcctcctggacaatacaagattgtatattgttttgactttaatcattcccctccttgtttatatggtttttattgttgtgtattttactttaaacatgtaagatattattgatttttttatataaccaatgcttgtttagatttatctgtgtattttctattttctttgttctttgttttttatttttttgagatgaagtctcgctctgtcgcccaagctggagtacagtggggctatctcggctcactgcaacctccgcctcctggttcaaacaattctcctgcctcagcttcctgagtagctgggattacaggtgcatgccaccacgcccagctaatttctgtattttcggtagagacaaggttttgccatattggccaggcaggtctcaaactcctgccctcaagtgatctggccgccttggcctcccaaagtgctgggattacaagtgtgagccactgtgcctggccattttctttgttctttatgtcttcttgcatctcagagttttttcatctgggctaatcttcttgcttgaataatattctttgttagtggcaaatatcttagttttgtttatctgaagatgtccttattctaacctcatattggagatgtcatttcgttgtcttctggcttcctatattgctgttgaagtccctttccattataattaatatttttgtgtcttgttttctagtttagcaatgatatatgtctagcagtggagttttcttcttatatatcttggttaggaccagctttttgaatctgaggacttagaacttcttttttttttggagctttgattacacatatgtctgacattctctttttgtcctttacagttttaaaccattttttttgtgtgttttcaatctgtttctctctgatatattcaataacttcttcaagtctttcttccagtttactagttctctcttcagctgtgtctaattgcttttaaaaccatccatttatggccaggcacagtggcacacaccagtaacctagcactttgggaggccaatgtgaaaggattgcttgaggccaggaattcaagatcagtctgggcaaatagtgagaccctgtctctacaaaaatgaaaacaaacaaaaaacccattgatttagtgtttaattttaattatttttaataagtttcttgagatattcacaaaccatacaatttgcccattaataaaagatataattaatggttttggtatattatttaaattgtggagtaatatgtgtatatataaaacaaaatttgccattttaaatatttttaagtgtaaatttagtggtattaattatgtttaacactgttgtgcagccatcaccactatctgttattaaaatcttttcaacacctcaaataaaaactttgtaatcattaacaataatttcccattttcccttccttcctaacctctggtatcctctatcctattttctgtctctatgaatttgcctattctagtttcctcatataagtggaatcatatattatttgtccttttctgtctggtttatttcacttaccctaatgttttcaagctttattcatgttgtagtatgtacagaacttcattcctctttatggctgaatatttatccattagatgtatatactgcatgttgtttatccattcatctgttgatggacaatttggttatctccacttttcagcaattgtgaataatgctgcaatcaacaatgtcattcattgttggtatatgtttgcatttctgctttcaattcctttgggtatatacctaggaatggcattgctggatcatatggtaattctattttttagctttttgagtaactgccaagctgttttccataacagctgcaccattttatatagccaccagcaatgtgtaaggttccagtttctctacattcttgtcagtggatactgttgtctgtctcttttattatagccattctagtggggatgaagtgacatatcattgttattttgatttgcctttctctaatgcctaattatattgagcatcttttagtgtgcttcttgtatattttctgtggagaaatacctatccagtgactgggtcgtttaaaaaattaccaggttataagggtcctttatatattctagatacaaacctgttatcagatatgtgacttgcaagtactttctcccactttgtaggttaacttttctctttcttgattgtgtcacctgaaacagaagttttcatttcagtgaagtcctatttatctaatatttcttttgttgtttgttctttagtatggtacctaagaaaccattgcccatcctaaagttacaatgatttatttctgtgttttcttctaagtttgtttgtttgtttgtttattaggttttagctcttacatttgggtctataatccattccttttttattcctctttttttttttttttttttttttttggagacaggttctcacttggtcacccaggctggaatacagtggcatgaacttagctcactgcaacctcaacttcccaggctcaaacaatcttcccacctccgctttgcaagtagctgggactacaggtgtatgccaccacacccacttaattttttggggggtgggtagggagagatgaggttttgctattttggccaggctggtcttgaactcctggcctcaagtgattcttctgcctcagcttcccaaagtgttgggattaaaggcatgaaccagtatccccagcctacaatccaaatcaagttgatttttatatatgcttataaggaaggagtctaactttattctttcaaacgtagatagtcaattgcccctgcaccttctgttgaaaagtattaattctccattgagttgttttggtttccttgttgattttttttttgttttttggagacacagccttgctctcttgcccaggctggagtgtagtggcacaaccttgactcactgcaacctctgcctcccgggttcaagagattcttgtgtctcagcctcctgagtagctgggactacaggtgcgtgccagcatgcccagctaattttttgtatttttggtagagatggtgtttcgccatgttggccagcctggtcttgaactactggcttcaagtgatctgtccacctcagcctcccaaagtgctgggattacaggcataagccaccgtgcctggccccttgttgaaaattaattgacaattgtaattgacaattgcaaatatttatttctggactctgaatcctgttcatatcctaatgctgtactatactgtcttgattactgtagatttgtagtaaattttaaaattgagaagtatgagtcctccaattttgttctttttaaagattgtttgactattctgggtcccttgcatctccatatgaattttagtattagcttatcaatttctgcaaaaagcccagctgggattttggtagggatttaattgaatctgtagattcatttggggaggattgtcagcttaacaatattgtgttscaatccatgaatataggatatctttccatttattaaggtaatgtttagggtttttttccccataatgttttgtagttttcagagtataagttttgcaattcccttgttaaatttattcctatttttcttaatctttttgatgttattgtaaatggaaattttgaatttcatttttgtattgttctttgttagtgtatagaaatagaattgatttttaaaaatattgatctattatcctgcagatttgatgaactagtttattagttctaataggtttttagtgaatttcttaggattttctttgtgtaagagtatgtaatgtacaaatcaagatagtactacttctttctttctattcttgatgacttttatttctttttcatacctaattaccctggctagaacctccaatacagtgttgaatagaagtggcagaaatgaatattcttttcttcatccgcatcttaaagagaaacatttagtcttttggcataattatgatattaattatatsrtttttttagatgccctttatcagcttgatgaagttctgttttgtttctagtttgtttaattttttttattatgaaaggatattggattttgtcagatgctttttctgtgtcttttgagatgattgtgtgatttttgttcatcattctctagatacggcttattacattaatctatttttggacgttaaaccaaccttgcattcttgtttttaaaaattctatcgtaagtactttattttaactagaagatacaatctccaaggagtttcatggtttaaaaagctacaattacatcatgttgtaattacgtaaaacacagtgctgtaatggaactacttgactttgattatatacatttttgcacagccctatggaatatatgcaaaggaatattttctccctttgctccaattaattgttcttgtatagaaattgctttatattccagtatatccagaatggtaaaataacaagtccatccatgttgctaaaggtcactccaagcatataggagatgggccatacctgccatagtctttctccactcagtggtattggcagtgcttcaagttatgctcctacaaaactagaaattgtaatgatctggagactattctcccaaatggctgtaacaccatttctactgaaaactctaagctatgcttttgagatttggttctaacaaacataaggtacagtggtaaaagtagacaaaatgactgcaaataaaaatgtttccaacaccaactcttttagctccatatagaacaaaaattacatggaaggagaaacaggacaaaagaaggtagatacagcatttcaaaaatcaagttaccttgtgtgataatgaacttttttaggggatgcatttggtttcactactaaatataatactagattgacagcagctacaaaaccagaacatatgcacaaccatgtcaagtgtgtttacaatattgagaagttctccaagaagaatgatggaatgaagacacttaggataattgaaaatatgcataaaatatgggtataaagtagttttttgatgtcagtatctttcatggtattttcttgagtggctatctctctcgcttggggaagggacttggggaactactgcatcctactatcatgtgggaagggctgtcctggccctaatgcaggcacccaaccttgcattcttaggataaatctcacttggtcatggtgtgtattcctttttttgtgttgctggatttggtttgctagtattaatatattgagtatttttgcatttttagttttcttatatttgtttgcttttggtatcagcataatactggccttatagaatgaattggaaagtttttcttcatattttagtttttgaaagagtttatgaagaattggtattcattcttctttaaatgtttggtagaattctccagtaaagtcatctgagttcatctgttttggtgggaagttttcaaattagtaattcaatctcttgctataggtctattcagattttctgtttcttcttaaatcagttttggtagtttgtatttttctagagatttgtccatttcatatatctaattcattggcacacatttgttcatagcattctctctctctcttttttttttctgctaaaccagaaaacctagacaaattntgaaagagctgtaacattaatattttcttgctcctctgtatttctgcaaatatggtcctcatggttttttcttttacttctcacctctcatacattgtacttgcagccactgcaaagtaattgtcattttcagatgctgtttctttgtctgaaatgtcttttctcttgcctcattggargaattggcatttatcttcaagataattttcttcatgctgccttccctgattgtccagacagactcagtctttccttcctttgaattctggtgtacttctacacatctgtcaacatacttgtttctttcaaagggcagctgagcatcctgttcaccttcttttccctaatgagaaacatgggacttaatacaaattgtttcttgggaattgcatgttgaataaatgaatgaggtatgaaacatttcttctgagctctcaacctgtttggatgcctgaaaagtatctgaaattcaaaatgtctgaattctaactcatgatctgctcattaaactgaatgaagctctggtccccttccactgagcagcacatttaaaaaatcaggtatgcaaactaaaaacctactgcyttcatcctggtcacctgccttcctgctcaccctctatattcaatatatcagaaaaatttgattgatttacctaaatatctttaaaaactaggtatttcttctcaactatcattgtcctaaacctctttctcaccttcccccacccaccctgcaccaattccttcaggtctcacttcagacattaaatcatccttaggggggaaccttttcagatccctaaagtaagcttgttcttacactgtatagtcttgtggcagttatcatagcttatagttacattacttgtgcagttgttagtttgcctgagcttctgtactggaccttaaactctgtgagggtagtgatcacccagtattttcttcaccactgtatgaccagatctcaatattaagaagatttagtgaatatttatggaatgaacaaacactgaaaattaggtaatttatgtggaaatgcctttaaaatgaaaattactggagaaacattattttgatgatctcttaacatttaaaataactgtgattagtttattgaatttataattttttgtttgagtgaagagaaattctaaattctcatggtatttaagggtgcatcatcttggatagatccacttattgctgattagtctttgtttactggaattatggaattggtataacaataacaaagtgtacggtagggtctctctggaaagcactatactactttctaaatgacatcaccttggtaattatcacatttggtttaagatttcacttagcacaaaatgggttgcagaaagtcaaactctcgtatatatttaagtaaaggtgatgactttcttcacaatagggcagagatgaaatagcttccacatttgttattctgaatggagccttgggatgaaattccaagcagcagaatgccacttaacattctgcatgctattttgctctttagtagcataattgtaaaatgaggcaataaaaccagaaaagatataatatttatacctgtgtaggcacttcacatgataaaatgtcacacgagactgtttactccatgctggttatttggataacgccccacctgcctagtaacaggcggtgctgagtcttgcataaatcttggaaagaaggttagggttaatatagtgagttcttcagtaggaaaaaaaatacagcatatgtgataataataatggcgactctttgattactatttttgtaccggcactgtgctaggcccttggggacagagtgtgacaaagagggagataatataagtgagtacctttcatgtgtcagctattctgctatacattttacttacaatatttgtaaaacttataataactctgccaggtaggtggtgttatctccatgtatatatgactgattcttgtttatctcataaaaaattctaacgacctcattggagttctgttataattatcatgtttaaactttggtgcttttttttaagtttaaatagtcttttttttttgagacaaaaaaaattaatgagaagagacaaagaaacatcaaagagctttttcctctgattgctgtgttagaacttttgcctgaaaataggttacattccttctgttttcagctgaatcctcattaactttacattttaatgatgtccagggcaaattacaccatttatggtcagtaccttaaagggatgcttaaaggggacttaaaaaaattttttttgagtggtggatgtatttactccaggaatataaattgatccagaattcttgaaaaaaaaaaaaaatagacaaaaacacttgaaacatggggtcgatgttccatttctaactattataacaatttaattcaaaagaaattattttcaccttaaagtaaattaatcattaaagaacatttataatatttgggagtatgcaactggaaccagtgtcctacatttatttttgaaaatagtttcggtttctcatttacttggatttaaattcaattctactgcttagcttcagaaataattcataggtggtagatgctcaataggaataaatgaagacagcttctcccagttatgaaaaaaacaagggtgattgaaatgctaatatgttgatagacagattgtatttgcacaagaatgagggaatctgctgtaaggtggaactcttcacaggattccaaattattcaatttaaaagaacaatatgaactgtggagctgtgctttcattgtaagctttgaatgcttaattattattagatgataaattggaataaagtgtcgtgttgtgtcaaatactgtttatttccttaacaattattggataagtggattaagggaaattggcctgtctgtcgcggaaactgtaattatgagaatgccccatctaacatcatgtattttataaggtttgtactcctgttttttaaatgtgtttaattgaatcccttctgtgtgccaggcagtgggctaatgtccttgttaaggcgtttttgaatacaaggggtggaatttcactaaaactagctcaggaagggcagggatagaggtggagaggtctgttgtacagtgaaggacaggaagcaaaaccagctgggcttcatgaggaccaattggaaccggaaagtcatgcaccagggtggcttcatctctttcatcatggctttgcctctgctggcttccttcgttcaccacttatcttggtaatggttcaaagtggtctatatgatctttcaagcttggcttcccaccgttaacagacactttttgtctgtacccaaggtcgattcgagcgtgtggctcagcccagacctggatggtccccgtggcctccaggtgctctgctgcactgccccttccgcgtgagcagagtgaaacatgtctgcatggaaaaagatatggctcttgcccatgtgtggctttttgtggagatgataatacacctaaaaagattatttctacttaaatgtgctatggacttccctataaataaaatatttccgttatctgctgtatttgcaaactgaggaaacagtgggagggtttgggcactgccactgagtgagggtgaagtgattttctttcagaatgaggttttcctaggtagggcttcctgagggtctaaatccataattggatcctacttgccactgtacaaggaaactgaatgtagaaggaaaaagaaattttctttgttaggttttctttccaggtaccgccttgaatgattgattggccaacatatctaatgcaatttaaggacatttgggaaatctttgggtctgatctattgttactaatgattcttgatatggctattttttttaagttgtccaaatttcagttttctaaggattcagttaaagcactagcagattctgcaattgctcctcaagtatcatcatttttcttataactgagtattgaaatggagcaaagctcgtggctgtaacttaacgtttgttaagcttctatttgctttatatatatgtatatacatattatatatatacacgcacatatacacatacacagacatatacatatatacacagatgaacaagtatgtgtgtattttttcttattcttcctggagcccataagagattaattattgtcctcattttataagtgttacaaaccaacrcacagaaagatgaagtaacttgccttaaggtaatacagctagtaagtagtggattgttgattcgattctaggtctgtactgtgctgcctgtgtctataatagctctgcttaaggttaatggttaggttgtgtttctggaatgctcaacttctctgttggaacaaggttttgcatcagtatgggttggttaaaagcgtaaattctggttctggtacagccagtttataagctgtgtgacgataggatgtacaagttgtttcntatttttaatttataaaatgggattattaatgggtcccatcatagaggtttcataggaggaatgaaagaaatagtacagtctttttgccacaacatgtgcaggagcagtgtcagaatagtgtagaaattgcattggtttatatgttttatgccatcaggttggattagctgaagtcaaagtagactagcactgtttttcttggtctttacatttgggcaggttctccactttctcagtttttttccttttctttaggaaaagaggtgctgaccttgaggtttaggttgagattgccatgatagagtcagggctcccaaattgtgcttttagccttctttatatagtgttgaacaataattttaaaatagtttggtgtctcagttttcagaaaaactacatatgtataacgtttttattcataccttatccctggatagtagtatctggttgaacagtaattttaaaatagtttggtttttcagttttcagaaaaactacatatatataatgtttgtatccataccttacccctggataggtatctgattgtttctgggttatgctaatgcaacaggactattttgaagttgtgttttctcctttaacttgacctggtttgttgaaagatggtcgatcctcttgggggcaggcaagggggtgctaattgtgaagtatctttgttgagtgatgagacactggtgtctgtgaatgtagtggaatggtgggatcgtttgattattctaattgcagacaatctaggaacataggaaagcagcatgcaaaacataagatgcacaggctttatcctcggttgggaggagtttaaatcctgaccctttcttggccagtaaactgacttggacaaggcacttgacctttttggatctcagttttctcatcagtaatatggaattactatccccttcctattttattatcttgagaatttaatggcataagaaatgtaataatatgaggtattcagagtactttcctcgtagtaggtattcaatatatgtttagtaagggaactatagaagataacaaatgtagttgtattgtagcctattttatgcaataaatattccaaaacgttttatattactatttttgtaaattatctgttaaatgaaacagaaagggaatgaacttcttttgaaaaagtctgggaaattttgtaatgtgaataaacaacttttatttgtaagataacattaaaaattatttataaaaatgtatacctgtatacatttttctgtatagaaatttgttatatgcagtaacattttaktatttcctcaaatttgaaatgaatatcatgtgatattaagtcacttaaaaattctctaatatgagatatgaaaaacttagactcaaactataatatattttacttaaccacctttttggctacctttcttttggtattttattatatatcctttttatttttgtaaaaaagtatattagcttttttcttcttaaccgtatttttcccctctataatttgactgaagaaatgaacttgtgttactttttctctcatattaagccaagtctggtgaataaaatacccatagtcaagaaatttgtgtgagcttggctgcactgtgaactccctgatttccttcagtcttgttaattcatatgtgagcccaggggtattattgcccattagcctttcctcatagttattttatgaaagtgcacaattaatgtgagagtgtcgtgaaacctttggagacagtgccctggacatactgaggtarattttgttcaaaatcaacagatagcaccctactgtaatctgctarcagcttgtttatctaattgtcaataaaatttctggttcaggaaagaatttatgttatcctgaaacttaacataccatgtcccyggaaccaaggagaaataataatagtaactgccaaacacctactgtgtgtcagacaccctgctggatactttacacacagatctctcattctcaaattctgagatagcccttcttcctcattttattgagggaggttgagaaaacaacccctaaccatctcacttttgccaggcttcatagctgaagctctccccacttttatatagcatatataccatataccactttttaccatatcctcaggaagcccaaaggacctaacagaagtcagaatgtattttgatggaaagttagtgattcttttctactaatttttttctatcggagtgaacgaagtgtgtggtggaggagtgtgttttgagagtttttgcagtagaaaggtactcaggttttttcttttttttttttttttcctggaaatcaagaggaaaatgcagatatccaagataaagagttaggtaaacgaatagtagtttgtggatagggtctagatgaactagacttctggaaggatcctttgatttttgaaatgtattattatgattggatagttgtgtgtgtggcagtggtgagggctgtgatgagtgtgcttgaccattataaaactaccttcattactagagggacacagattccccccacctctaccatgattgtattgttgaaagcckccttttatcattttgctgccatatgtgtttgtgaaaatcagctgcgttgtaaaaattcttacttcctggaaaccagaaacccattcagctagtgtccctaccctgaccacttcctcttcgttatttctaaatgacagtgctattctggtagcattccaggcgttcatctagctaggattcctttttcacgtttgctatttggtgcattttctcctgttttatttggtttcattgtcctgattagttcaccgagtataatagaagagacatttgcttttttttttttttttcccctctaaagcaagttattttagagggagagtttaccagtgataagagctgtttatgtcctgagcgattgatttgtaattaatgttgcctgggctcttgcctgttggcagaattggtaacagcttgcagtattttttaaattctcttttctttttggtattttgacaatgtcattcatatctcatgaaaaactacctcagacaggttaaatgtgttaaaacatggaacgaaaaggatggaaggagacccagtgctgcctaraaaccttgatcttttgccaaagtatttaaacaatttagtgttttggtttcctagctccaagctgcttctcaaatcccttgctaattaatccagttaatgctttgtagacttactatatgcggtgctttggcttgctcgtctatcattgagaagtccgttttgtttcttggagaaaacctaagctctgttctggtgcagagctatatacagggcttatgacgtgtgagtagtttggggcctttaaaacccgtatgcatgtgtatctatgtaagcatatatatacgtgttctctgcatttcatagtccttaggcttaaaattttaaaataaagacacaaagtagaaaatagaaatcaggtatttcacaccaaaccaatgaactgattgaaagctccctctgctacttgctttgttaattgtgcaaattatttgatgtctctaagcctcaatttccttatctgtaaaatgggggaagataatttattcctcctcatagtattgttgtgaggatgaagtgagtttcttatatacttagcaagtgtccagaacacagtaaagctcagtaaatgatgactgcttttaygattctgttgtgacccttatgtgttgaataaattaacttcttttggtgcttgctgaattgtggaggaggtagattccttttatctattttcttttggcaaaggtatcaaatgtctcaatttgtatcaaggatttaaaaatcaagcatttgttcatttaacagtagtgataataaaaaatagacaactgtattctatttgagcctgttttttttgagacagagtcttgctctttcgccaggctggagtgcagcggcgtgatctcagcttcctgcaacccccgcctcccaggttcaagcaattctcctgcctcagcctcccgagtagctgggactacaagcatgtgccaccatgcccagctaatttttgtatttttagagagggggtttcaccgtgttggccaggatggtctcgatctcttgaccttgtgatctgcccatgttggcctcccaaagtgctgggattacagtcatgagcctctgtgcccggcctgaagctggttttaagacccattgatgtgagttatcaatacaaaagatctttctaaagtctgaaaggtgaatatctctcatttgcttactagaaagcttaggtgcagaaaaatatataggctatttctttttcccagttaaataattacatcaaacatggaggcacattcaggamtatttactgctagtgaagctcatgatgacttttttttactaaccatttctgaaattcatgtattatgcctaaaaaagctcagagtaggtcttgggaattaggaattggcagggttctcacttgatcattataggaaatttcacatttctcccccctaaggaatttgtggagaaaaaaattgtctgccaaaaagtgtaaaattctgattttttttccagctatttgtttttgtttttatgtttagaaaaacttttttataacatgaaaaacaggaacaaacaggaaaatgcagaaatacaagttaacagtttgatggattatcacaaagttaaaacatccaggtcaagacatagaacattagtaagcatcttgccagccatccttatgtgtctttccaaacaccattccctcaattagagaaccattacctttttgtttttttttctttcgtttccttttttttttttttttttttttttttgagatgaggtctcaccatcgttcagaccggagcgcagtggcgcaatcatagcacactgtagcctcaaactcctgggctcagaggaccctcctacttcagcttcctgagtagtcgtgactacaggcatggaccgctcccccggacccccaacctggctaatttcctgctgtgctgcccaggctggtcttgaacacctgggttcaaatggtcttcccacctcaatcttctgagtagctatgattacagtgtgagcaaatgtgcccagctaaaaccattatcttaacttctaatagcattgatcatttttacctgttgttcaacatatatacatggagttatatagatggagtcatgagtgtatttaatattttacttggtttcttttgctcaacaattgtatttgtgagattatccttgtgtgcacctgtagtttgctccttttcattgctatacactattctgtaatatgaatatgccacaatcgatccattctactgtctgtagagatttatgtttcccctttggttttggttatttcaaataatggagctatgacattatagtaaatatatctggtgtttgtatactcccacttttgtttggtatgtacataggagtgaaatttctgggtcatattgtttgtgtatgtttagcataaaatgccaagttttccaatgtggtggaactgatttgcatcctcatctgctgtgtgagctcctcttgctctatatcatcaccaacacttactattaaaggtctttttaattttagccattctgaatgaatgggtagtgtattttgctttggttttaatttgcattttcctgattacccatgaagttgaacatcttttaatgtacctgctggttatttggctatgttgttttgttgttatttttaaggaattctttgtatactctagatacagtttctttggttatgtgttataatttaccttgtactctgtgccttatctttccactcttttaaaagttaatattatttttaattgacatcataattttatatatttatagagtacaaagtgatgttttgatatatgtgtacaatgtggaatgattaaatcaagtgaatcaacatgtccatcacctcacttattattgttattgtttttttttggagatggagtctcactctgttgcccaggctggagtgcagtggcatgatctcagctcactgcaacctccgcctccagggttcaagagattctcctgcctcagcctcccgagtagctgggattacaggcactcaccaccatgcctgtctcatttttgtacttttagtacggacagggtttcaccatgttggccaggctggtcttgaacacctgacctcaagtgatctgcccacctcagcctcccagagtgctgagattattattttgccatatgaatcttcagtaggcatagcactatttattgcaaagatcatcctttctctacttttccacattgccactttcattaatcaaatgtccatgtatgcaggggtctcttcctggtctctttatctattttaccactaccagctgaatgaattattgaagctttataataagttctaatacctagtagactaagtcttcccattttgttattgttaaaagttttttcttggttattattggtctttgtagtttcatataatttttgaattggtttgttaatttcccttaaagtgccttgctaagatttgtattgggatttcattgaattgatataaatgtgaggagatttgattatttacatatttagtcttcacatgaagactatataatgaacatgacagattcctttatgtaatgtaggtccttttgtcatttctttcagttattatagatattcgtgtataagtcttgcttattttcattatatttatttctgggtatttagtgttctctgctattgtaaatggtatctttgaatttcatactctaaatatttgtggatgtgttgaaatacagttaaattttgaaacctgacgtagtatccagcacatttgctaagctgtyttattgattccaataatttatctgtagatattgtatttttttaaacacaatcatgttgcctgcaaataatagttttatttcctcttctaatccttatgccttcctttcttgttcttattacgtgggcttaagaccagcagtataatgtttaatgagattgatgatggcaggatttcctattcttttctggtttttttttttttttttttttttttttcatttttgagatgaaatttcactcttgtcacccaggctggagtgcagtgggatgatctcggctcgctgcaacctctgcctccygggttcaagtgattctcctgtctcagcctcccgagtakctgggattacaggcgtctgccaccacacccaactaattgttttgtatttttagtagagatggggtttcaccatgttggccaggctggtctcaaaccctgacctcaggtggtccgcccccctcggcctcccaaagtgctgggattacacttgtgagccactgtgcccggccctcttttccctgttttgaagggaaaactttccacatttcacctttcagtaccacggtggctrtaggtttttttaattgagttttttgattgatttataactcacatatagtaaaatgaacaaatcttaagcatacagtttgaattttgaaacatgtatacacctgcgtaattaacacctcagtcaagatgtagctcagtttcccatatactcttctctttatttccaattcctttaccccaccagagacaacaactgttctgatttatgttaccatagattagttttgcttttcttaaaccttatagaaatggtattctatagcatttccttacagaaatggaattctcttggttctggcttctttcactcaacataaagattttttgagaatcatccatattgcttcacctatcagcagtttattctttttactggtaagtagtattccattgtataaatattataatttgcttatccatttggatgaacattcaggtgagacacagtttttaaaaatagataacctttatcagattaagacatctcctttgtgttattggaataaattcaagtaggttgtcatgtattattatttaatatattgctgcattccttttgctaaaattttgtttagaattttcacatcaatgtttaaatgagggataaatttcctttcttgcattgtctttagattttagtatcaaggttttactggcctcaaaacgagtgtttcctctttctctattctctggaaaatttggtgtgatattgatatgtgttgttccttaaaaggttggaagaacttactaatgaagccataagagcttgtagttttctccattaaacatgtcttaattatgtgttccctgtatttaatagttattatacctattcaggttttctatttcttcttgtatcagttctttttttgtacctgtttccttgttttttatttcttcttttgccttttattatccatctgtttgattttcttttcctatcttcaatatttgtcactttactttgaatcccttttagctatttcctcaggattttttgaatttatctccttttaccttctgtttctcttaaggcattatctgttgtggtttgttgttgttgttgttgttactgtgttttctctaattggttttcatattggagatgatttttttcttttaagtctgaattttttttgtgagttcatcacctcatttttacatttttgtaattctgatttgtgtattatttcatgtcatgtgtaattttcttaaagtattttaactaatttgaaaggaaggttatggtttttattttgtgttgatgtttgtctatcatgccttcattgtctctagggacattagtctgaatcttactctgctttttctaatcataacttcctataggatcttacattaacactcatttattgctcatttatatgtgaaattagtttttctgaacctttaggaggagaagtaggtagctgttatacttcactgagctatctcttgtaaagttttcctgtgatgcttaaaagcatatgatttgtggcctaatcttgcctggctccgttcccttctcctgccttttcctgaactttttctttatttcagttctgtggtctctatactgttcaattttgattttacttccagaagcttcactttgctgtaggtccttgtcctagaagagatccctatctttgggaactcagagttttagaaactgtatgacagttctgcaaccttcttgtcagaatctcagtttggtttttgatattttcattgggtatagaaatctagcttggcatttattttctttcaggatctttaaaatatcatctcattgtcttctggcttacattgtttctgctggaaagtcatctgtaagtcttatgsgtgttcctttaatggcaatttttttttcttttttttttttggctacttttaagtttttccttttcatttttaatttttagcagttgcactatgattagtgtaggtgttaatgtctttgcatttgtcctgcttgaggtttagagtgtttcttaaatctgggatctgattttttggtatgaattttgggtatttcttaacattacttattatttcttgtaagccaattctctttctatcttttttctgggactcccaatgacatacaagttagrcctagtcacagtagttcatatataacttactctcccttctctttttcagtgttatccatttgggcttaatctggatatttttttctgacctatctgttcacttgtttttttcttcaactaatctattgtccactgagttattaattcatttttttgttctaaaatctaatttatcagttttaattttatgcaaaactctcaatctttttaaactttcttcccctccctgtcttccatcttatctccctctctctctcccttccacgtctttctttctttctcatattgagcaaagttatttcagtctgtgaaataactgtgtctgaggccagtattatttgaatcccttctgggtctgtttctrttgctttgaatctctgttgtcacctttcttttgtccctgtttacttsgtaattttttattgagtgccaattgttgtatattcaaaaccaggtatattttaaggtctagggtaatattatcctcctccagagaggatttatattaattttgttttttaaggctagtcatgctagcaattgtctcatccccttgctccatccttccttccttcccaattaggggtttaggtgatttgaagatgggcttagtctctgaggattcatctatttcctttttacccatctcatgaggtataattatttgaggtccaacccaaagcctaaagcacttactgggacctcttctattctgtgggccctacaaaaaattacagttttgtcttcttcatcctgttggggatttgaaacctctgatcacctttgagccccttagttgcctcttcagtaatcagcccatatccttgggagaaacatgttcttaaatgctagaattttgtgtctgtgtgtacatgtacatgtgtgtgtgacaaggtctcactctggttgcccaggctggagtgcagtggcatgatcatggctcactgcatcaccagcctcgacctcccagggtcaggtgttcctcccacctatatatatatatatatatatatattatatatccattaatgaaattattcaaggtcacaacaaaatctttttcctgaggccactaaataatcttattctagttcttcttttctttcagacttaggactttaggctaacaagtaccctgacattataaggcaggtatacaggaactataagtgaaagagaaaagaggccaaataggatgcatgtgatgtgggtgtatatgtgtaatatagactgcagaaaacctataattaattttttatatgcatgaataactacatatgaatcctcccacataattagttgagttgtgttgagttctttttcaatggaaaaatattttttcaggaatttgtcatacattacaagctttgattttttttaagctctctacatgtagatgtatacttttaaatccacactgtataattaatcatgggtttgttggaattacagaagttattttctagctttaagttaggtttacattattgcttatttctagagtcatactttgtatttcctcgtctgtttctatagtgctttgtaccatcatcagtttaaaagaagagtttaaagaatgctttttgataggcctcccactaagagaatctagttggtgcttaatcctcacacctgataaatgggtgagatgcttgtccacagggctgtgcagaagttgcaggttttgggaacatggcagatgggacagagtggagaataggtttaattagaggggaagccaaggggtatcttgaaccaagtctgagaggcaaggtgaaaaggggagagctaatactgagaacctcagccaagagaatcaagggtatcatggaatgtggtgtgaggaatggtttgatacaagtattctggaagtaaggtggaggaaaggaaatgtgtattgcagcagtggcttgaggggcatgggggagaacatggtggcttataggagtctttctggcccaggacattaggaaatactttttatttattttatttttatttttatagagacagggtctcgctctgtcattgtgctgtagtgcagtggagtgatcacagttcattgcatcctccacctcccaggctcaagcaatcatctgactccagcctcctgagaagttgggactacaggtgcaaaccactgcacctggctaatatttgtattttttgtagagataggggtctcactttgttgcccaggctgtggaaataatttttagagtccatagttcacatcaaggatcttttgtattagttaacttcccctagcttatgctgcctgaagaaattaacaaaaaggaccccagaaatctcaggggactgagaaaaacaaaagttcattacattcctacagtaccttttggttatagctctgctctagggtcagctttgactctcactcaggtatccaagctgaaagagcagccctcatctgggacatccttttctcatggcagcagaaaaagaaaactgatggaaccatgtgatagctcgtaaagctttagctgcaaattggcacaggccacttgcattcacatttctttggccactgctttcacagagaagggcactgtaagtcacatgccaacaggcaaggatgtataattttctccaggaaagaggggtgaaaaatcggatacaaaattacagtcaaccacatcttcctttctggatgaaactttacatgtgataaatatacactcttacagaattagatacaatttaccattttatattggcttttaagatatgcattttctcccaagttaaggtctgaaatcgtgatgcatcttacggtagatggggtcttataatcactgcaagccaggcagctgttgtgatgtcattgcctaggcatgagagaacttggctgctagtcctggtggtaggattggacacctgcaaccattgacatttcaggatcatttgagaaaggaatatgagtcctgactttcatttgaaaattttctgttgacaccccctagtaagatcagcatccattacagaatgggtgtcaccagcttgagaaaaaaaatctcagaggcagtagttgcgcttttcttcttttttcttttctttctttttttttttttaaaagaagagctgtgtcatcagtgttcccaggagcattgggaacacgaatactttcactaattgattgtgcttatgttttactttttatgtatgtatagtagtattatataaaaaatctagagaactgtatcaataagtgtaagttaattttacgtgataagaaaccatggtaccaaactttaattgctctctcttcttttttgttttggtgtttcatgactaatggtgcattttattctcagtggcacttagactctgaaatatggtaacttgcttcttgcccacttaaaaatattcattatttattgggtaaatggagccaagctttctttcttagaaggccttcttataggacatattttaaaatgaactttgaactaattttactcattctagctttaaataaaatttataagagataggtaaaacctatgttcttgaaatgaaattttattctattgtttggtaccacataatgaagttaatctttttctccaaaacagtaaacttttagtaaggagataggttttattttattttctaatcatttaatcttacactagaatcgatagctaaagcttttttccccaataaattaacagtttacagtagtaccttagatatagattgggaggtatgctggtgttattaaaaaatcagatgaactctataaacacccatttggaaaaatagctattttgacatctttmttttctttactttttggctttctcagttttgaagctacccaatgtattttgagtttaaattacatatattggtgaaaaaaaaaagttaacagtatgtagtccattggtgattttccaaatccaaaaattgatttaccagcaggtactatacaaaatttcttcacatcgcattcagcaaacaactactgagatattatgttagaatttacaaagatgaatagaacaccactgtcccgccttcagagaactttcaatctattgttggcaagtgattgcgagttaaaggtcttgttaccccactctggatttgagtggtactgkggtttagagtgtaagagcttaagttttggggtgtttctagatctgagattaagtcctggttctgctcctttgtcagattctccctactttacctctctgagcctgtttcttctgtagggttactgtgaatacctagcacattgtagatgttcagtaaatgttagctggtgataatgagaattatcaccttgataattctcatcttcatttcagtgttatgaaagaactttgattttcatgtcaaatagacctggccagatttcagttctgatgtttattaggtgtgcgataccacagtgcctactgaatggctcttcttgactttcttctcatagacatctcaaattgaacttaggatcattctcctaattttgcttattcaacagggttcccctcttagagtttcttgtgccagaaacctgggaattgttctcttttccctccgtctctcttggtgtttcttctgtcttacatactcactcacctttcccattcagttctatcatcttatctcaagccggctgacttccttctgctcccacgctatcacctgcatcaagtcctgcaccacttcccactcaggctactgtggttacccagctaatcttatatttcattttgcctaattccagtccattctccacagaacagctagagttatgtttggaagacacatgggatcttttcgctaccttttactcctttttgcttaaagcttctcaggggcttccttttatacccgaatgaagtcctcagtccttagtgtgccccatgagaccctgtgtgacttggcacaagcttccttctctggccttatttcttacctctggctcccttgtgctcagtgatcaacatattgggcttctgttctttcttcttttgacccgcattccttcctgcctcaagtctgcctatagtcagtgctgttccatctgcccagaccactttccttttccctacttttgcctatccaattcctttgcatccatcaaggctactcgtgggataattcctggggaagccttttaattcttctcaaagttgaatctctttgttaagtatttttataaagcatgctgtgctttttcttttttgcgtttacctcccatttaatgttttccttccatacactctagttttttgacggtatagactgtgttttattcactgctcagttgttcccgagtttagcacagtacctgagacatagtaagtacacaataagtatctgttgaaaggatgagtaaataaatgagcattacttgcctcatagagttgatgtgagacttaaattgggacacaaaaggtgtcttactgtatattagatagcacacagtgggtttgtaatattctcttcttttcttttctccctgccccctgtatcgtaagcgttaagaaaggcccacaagtagttgccaaacaatagattgtgacctgctggtgggtaataaaaccagtttartgggtcttgaagtgaatttttaaaaatgaaatggaataaaatagcaattatcagagaaaataacatatagtaaggacaggtatagttttctgaaactttctgtgtgtgaatgtgtttatgtagtaggtgtcatatgtatcttaatgtgggcaatggttaaaaattttgaaagccaccattgtaacaaatagctcagtgtcatgtagcctttaggcaatcctgtgtttgagttagtgcagctaaatgaggatatatcccatttttaaagaaatgtaattctgcctttgctgacttagtacaaggttcagggtcctagaatcctccttagtcgtaaatgcatctacaaaagctcctgtgattactaatttccccccttctatagaggctgtatccatttctaacctgtgtattttcaaagtaatttttacttctatatgttgtataccatggccttttccactatgttgaaaagatatcttcaatattgttaatatttagtgttgggacacctgtctcatataaagtttatagtgatggtagtaacattatattgtgtttatcataaagaaattctctgatagctcaaattattgctcttattaaattttattgctttagtgactttataggctttagtattatcagtttgatagaaagccagtgctatacagatatataaaaactcagattatayatggggacatagaaagccagacccagacaaaaggaagccaaagcgtctaaggattaagacaataatagttatgattgtggtagcttggtaagtgatttcatttttcagttaattctttacatcaggttggtaaacatttgtgttactgaactatgattttcttctttaaggccagtggtcagttgaaaacctttgatgctgttgattttctcagcattaatcattgttttatactccagtctccaaggatgcataaattataatagcaacaaggggagggctggagccgggtggttgctgctgcattattgtgtccacagggatggtatttgtgtgcttgtcctctgcatattgttggactgaggaactagatcctgtcctccgcaaagctggagacaacaatgaattataaacagcatcagaaagcagtgctgttaagtggtctgtttgaaactgttagagttgatggagtaacattattctgggactcttatgaaatctcatgaaagcttaggttgtctcctttcttatagttaatctgttttgtagacattaatggcaaatgttcaaataatacagattgttacctctaatccaccataaggaaagattgtggtcaagtcacataattcagttttcacattttcttacaactggtttctgttagccatgacagactagtaagctagatgctgtcgtattcttagaacagaagctacacaatggtttcttgtttattcttcacataattttttttcattttgaaaatgacatttattttggaaaatttagaaaataaaaaatgtaagagatatatatataattttccaacactcagatatttcctgttactttattatatttcagtctattgtctatttatatgtaagagaatactgcatatttttttctgatgaatttgagatgaaatgaatatttttagggaaaatacacattagtcaagttaactcaaaaagagattttaaaaaacttacctggaacaatattcatggaagaatttgataaagttgtcaaaacagtattcctaaaaagttgccagttccagatggtttagcttgtcagtattcacatctttgcagataatgcctgtgctattcaaactgttctaaaatattttttcaatggtatgcttcttcattttactaagttgtaacccaaatatgaaaatgttaaggcaaaaggtaagacagaaaagaaagtgcaggctagtcttaattatgacaagggaactgacatggataagcagtgattgcgctattgctccaatgattttttgaagctccacaagaaaatcaattttgtgatatgaacaattgctattacattatttgctatggataaaaatgacataaattaaaactttaatcctacaaaagatgatcacatataagatatgggaaataacaataaaaaaatttaatttttagttgtcagtaccaaaaagaaaaaaagtaccccaaaactcagtgacttaacacaacaatgatttattatctctcatgcttctgtggattggctgggctaccttgggtggttctgctccatgagatgtaagctggggtcagtcattcagcagggagctcgccatgtccaagatgaattcagctcacacgtctcatacttcacctgggtgcctggaacagtaggactctggtctgggcctttcattgtccatgtggcctctctgcattcagaagtccagcctgagacacacagcagccagaccctaaaaggatgaaagcagaagttgccaagtctctaaaggcctatacccaataatgactcggcataattcctgctgtattccrtggttcaaagcaagtcacgaagtcagcccccttgaaggatcctggaaacagactccatggcttgatgggagaattggcatgtgccatagggatgggactaaagttggtgacatttttgaaggcaacctatcatactggcttacatagaacattactaagcctaaagccctctatgtgcctctttctgccctctttttgtccctcacttttacccccagatcatcactgtcccctctcaatatgtttttccctcccaatattgtttcatcattttcttgctttccattatttcttttttaccatatatgtaggtatctccaaatagtgtcatttagttttacatgattgatatgcatttatttcttaaaattttaagtttcaatttagaataattatttatttgaagattatttataaaattcagaaaagtaaaagagaaaaattaaaatatcttctaatcccagctgggcatggtggctcacacctgtaagcctagcactctaggatccgaggctggctgatcacctgaggccaggagtttgagaccagcgtggacaacatggtgaaaccstgtctctactaaaaatacaaaacttagccagtcatggtggcatgcacctgtagtcctagctacttgcgaggccgaggcaggagaattgcttgaacccaggaggcagaggttgcagtgagccaagatcgtgccactgaactctagccactgaacccccacctgggcaacagagtgagaccctgtctcaaaaataaaaaaataaaatattttttaatcccagtctttaagatataatcattggtaatattctgggatatgttaatacctgtgtacccaccccagattcatatcatgtatctgttgttctctgaatctctttcagtggcaagggctatcacattatctggatctatagtattcagtttctgaattttggattatacatagcaagaattccgatttgtgagggattcagccaaacatttgactctgttaggatggtgagagtttggatagtgaaggatacttttgtgtgtgtgcatgtgtttgtatggtgtgtaatgttaagaaaaggaggtagagtattatatagtaacattccttttaaaaatttagaagggaaaacagtctcagtggattgttgttaaatactctgcagtgttccaaaactttactgtgcatgataatcacctgaagagcttgttgaagcccagcttcctggaccccatgcccagagatggattaagtaggtcttgtgtgggcctaagaatttgtatttttaacaagtttgtaggtgatgctgacttgctggcctacggatgacactttgagagcttctgttctatgatatgacttttaatggatatattgtggtttatcacataaatgcatcataattcgtttaatcagtcccttataagacacttagtagtctaaatagttttgttattacaggttgaacatccctaatctaaaartttgaaatccaaaatgctccaaaatgctgcagaatctgaagccttgtggtgctgacatgatgccacaaatggacgattccacacatgagtacttaacacaaactttgtttcatgtgcaaaattattaaaaatatatgaaattaccttcaggctatgtgtgtaaggtatgtacgaaatgtaaatgaattttgtgtttagacttgggtgccattccaagatctcattttatatatatatatatgtgtgtgtgtgtgtgtgtgtgtgtgtgtgtgtgtgtgtgtgtatgtatgtatatatatgccaatattccaaaatccaaaaaaatctgaaatctgaatcacttctgatctcaagtgtttcggataagggatactcaacctgtattaacaatactataggccaggtgcggtggctcacgcctgtaatcccagcactttgagaggcctaggcgggcggatcataaggtcaggagatcaagaccatccctgctaaaacggtgaaaccccgtctgtactaaaaatacaaaaaattagccgggtgtggtggcaggcgcctgtagtcccagctactcgggaggctgaggcaggagaatggtgtgaacctgggaggcggagcttgcagtgagccgagatcgcgccactgcatgcactccagcctgggcgacagcgagactctgtctcaaaacaaaacaaaacgaaaaacaatactataatgaccaataaattatacacatttatttgcattttcttatagtatatttcttttcttttttttttaacggagtctcactctgttggtcaggctggagtgcagtggtgtgatgtcggctcaccgcaacttccgcctcccaggtttaagcgattctcctgcctcagcctcccaagtagctgggattacaggcgcctgccaccaagcctggctaatttttgtatttttagtatagaggaggtttcaccttgttggccaggctggtctcgaattcctgacctcaggtgatccacccacctcggcctcccaaagtactgggattacaggcatgagccaccacgcccagccagcattttctatagtatatttctaaaagttgagttacctggtcaaagggttagtacacatttttaagatgtttataatgtaatacctaatcatattccagagagctrtatcctttatattccaactaggaaaacatgagaaatttaagttaacgttctgaggtctctgagggaagttttcaaaaggggactcccaaaataatttaacatgtgcattggctcattaaggttattatcttgtgagggcaatactcatttgcatgtaaaaattctaatatattaaaatgttggttgccttatcttacagttataccttgcacgtggatgattaacatttttaagtgttcagataaaagtgtctattgtttccttaaaccccccggcgtgtggaccaacacatttatcttttttaacctcctacagtgaaatcccactgaaattttacattgcctattgtaatttggtataaagatgagtcatctttcatagggctcaaagcagttctagggaaggtaataatctctgatcttgagggacaaagactgggtacaaatctttgtcccttttcacttatattttgaccatggagatcatctaggctttaaacctcaatgttaccattgggtaacattaccatcggggttaccattgaggttattatagagaggttgggtattactggaacagagtgttatttcctttttggagcccatggaattctgccaggaagtaacctgcttcctctggccttgaggagggactgcagataagagactagttagctgtctacaggtccttaccttctagtggctgtatttttgcccctgagaaggtataggaatggagttcgccctgggactgacaggtactactgtctgcatttacagtgcctctctattttcctcttttatgtatctactatgttcctttaaccctttcaatgtagtttttggaggactttatgaattctaaagaatgtgaaagagcttggaaagttgtacagagttttgtgaattcaaaataacattgcatttggtcctattcaaggcactattgaaatgacttactcattggccctcaagggtagtgtgagaggaccaggtaattatttttccaaattgatttctaatatttgttagtgatctcacagatttgtgttctttcaaacattcccaatttaagaaaggatcatattatattataataagtttgtaaaacactatttggaagttgatttataaacctcccttaaaacttcatccgcagcatttaacctttctggctagaccaggaagcctatatcacccattttattgtggggagagcttggtgcagatgaaagtttgaaatttggaatcatacaaacctgagattaaatcctcactctgacactgaatagatgtgtgaccttggggaaattagtgaacttgtaagatttggtttcagctgggcgtggtggctcatacctataaccccaggactttgggatgccaaggctggcagatcacttgaacccaggagttcgagaccagcctgacaaacatggtgaaaccccatctctacaaaaaaatacaaaaattagttgggtgtggtggcgcaagcctttggccccagctactcaggaggctaaagtgggaggaccgcttgagcccaggaggtcgaggttacagtgagccaggattgtgccaccgcactccagcctgggtgacacagtgagacactgtctcaaaaaaaaaaaaaaaaaaaaaaaaagtmcagtcactttgagggcccagtgccaaataggttcttgataattgttgtttctttttctgcttactctctttgaacatgtagctgtaagttttctgttctttttgagttattatagcagttgggttatgttttgcacagacttctagattgtcctgaaatacaaaattacggacacgttttagcctcctcacattgtagaatgttatacaataaaggagaatacggtcagtttggaaaattacatagatcataatgtgtatcttcgggaattttcttagaaaacgtgattttaatacgctaaaactatttagttttaagtaataaagtaaatattaaattaatatttttaccccttcctttctcagctattagaacttaacttattgagaatatcattttaaacagtatttctttgcaaatgttatactgcaagtgctatataattatctttcaggctgcaaattttttgaagggggcttattagaagttatttctggtctgtagcacagtggctgtttgcagtgactgaccttctgatcatttttgagtagaatttgtttagtgtgttaaagttgtttctagtcatgtgaatttactgagacagttatatggtcagatgtgtattttgcagggggatgtcagactttacacatttgctgattagttaggaatatttcgtctgctggtcagtggttcctgctgatttaaaaacaaaaggtgcatctgtagacagtgcttagattgtataaattcagttgcattagcatctgacactgcaggagagcaaattatatcttgagcaaataactgtaaagaatacagctgtttgtgatatctttattatgaaggtactgttttatttccacccacagtttgagtaagatttaatttcccgcctaaccacatcgctttcttttctagtgagattttgtctttgtaggctgaattgtttttagttttatattttaatgaagaagattgtcagcattaggrattcctttaatttcatttgctttcagcaaacattggaattattgttaaactctcaaaactatcattcaatgaataatayctaattatcagttgtaaaaacattttattaatattgatgctattccaatgattgcatctttagctttccttgtttaagtattttttaggtagcgtcacttggacacaggaaactagagtgcatttttccattaataaagaagtggttgttctctgatttgattgtttggattgtgtgaattggagagtaatgtttttttagcatgacactttgagaactgctacttggttaggatacttttgttccaaggtctctttgagtcagttcctattaaaagtgaaatgtgacaacctatataacaatgagaatatttgaacaatacaatacttgtattattattgtatggctttgaggaaaacctcatactgtgtctaattgaatttattatgcttaatgaattttttgaaccaaagagtaccttttttgtttacttgaccattgagtttgtttttaagtatatataaaatatgctataaaacatgtacaatgctgaaaatttgcagcctgaaagataattatacagcagctgcagtataacatttgcaaagaaatgctgttaaaaatgatattctcaataagttaggttccaatagatggctggatgaagaaggggtaaaaatattaaattaacatttgcttttattaagagttcctgtgaatttttataatagaattgatcacaatgaatttatttggtaaattattaatgtccgtgttacataccctcttaagaataccttacagtgtcatattcagaaacatattattaacttaaaatggtgttctttttcaagagaacaaagaattcaaatttagctggttgatactagttacattatgtaaattatggtaaatgtaacattatgtaaaaatctgtaagtagttatacaggatttatatcagtaaaataattttggttagcttatgcaagaatatcacaatcaaatttagtgatgattgcagtagtatcagttaggcatttctcttcttaatgctgtaactattgagataagcgtcttcctaagtggcccttttctaaatctaagttttggaaaggagtggaaaactgatgtgagattgtgaattttgagggctaggtaaaaagtttgtttgtgagtctgcacgaaactctcttaaaacttggtatcttatgagtattaaaaaagctggtagaaatgtctgttttacttttgcctaattttttttacttattagacaatccagtatctgtttggattctttgtgcttttctttggataattgtgaacgcagatcttttttttcgggtctaagtaaagccgactcagtatattctggtatgttctgtcctaccaaatgtcattagttatgacttgtcatatttaagtattaaatagtacaccttttccctaatttttttttttagatgagaagggctttgccagctgcccttaggaattagaaataaaaaggttatcaccaggcaattcctctatttgagagagaatttactggtcctttggaaaaaaaaaaagtcctactcacagccttgataaaaataaattacaagtagattaaagatgtacattaaaaagcagaagttcatagaaaatgtgaaaatatttttagaagtcttacgaaaggatttcttgactaagatgtaaaaaagcacaaacaaagccagatacagtggctcacacctgtaatcccacatattgggaggctgagacaggaagattgcttgagttcaggagttcgagaccagcctggacaacatagtgagatccctgtctctacagaaaaccaaaaaattagctgagaccacaggtgcmtgtggtggtgtgcgcctgtggtcccagctactggagaggctgaggtgggaggatcccttgagtctggaggtcaaggctgcagtgagccatgatcatgccactgccctccagcctggaagatagagtgagaccctttccaaaaaccacaaagaaacatcacaaaccatgttgaaaaagacttgactcttgatttgagtacactaaaatctgaaactttggtatggcaaaaaagaactattaacaaaataaaaagacaattattagattgaaaatttttacaaggcttaggatccagaatacataaggtactcgaaagaaagaaattttttagataggcaaaaaatattagatgaaataataaaataataaatccaagtagttaagagtcatttaaaaagattatgattctatcactaaaatgaaggaaatataaattaaaatcctaagagagtattttatacatgagagtggcagaaaatgtcaaaaatcaaccagtaccagtattaataagaatgtggaagggcaaaaactcttatgtgctttgataatatctagtgaagtggaaggtgctcacgttctagcaaccactcattccactcactgtatattgcagtgaaattctcatttgtgtacaaagtgtcatatcaagaatgttcatagcatctttttttttttgtaactgaaaaatccttaaaacctaaatgatcatcaacagggaaaaaatggataaattgtgacttattaatatagaataaagaattatatagctgaatagaagaattttatagcaattaaaaggaatggatccaatctgcttgaagcaacatgagtaattctcaaaaacataattttgaattagaaaaacaggctaaaagtactatctgcaaaatatcagatatataaatgttaaaaatacaaaacaactctattttatcatgggtgcatttatatatattaaacgtacaacagtatggatggaaagactgcatgccaaccttaaaaaatggttacttctggaaagggaaggaggaggataatgggataaggggtggaaggtggtgctttagctataccatatagtgtagatgtgtagtagactgtatcattctaagcttgttaagtacactctatgatattcacataatgacaacattgcctaatgatgcatttctcagggtgcattctcattgttaagtgacacatcactgtatttcagaggtccaattacaaattattaaaaagggcaactttccatgtcatttatagttctaaatcactttattttaaaaatatattgatggatgtttggcaaagaggcaaacccacaaaccttttttatttttatttttgagttggagtcttgctctgtcgccctggctggaatgcagtggtgcgatctccgctcactgcaagctccgccttccaggttcacgccgttctcctgcctcagcctcccaagtagctaggactacaggcgcccaccaccacgcctggctaattttttgtatgtttagtagagacggggtttcaccatgttagccacaatggtcttgatctcctgaccttgtgatctgcccgcctcagcctcccaaagtgctgsgattacaggcatgagccaccatgcccagccgtggatgctttcttgtaagtgaaattggtggattataaggcatggaaatttaaaattcattctatttgtgctgcagaaaattgtaccaaattactttccatccagccatactcttagttatcaattataggagactgcttatttccccagatccttcagtctccagatgtttcccacacttctaacctttgccagtcttatggggaaaaatgacatgagttataagattataaaacttgagcacctatttgcatcccttttttggcatctttcaagatggtaaagtggtggatctggcattccatcattttgagaaatgtgttcaactttggaggctgtgagtagaagagagcagattgaatgcataacagggtctagtccaggcttcaagcaagatggatgaaaaggttcagggatttggccgggcgtggtggctcacacctgtaatcccggcactttgggaggccgaggtgggtgcatcacctgaggtcaggggatcaagaccagcctggccaacatggtgaaaccctgtctctactaaatgtacaaaaattagccgggcgtggtggtaggtgcctgtaattctagctactcaggaggctgaggcaggagaatcacttgaacccgggaggcagaggttgcagtgagccaagattgcaccactgcactccagcctgggtgacaagagcgagacttcatctcaaaaaaaaaaaaaaaaagggatttaagttcaaattgaaatgttggcttcctaggtaattctagatcaagtttgtccaacccatggcctggggctgtatgtggcccaggatggctttcaatgtggcttaacacaaatttgtaaactttcttaaaatattaatagttttttttttcctttagtttatcagctttcgttagtatgtttgttttttttttttttttttttgtagagacatggttttcaccatgttgctcaggctggtctcgatctcttgagctcaagtgatcctccctcctcggcctcccaaaatgctgggattacaggtgtgagccaccattcctggccttttctttctctttttaaaaactttgtttgtgtacctgccttccccaatactgcacatttcctgtgtgctctgcttctcaagccctggcatctcacctgtcagtcagcatggatgcagagttcaggcgcaagagacagcctgaggagttccacccagaaaagagttgccttgcgacatgaaagagagacatgatggccaacaccatgaggccaaaacatgagatgatggaggaaatgcaaattgaggaggagagatcttttaagatagaattaccccaggccagtaatctttgttattccatataggttttactggtcctcaaaaaggaggtctttacagaaatgcagattttacattaatagcaagagggaggaaacccctccagataatgaagcgaaaatcatgaagcaaagtcaggcagacaggacaaaaggagcctttaaaattctcattgttgaccagaccggtggctcctgcctaaatcccagcactttgggaggctgaggtaggcggatcacttgatcaagttcaggagttcgagaccagcctggccgacgtggtgaaaccctgtctctagtaaaaatacagaaattagctgggcagggtggtgcatgcctgtaatcccagctactctggaggctgaggcgcgagaattgctggaactcagggggtggaggttgcagtgatccgagatcatgccactgcactacagcctgggtgacagagcaagaaggcataaatagaatgacatttaagtagccactgctgcttaaatttagaatttttctccattgaaaaatctttaataattgttttctttcttttgtgagaggcttgttaattctacagagtggttagccacacagaaaaccagaaagaagtacttttcctcagggccattttcctttataggatacttataggcattgatgttttaccaaagcaatgagttgtctcaggcttttagatcatagaatgatagaattttagagtcaaaaaaactcagtaaacatttttagtttatatgtgagagaattcaggtttagagatgtatttaagatcagatagtggcagaatctaggtctgctgatttccagtccaacattttaagattcatgccaaatcttttaaatattataatggctattgtgattttctgaaagcttactaaaaatgattgtgtgctatgagtctaatattgttctaggcatagcagataggaagataaataagtactcggaggaacatgcagggggcagtgcatcagtcatggtccagctgaagataatagaaaccatcgtgccgttccttctaggtttgtatcagaaaaatgggttcctcctgttgcctcctgtctccccacatccctgagctttcaggtctcactaggtggatctgactggcagaacctaaatcatacccaggatcttagttgcaggggctttttggaaaatagtttgtagctttccagcttctgtgatactggagggcccacagaatgttgtgagagagatagagtgagccagtctgcagaatgcttagggttaacacataggacgggcactgaacctgccagtgtggggttgttggcttgagagctttcactgggaagtattatagaacctgagctgagactagaaggatggagttgaagatgtctcaccttttctaaggaactttgatgagtggattcctgttgctagtttttttatcaagtctgtataacagtaattctcaaagtgtagtcccccagaccaggggcgtcaacatcacctgggaacttagaaatgaaaattaggcagggggattgcttgatctcaggtgtttgagaccagcctgggcaacatggcaaaaccctgcctctacaaaaaaatacaaatattagtcaggcatagtggcgtttgcctgtaggtccagctacttgggaggctgaggcgggaggatcatttgagcccaggagtttgaggctgcagtgaactgtgatcctgccactgcattgcagcttgggtgacagagtgagactgtcttaaaaaaaaaaaaaaaagcaaattattggatactattttagacttactgaaacagaaactgatcaagcccatcaggtgactttgatgcatgctaaaggctgataacctctgccatgtaagcataatgattaagatgataggttttttggtgttttttttggtttgttttttgttggagacggagttttgctcttgtcacctaggctggggtacaatggcatgatctcagctcactgcaacctctgacccccgagttcaagcaattctcctgcctcagcctcctgagtagttgggattacaggtgcccaccaccacacccggctaatttttgtatttttagtagagacgtggtttcaccatgttgggcaggctggtctcgaactcctgacctcaagggatcctcctgccttggcctcccaaagtgctgggcttgcaggtgtgagctactgtgcccggccaagaatataggttttaaagttaaatctgagtttgaatcttagcttttgcatttaccattggtgtgattatgagccaggaatttcatctctcctgatcttctggggatagcaacacttaccttgtagagttacagagttgtgaagcttaagtggcatgacatggactatgcttatcacagtgtgtgacacagaataggcattccatgaagtctgttgaaggagagttggctggagtgcccctgaattaatctatcccaggaaatttaataagggcaattcagatagaattcarttcagcaaacatgtatggaaggcagcctactctgtgctgtgcactgtgcttgaagtctgtggtgcctttatctgtggcaagagcacagatggtaaggagacatgggttctggtcattggagtggcttattttacttactggggagacaagtacttaaatgaaagaattaacagtcgaagacgagaaatgattaggtgcataatcaggtgcttagtcatttattatgctgccaaagtagcgaatattacagaagcttagggaggagaccagtcaaatgtgggctgacgtagtcagggatggattcctggaagaggcagatggggacattataaactgttgtaatgtaaatctaatttcccaggaacatatttatttgcaaagttcatttaaaaaattatgaatcttattaaaaatatagaaaattcagaatataaggccaaaaaaaatcaccaataatcctacaactcactcatggctagatattttgatgagttaaattttagtctggatttagaacattaaaaaatgataactgctattacagtatgataaatctttgtattttgagttaattcttcataatgcaatgatgtatttccacatgttatggtgatgtaaatattgcatcacttgaacttattaacactctttcaatttttgcaatgatgcttgaaaaaatttttaaaaagtacctacatttcagactatttccttcagatagattttaaggtttggaattactagggtatagagtgaggacattgataatgcttttggtacatgttgccaaaagaggtatttgagaagaaagggtattactccctttattccttcattccttctttttttcattcagtatttatatgctaggcctttttccaggcgctggggatacagtagtgaacaaaataagcgaagatccttgcctttataaagtgtataatttaggaggggaaaacagataataagtacaggttaagcattcctaatctgaaaatccraaatgctccaaaatccaaaacttcctgagtgctgatgtgatgtcacaagttactctgaacatgttattttttcactctattaacagtatgtcagggctgggcacggtggctcacacctgtaatcccagcactttgggagaccgaggcgggcagatcacctgaggtcaggagttcgagaccaacctggccaatgtggtgaaaccccgtctctactaaaaatgcaaatattagctgggcgtagtggcgggcacctgtaatcccaactactcggggaggctgaggcgggagaatcgcttgaacccaggaggcagaggttgcggtgagccaagatcacgccactgcactccagcctcggtgacagagcgagactctgtctcaataaaacaacaaacaaacagtatgttggccgggcatggtggccataatcccagcactttgggaggctgaggcgggtggatcccttgaggtcaggagttcaagaccagcctgcccaacatggcaaaaccccatctctactgaaaatacaaaaattagccaggcatggtggcgggtgcttgtaatcccagctacttgggaggctgaggcaggagaatcacttgaacctggaaggtggaggttgcagtgaggagagatagtgccactgcactccagcctgggtgatagagcgagactccatctgaaaacaaaaaacaaccccccaaaaccagtatgtcatattttttactgttaggtacttatatgtaaataggtacaagaaaataattgcttattggtagcatataaattcacagttgggaatgatggtgatgccaaaccacagattgtccacatgggtggctaagacagtgacatctttgctttctgatggttaattgtacaaactttgtttaatgcacaaaattattaaaataatatataggatggtgcagtggctcccacctgtaatcccagtgctttcggaggtcaaggtgggcaggtcacttgaggtcaggagtttgagaccagcctggccaacacgatgaaaccccgactctaataataattcaaaaattagctgggcatggtggcaggcgcctgtaatcccaactactcgggaggctaaggcaggataatcgcttgaacccaggaggcagaagttgcagtgagctgagatcatgccattacagtccatcttgggtgacagagtgagactctgtctcaaaaaaaaaaaaaattgtataaattaccttcaggctatgtgtatatggtatatatgaaatataaattttgcatttagacttggggcccatcctcaagatatctcattatgtatatgaaatattacaaaatctgaaaaaacacttctagtcccaagcattttgaaaaagagaagctactctacctgtatataatatgttgcatggtgaaatgcactaaagagaaacataacccaggaaaatggaatgaggaatggtggggataggaaaattataaatttaaataaggtgattagggaaggccacattgggaaactaccttgtgaataaaatctgatagcacatgccttattccttgatattttatcagacagagtgaattgtgtgggtataagccatgaagtggaagcatggcatgcatgtttgagaagcagcaagcagaccagcaaggcgggaacaaagttaggagaggagagttaggaagtgagtgcagaggtatgctggtgaagggaggacgttgtagaggaggccctgtattgagttttacaggattcctctagatgctatttgagaacagactacaggaaattggaaccagaagcaggaaaacctgttaggaagctattggtagttaatccaggtggaaaatgatggtggcttaaatcagggtgttagtggtggagatagagtgaaatggkcagaatttgaatatattttgaagatttagttggcaggagtggctgatacattggctctgggatgtgagagaaagatcaggagttccattttggatatgttaaatttgagacgtcaagtggagatgttgagtagacagttagataaatgagtctagaattggaagagataggagctggagaaataaatttaaaattgatagtgcrtatttgaagtgatgggactgaaagaggaccagcaaaggaaagaaagtcaagtccaaggactgagttctggagctcttcaatagggagagatcagcaaggagcctgcagaagccagtgaggcaggagagtgggatgctttggaagccgcctgaagaaagaaagtgactccaggagtgtattggtccattttcatgctgctataaagacatacccgagactgggcaatttataaaagaaagaggtttaatgagacttacagttccacatgcctggggaggcctcacaatcatggtagaaggcaaggaggaacaagtcacgtattacatggatggcagcaggcaaagacagagcttgtgcatggaaattcccatttttaaaaccatcagatctcatgagactcattcactatcacgagaacattgcaggaaagacccacccttataattcaatcaccttccacgggttcctcccataacatgtgggaattgcgggagttacaattcaagatgagatttggttggggacacagccaaactgtatcaaggaagaagcaatcatgggtgtgaaattgtgcttgtagatcaagactaaagattgataattgatgttagcagtaaaagaaggtcattggtgtggctgttggtatgtgagtagtttcagagaagcggtgaggtgaaagcttggttgtcatgggtccaagagagtaggaggcgacaaagtggtgactgtgggtatagacactgtttcaaagaatatagctacaaagaaaaggagagaaatggggtggtagctgttggaaagtgggcttgaccttttaagaaatatctgtagaaataacagcatgtttctatgctgatgggaaagatcctatagagaggtaaaatgaataaaacaggaggattggtggagctctgtctgagttggcaagaggggatggagtcctctttcacaagtggacaaaggacctttgcaagggtcacgtaataagacgaaggcagagtctgtggggcagaggtggtgggagaatagaggtggtggtggggcttgtgggagttctcttctgattcctctgttttctcagggaagtggccagtaagggaatcagtggcaattgaggttggagaagatttgagggaagagaagaaagtataaaatagtcaccaaggagagagagaaaaagaaagtgaatgaatgaaggaaaatgtgttataattactgagttgcattaaagctcacttacagttactaaccacagatttaaggtgagattaatcggcatagctgtgtgtttttgtccagccacataccttaaactataaggtgtcaggagtttccaagtatacatgaaacagctatgaaaatggaccccctgttagctatatgggtgcaggcgggtagttggatttaacaatgactggagtttgccaagagagratgacaaagaggcacaaggcagatgagaatgtgtataaaggaacagttataacaatagaatttaagctatgtaaggagaatcatgtagacctgaggtggatcaaaggcagtgaaaagggctgagtgtggtggctcacgcctataatcccagcactttgggaggctgaggagggcagatcacctgaggttgggagttagagaccagcctgaccaacacagagaaaccccgactctactaaaagtacaaaattagctgggtgtggtggtgcctgcctgtaatcccagctacttgggaggctgaggcaggagaatcgcttgaacccgggaggcgaaggttgcggtgagccgagatcgcgccattgaactccagcctgggcaacaagcgtgaaactctgtgtcaaaaaaaaaaaaaaggcagtagtgaaaagatggatagagtatatgcccctgtggaatagaagaaggaagagtgctacaggggttgaatggaaagagagaaggtggatcatggttggagactgagatgcttgaaatttgcaattactaaggggatttcaattattggtagtggtagagtttagggtgtgaccgtaggagtagagggtgagattgttgtggggagtggcctaggttagagttatagggatttggaaggatcatccccaagagtcaaggatgaggaataaccctggaattagtaggtgacaacaaagcagaatggtggtggtggtgttggtgtggtagggaggagggcatggtctggtgaccagaggttaaaatctagggttttggagagtaaggaaggtgaatggcctgtaagtggctctaatgaacagaggccatctatcccacctccaggccagtgggcggagaggtagggaagaaacatccaactcttgaaaggaccccagaggaagtgagcattcggttgcagtaagaaggtaaggatgtaaagggagcttagaagaggttgcaagttttgcttctggctgaccaggagtgccaaaagcaagttagttttgtgagttggggagccatagacgtgagtgtgccagttttgctgttcctgtggcaacctcattaaaaattcagtgtacttttgatggaagacatagttctttgtcttttgaatttttaaaaagtgttggtatgattgactgttaattcatgtaagaatatacaatkggtcacatttatgagtgatgcctaagtgcatcttttgaaagatttggatagtgggaagatgagaaaggtgaatagagcatgtcaagttttgtgggaaagttaaatgattaagctggccaggtttagggatttatatttaagacacagatatgaaattggctgggttggtcttaatgtctgcactaaggattgtaggctgttaggatagctttactacataaagttcttaaaacattaaaaatggtaaaggtcctcaaaaaattaatgtagaattattatatgatccagtaatttgacttgtggatatatrtgcaaaagaagtgaaagcagggacctgaatagacatttgcacatgcatgttcatagcagcattattcacaatagccaaaaggtggaaataacccatatgtccattgatggaataataagcaatgtggtatctacatacaatggaatgttactcatctgtgaaaaggaagggaattgtgacacatgcgacatcatgaatgaaccctgaagacatcatgctaagtgattccacttatatcatgtaactagactattcaaattcatagagacagaaagtagattggtggttgccaggggctgggagaaggagataatgaagagttggtgtttaatgggttcaaggtttcagttggggaagatgagaaatttctggagatggatagtggtgattgtggcacaacaatgtgaatgtactcaatgtcacaacatggtacttaaagatggtcaaaatagtaaattgtatgtatattttactacaacaacaaaagtctcaaaggacataggcactgcttctctaatggtacagataagggctaggcagcagtggcttgttccctggaagcagggtggagtggggaagacaggattttggtataaggaaggctctgtttgatgggcatgtgcttcccctgcagagatgtccgcattgtctctcctgtatgaatgggaactccagcattggggttctcattgtggtttagaacacacgatgagaacatgttttcttaagtaggaagacattttctctgtgtttttatttactctatttgtttagcaattttttttcatagatgagataaggataactctagccttcaaaattattctaagtttttaatatgaattcatcttttaaatattgtatttactagttgaatagagtgccagttactttggagtcattttatttatatcctgaacttggcagaggactataaataaagaaattggaaagctgtcattcataatccgctaaggcctgtttcatgaaaacatgttgtagttatttgtccagatgtattcttattgttgagtcacagtaatgactagaagacagatcaacaggaggatgtaaataaataaagccaaaaagaaaagccagtgttggattctttggggcctgatggattcaggctgaatcccagctctgttacttaactctgaatttgttcattgtgagcctcactcttcttatttattaaatagagagcttctacttacctggaagagtcattttgatgaaataggataaaaattaagccacctatggcaatggtatacctaagaggtagctggtagtattataattgttactgcaaaaatgtttagtgggactcttcctgaaacccagtatgcaaacttagaaagcaaaggaattagcagaagggtccttcaatttatacagattcacctcagggtttctgtaaatctgggggagtcccttgtgtatttgatgtttacagatcattagcaaaacagatgccaggaggcgaataaactgtagcttaaagattttggaactactgacaatgtagagaaaatcagtttctgataaagttatagtgtttctaagtaagcagtagaaggcaatgggaaaattttaattgggtttataaaagtttatttcaggaacacatgtatttccaatttgaggcacacctatacatctgtagtcattgaatttatagtgcttgcttatttctccattggggttaataatataacaacaactaatatttattgtgtgcttacgacatgtcagtgtgatctttaggaagtctgtagcattcaaaggcttgttttcatttggatatttggaaattggccttttatccacttggagacacagggtgtttaatgagttcattttgttctattaattctattacactccaaatatttgttcggtatttataacagttaagacattttgtaggagacaaagttaagtaagacatggaacttggcctcataacagacctattcactatattgtatatgcttcagaagtgggcgtgccgtgttatgggatgagccctgatctagtcctggactctacccctggctctactacttcttcgtggaacctttttctgcccccttaggacaaggccagatgcccctgtgctgattaactcctagtatcacacttaccaagccccatggtacctgcttgtttaattctgtgtgttctccattagggctagactgtaaactcctggagggtgaggactgtgtcttatttatcaacagggccagccacagcagagcatttgttccacgagtgactactaattttctaactttggacaagtgataacctattgctttaactatgataaaattgatttgatagtctctatagcatagctttgtcaggaaggtaaaatcagaaaatttctctaaaatgcctgtcacagtgcctggcaaatagtgggtgttccatcaaatagtttttttatatttgaataaataagttatctcttttcaccaaatttgacacatatgatacatctatttatgaagaccatatggagtgatgtcatatttgtaatacataaagggcacagctgtcgtttaggcaaagtataaagtaattattcatattggcataaaaatgtgacacttcaggttactcattcaaaaaagtgggataaaatgaatcctaactcatagagaaattacatggaagcctgagattataatcataaaaaaactcatctataattatctatcaatttgatagattttaggaattgtttccaataattttgaagtaattttaaaaaattccaaatatttaaatttaagtaataatgaaagttgaaaactaagatattcagtagagaaaaaggtaaatgtaagtgaacatatccttttgattttttttttttttttttttttttgcctccagcacaccctacccttccttttgcattttaaagctccctttggaatttcacttatgtttgatttttggattcacatagcataaatttgtttaaggatcagacttatattccttttgtagatgaagttataaaaaatatttcaaactatcagtaagtagtggcatttgctggttaaaatccttccatattctccagaaagaaagatgaaactccctagattttactgtataatgtcaatggactcattatttgtacaacagctgatgtatttaggacttgttgattcacttaattggtaactgtactacattcataacttcaacaactgaaaacaataggtcagtgtctgctgtttatgcataaatagtcacatcggagcaggatatgtctgaatggcagaatatgttagtctgaggaggaatctggcatgtgaatggctccattgcttgccatactgaggtgggtttttgctgtctttccttgaataatgttatttgtgtttttattatgggtgttgatggttaactgttcctatgttatcaggctggctgctgtgaaattgcatttgattatactttaaatgccagtgttgggggaaaatggtagactagactcatggttaaaaattgggatgatttaaagtttttatgtcttacagccttcatgtgctaaagcaaaaagttacacctagaatagattttttttaaataacaaatttcatttgtacgtggaatccaaataaatgttcatttatagtccttcaaaatgattttttttctaatttatgaattagacgtctttcaaattttagagtcaaatctgcattttagaatcagtattttttgaaaagagtaatttttaattaaaaaaattcaaaaggaaaaacaacctaaacctttttgtttcattgtcaaaaaaaggaaaacatgctggtgatttttaaactctgtaaaacatttcaaacattcttttcaaaaatatattatttgtaacaagtaaattttaacaatcgaacaatataatttactagaataattgtgtttagttattacaaaatgctaacctaatgagtcaggtattttacaatgtaaaataaatgaagctgagtttttatagctatagtaagtttactagtgtccttgaaacgctatatttaatgcagtccagtttgcggtcatcttatcaagaaactttaattttgcataatacaaaaaaattttcttcttgaggattaaaagaaagcttatttctgggtgtattttggggaaaatttgagcttgttctcaaactatacaacttcttagactattttctgaaagtctgcatttttagtgtataaaatttggaaatgtcattagtgaaagagcagtgtagtggactgttatcctgtttgcagcatattcccatcttctcatctggaaaattaaatctgattacagcttggattaacatttatggttgtggggagaggaagatagtatctcaaactccatgaaattgaacaatgagattatatggtgtatagctaatgttaaagtcctgcttcttaaagggcagaatttgtaattgtaagctttaaatatgttcaatattttgtctcttattgattgaaatatcctagagataatgattgggtaaattcagcgggcattaaatgtaatgttttctgccttgaatacctaacatgttaaaagtgaaagcagtgtagattcccgtgttaactgctacatttgcagtttctcttaaatttcctaaaagaggtcctattataggagatgatggcgtttggttagtatgcagttgttaacgtgttttgtacaaagtgaagtcggtgtattttttaatcagtttaaaaatatgtcatgccttgactctttaaatgaagtcattggtatgacagagggaaacaggaaaataatttggtaagatgtgtgtgtgtgtgtgtgtgtgtgtgtgtgtgtgtatgtacacataggagttaccaatgtacaaatgagccctcatacgtaaccacagcacttttatgaattattttgcatttctgttgtaaaagatctgtctaccacgttttctaggaactttaagcctaaggcagaactcagggtttttggagcctgtgtaaaataatttatagcacctttccagtaagtcttgcmcacactcttattctattaattaaacattctgtrgcaatctggtatatcttaaagatttaaaagtatgtatagtagaagactggaaaacatagactgttgagatggaagaagattagcctttcttaaaagaaaaaatgttagacatgtttgtttaggagatcagttttttcctgctgtgaagacatagctttttaagcatggtcatgttctgtgcctgagtgagattgtgcttttgggagtcctatactgtgaaatgtgtgtgttcaaatatggaaatgcttcttgtggccttcagtgaaagtgatrcacacttttctgtggggacagcctctttgatggccatggtgctgtgacatcacaatgacatgatacgaaaccttgtctgagagctacctgcctctttggttaagagatgcatggactctattagggcgtacatattattagcaagatattttaaatacaatatttttttcctgttgaaaagtattttcctgggagttgatgacattgatttttaagtttgtgagttatctattgtctgaagtaggagaaagttgttgagagaaaaggataaggaaagaagggtgtgctatgtaccactagattcttaattttctgtcagcaggacaattcttgggtaaaagcttgacatacgctgattattcttactgccaatcgcctaagcaaattatgttactttcttccatggtagtactcttccctgcagatttttgtrttgaaagttagctgtttgataacactgcatttgatgatgaacttatgaatgtgagaaggtgttttggaacgttagcaattatagcattgagtggtggataaagaaatagatatataaatattagaccgatgcacagttttccagtgtatgttattttccatataaagatatagaacatttcataaaatgttcccagaccatttaaaactcaaagaaatgcagctgacgcaatgaaatacatagagtacttgtaaaaacatacagacacgcaagtggattgctgccagacagaaaatttaaaggcggtttgcttaactgcagggtgctaggttttgtacatgtgccatgctgaaactgttagtaaggcgggtgttgtgttgcttgagaaaagcagattgtatttggacctttttaactcagatgtttccaatgtcgatattttggtgacattatggcattgcgattgactcaatgtgaaaaaagatttcagcctcctgtgttagacattttaagaaaattcaaataaattatttgcagtttttgtgttaatctttccaaaatggctttcgtagttttatgaactatcggactgaatctttgagctaattgaatggaacttgataggttgacttggttttaaaaagcattgcttttctttctttttaaaaatgtattatattgctttggtgaatgttaaagacctatgaagtttgttttttgtaaatgttagtggccttaatgaaaagaaaccaagagttgtatacttgaatcatagtaactaataatgcatgtattctcttggaacgttattgtgttaaaacctggtaatttcattgtagagagtcttaggacaattgaaggaatctaattgatggcgtttatattgctttccattgaggcagtattgggaatgatacagtttgaatggcctccttcttggcattccatggtcatctttatcttcaatgtgttaagataggttgattttttttcttttcattaattttcccatgcttttttcaatgctatgttgtatatattaatcaaaaatattttttaaatgagtttattatggtttcttattaatatagttgactgaaaagatttaagaagcatctgccacctaggaataagaatggtatttttaaaaattgaagaatatactacaaattttggtttcggacatatagtctttcacaaaatggtgatagaaaagtagtctttggttttgttttcatgggtattttgtagttcccaagaagcacaaattactgcaagaaagagggcatgatagtaacgattggcatgaaagtaatttttgtatgaagtttggtagctgaagaataagtgttaaaccacatgtcaattggaagaaaaagaataagccttagatgatttagtggctttcccagcctctgttttattatgtccctcagtggcttagagctacattttttgggtctctggaccaaattttaagttctgtatgtatgttttagggattatagccactgctcttttttaggccccttgttccccgttgttcaccccctttcccctcactgtacactggtagaggattcttgggcaacaggctgcccctttgtctcctgctggcgaattcttctccgccagcctagtccttttcctgccacactcttggtgcccgctggcctcctctctcacgagggctgagtccttgggcagtttcagtccttcaggccaaagacaggtcaagtgaagaaactgctgcctatcagggaagccctgagttggtactgcaggggcattactccagagttctctagtcrgtctaggcacatcattgattccttcccagtagttgaagaygagggtgaagaaagaaattgattcccagcttttaagtcaagcaaaatacacgtcaagagttgaaatcacttgcagatagtttcaacttttttgcaccactcatttcgagaggctctayktttggcataaccttttgaatattcctgcttttattattagtcttgtgttttaaaaaataatacacattggttttaatgacttgaaaactggtatttctaggatcctagtagtttgtgaataggcccttagttttttcccttcttgattattcactgaagaaatggactgcagtgaacttttacgtggattcattttcacaaggatgtaaattagtgttttagtatggtgtttaaaggtagccatgggtagcatatattgtgaccactgttagacgggagaccctcaaatctatgattttccataagcctttgaattgatacatgatttctcaaatagatattattctgacctctgatcacttcccttaacatgtctcaaaggaatcaaatcttttccttattagaaatgattgaatgttttcctaatcgatagtaaatggaatgctaatagcttttaatttgttcacttctgtattgacttacagaagatggcattggatcatcttgcttatgatttaagaataaagtgatccctttagtaactccattttaaataggtgatcatgaaaggtattttctgccatgtatttgtatagtttctgagmaagtttaattatgtcagctggaacataattttttcatattttgtttacactgacaagccaaaagcgttggtcctcttttgaagaaaacttccatccagttttatctgcattttcataagagtgtacaagcattttgagaaggatatatttcatttattaaagcgatgagttttgcatttattccttgaaagaattctctcactccccctttctccccagtctgaaaccagtgcttaaggtggtttatcaagcccacatctgtaactatgcaaaggaggcttctgattagagaagaaaagtcaagcagatttaagactcattttctctggaaaaatatattgagggcaatttgcagctggcaagatttttgcattaggtaatagtctaaagttaacagtagcatcaggtctttaaaatttttcttttttatatttctggaggagggtaatgggagtgccttgccgagtccttccttgtgctcatcaacatagcagcctcagctgccccccttggatcccctgccagggctgctatcatcttctgatcaaatattaatgtgtgatcctctgcttgctcactaatccaaagccaattaatattatctgtcaattatttacagatcctgaggtgcagaggcaattcccggaggactacagtgaccaggttcggaatgcgtaattaattttttacatgacaaaatttatttcagagttgttcaacatattattactgttctttttactgaaagagataaatgaatttttagaagggaagaaaagcagtaattaggaaccaaagacaaaaagtaaaacgtattgaagtaggactgaaaatattggtgctagatttggggtgtttccttcagggagaaaatgaacacaaaataaggaagaaaacctatcacaaattttactcttcactttgaggtttgctacagtctacacttcattaggaaatcctttttgcattgcctgtgaactttttaaaaaaatgctatttcaggagtcaagaagcagtgtaacaaaaaagagggaagagggaagtttataacatttcctggaatttgaaatagatgatgaaattatgtgttatggtagtattggaaggagaagatgcacgtgcagaaatggacttaagggtgagggtggtgctgatgaggatagtgagttaaggttggccagttggctctaccatcttgaattgacagcattctgcaagcatagaatggggtagaaggaacgattttactcacaagatagtgctgaagttctgatgttgctgtattttttataattagttctaggttatacattcaggattctagtttctatcttgagagatattgaagatgttttgtagcttttttggggcaccttacatttttagttcaaatatgcaatttggtatactttttaaagcagctttgaaataaaagcattcttgattacactgaataagacaactttataaaacctttcacatgtgaaataccatatacagtaaaagcatcttccttaagcacatctatttaatttttttattaaaagtctttgaatgaggataagtmcaatagaatagaaatacccagtacagtgatagtaacacctttgcagtgtgtcttgttgtatagagagcaaggtatctgatacatctttatgaataaaggggacataatgtgaccaggaatagaactggataatcagtataatgagatgctttgtaatgagatcttatagtacaagaacccaagagaactggtatggtttgctttgtgtttgatctcaagacttttaaataagattttaaaaaatattaaaatcttctgactctgtctcttgcttcatcttctactaggagagttaaatttttattttatcttaaatttctatgagattgggctctttagatycaaactacgcaatccaaggattataggaccttttcattaatgaatttcctttctttagacaatatataaaggctggaaaatcttaacgtattatttagaatacacttgagtccacagattttaacaaaattattgttctaaagtcttgtgtctaggtaaataacctttgtagttccatgatctgaattctcagtgagagggaattttataggagaaacttaaaatagcatagttaccatctgggtctattccgttcaacatagtttcttactatatctgaaagtttttgaacaacatgatttcttttttagtataactttaaaaaactgcatgggtaatatgttcatgacaaaacatgtagaaactatagataaagcaaaaataaatttacaaaagaatgaaaagaaagaaaatacaaatcatcagttattatactgcacagagataaccactgtaacaatttggtgtttagctttccatgtttatttccctgagtacacatagaagtttgtgcgtttaaggagagtgtatgtgtacgtatatgcatacacatgtactattcttgcatatgtgtgtactgagagaaatataggctattatcaattccatcattgtatacagagctcagttgactgattagatattatcttatgaacgtaattctctttgctttagttaatggatggtcttacaagtatttcatatattgaagttggaattattagaattatagtaggaacctaaataataatgatagctttagttattttaaaggtgcgcatagtatagtagtatttgttttctttgttgaaatcattgacatcgttttgaaatttggagaatggtcctcatggaccagaggtagacttataagagtgcacacaactcagcctcacttagcagagatttatttatctcttccaacttgacacatacgatttccttttttttttcgcctcctataacccaagaaatgattaatgaaggatctactttgttttgtagacattatcttcaaattcccagaaatatgtttgagagttgtatctactgggaaagaaagtgagaactgtgtgttttttaatttatctttttatcatttaggttgtaatcttagttttttctccttcacatttgttaaattatcttttcctacagtaaaactattataaaggaattcttagaaatatttctattacatacaaaccttaaatgctgaatatgcacttaatctcgacaacatttctagtattaaaacatttatgatgtaatccttaaggaatatttgagataattcaccacaaagtatagcacttattaccacacagacacacagacacacacacacacacacacaaattccccctcccccagtttttctcattcgcctaaactaccagtgcttgtttttacatatagtgtatttcccatgtaccagcacattgatcagagacgcttgctgctgctagatgttttattctgtgtgttctttgtaccttacagtaaaagaatctgtcacaaattattgtggctcactgctttagaaactgagaaaaaagggaggttagattgacatctgtgactgaataatgatgaccagccttttggctctccttgagccacaaagctagcactgcctttagagtggaaaaagaagtaagaagaaaggggagggataaaagagagttacaaatctgtggtcccggagatgtattactgttgggccagttgtctgcgtgggatgataatccattttgatcttctctgtcttaattgtctgctaaagacaaatgggcagtaaaagttcatcagtttcatctttttgcttctcgtttagaagcagaataaatgatccatcactacagaagaagcctttctttctgtcacggaagtaatgcagacccaacacgttttattaaaatgttttcccctcattatttcagtcctctcagctctgatagatcttactgtttcataaaaaatgtaatctgaaatgtaaataagggtctcgatacagaaggaagaagtaatgagcagcctgattgtaattactgacaaagtgatttctctgtgccccattttttttcctccttaagttgtctgtgacaccctcagaccacaatgacatctatggtttaaaaccattaaatcactgtagcactcaatatttcatttaaaatctggtaagcctgctatctttaaacctggaaatacaggctttgttaattcctgaaagtcatgcgttgcctatattttttttaaaagaaaaaaaaaaaaacaaggcaaaagcaggggtttttcagagttcatattatttattcatctgcttttgtttaatgcttagctagtttaaatactaaaacatcaacattggtaggatcctgacttgaaaagaatcctgtatttttgaaaaattttaataacagcttacttatgaaattttcttaaattctatctcccttaactgtaatatgacgtagtctaaaatgtctttttagggttaagattactaaattacagtgtaagttttcagttactttggatttgcatagcttggactagattcttttcagtctcttactrtaactttaggtaatgtggctcttaataaaagccaattggaaaattttgttaaaggactgaagcacaataataatgtatttctttcatttctagaaattggtttctcaaatatatcatgtcaatcagacattaaaagtaagaaaaaaatgaatagctttccctgctgaaaatagtcttgtagttaattaagtgggtttataattattctattatgtttactgtgttcattcatagttatggaaataattggtaaaactttacttattgtgattagttcagttttaatgaatactaattgaattaaaggagaaaagaatggttaaattaacatgttagcaaattatggtcaccactctcatcaaaatcccatctttggtctcaaaacattatatgattttttcagattaaaaaacatgagcctttattaattayaatatttagtatgggatggtttgaaattaagagataataacctatcggagagatttccataaatagtcttgtaatgtgtcaagtataataggtattacacataccgttttgaaatgtattagttataatatgattacttcttatacgaaaacacgtagaattaataatttgtcctcacaattgtactttcatagcctgttttttctaagagtggcaattagagttgagtgtgctaaaagttgcttctccagtgtgctcatccacactttgatggaatacagtgagcctcttagagccctttaaagagtggtccaggcacagttacctacccctgtatatgtagattgctgtttagagttgcaggtaatttttctttccactggcactgaaacagagtgttataatgaaaccaacaatctttatgcgtttatagaaactataacaattttatggaaatctttatatagaaactaacagtgtttcttgtacaagctctataagcaatgtagaaacatggcacattgggaaaaattaaaaggtgccctttctcttaaggttttatattgcctatgtgatttcaaaatttcactataggcagttaaacaaattataaaaacatataccaactatatactaaaaaggaacaaaaatatgttgcataactcaggctaattgtgatggaaattggcatttctgagttgcatgtaattgcttaaatatggagttttcatctgttcatgcttgaggtatgctccatgcaaaacatttcttaagcttatagttattcacaatataaccaatgtaaatcagctggaagattctgattagagagacggtagagataatatttaaacaagayttgcaacttgtatgttgaagattgccttgttcttttggtgagagctcctgtgtatgaaaactttcatgttactttcttcaaaattttgataagccagagataaaacatttctattgtaaaacttactcatgccctgattcattgaaagaatactatttcataagaaaattatagatataatctagttcctaaatttttgttactatgaaaagaagccacattataccaacattgtatgacacaaatgtataatatttacaggaagtataaaacaaatgataaattttgattttttttgcatcattattaggcagagaaacataagmagcagtgtggtgtataaaatgtgactttgattccacaaaggttctgccagtctttcgacagtggcttgtttaaaccatgggtcttcacattggaattgagattttgggtttgtggtccttggggccttgtattcaccaagctcacaaagaatggaattgaacttgggtgtatcccatttctcttggaaacttttgagctttcttgttttttttttaattcttttccaaagtgggtgttgtcatgcttccagtactcgcaggttctcttcaaactagatccactttaaatggtgaggtcacctttgatcttggaaactttttatagcactatataccatggaacagaatttgtaaattcatttgactctcatccaaaggacttatataagggtcaaatggatcacattttaaaatggttctataatctggtcttaaaaagagcaacttatggttacaagtgatgatatgttctgattcttttttcatcatatctgtgtttggcagcagaaacagtctaggagactaggtctgattttgtatattaattgagagattgctgagtgtactatctgcagactttgagccagacaacgtagcaggtaaagaggaggagagaagtagattccgtctctcccttgaaggaacttactgcctagtaggctatagagtaatgcatgtctaggatgttttgtggaataatggcatggccacaacacttgaaagtgggaatgtctctgaaaactagaacccttgggtggtgctgccatgatcacattcctgcaatttcttgttctctgtcacatgaagccgtagaagttagtagagttaagtggtatagagaagcaagtggaaagtcttggagctgcccttaaaggtcaccttttaggttgttttagatatgtgcatttctttctttcttttttttttttgagacagtcttgctctgttgcctagactggagtacaatggcacaatctcagatcactgccaacctccacctcctaggttcaagcaattcttatgtctcagcctcccgagtagctggaattacaagtgtgtgccaacatactctgctaatttttgtrtttttagtagagatggggtttcatcatgttgaccaggctggtctccatctcctgacctcaggtgatccwcacaccttggcctcctgaagtgctaagatttcaggtgtaagccgcagtgcctggccagatgtgtgcttttctaagagtcactgttgattcttgggtttttcaacctcttgcccaaaaggctcactttccgtatttcttagtaacttggcagtctggaaacgtaggtggaaatgtarttttttcatctgcaggtataaactctcaatctctttagactattcggcctaagagctgattgttagcatgatagccacagggtgctctgctgaagcgggtttcttgaagtggatatcagtatttgtgaatgccaccaaatgtagctgttctgaaggactgcattacagatttctaaggttcattgatagattacagatgtagaaatacatcccagcttaaatatctgcttcttttgtatatgtttaaaagtgtcccattgttgacaattagctagtttaaatgttttctaagtataggttcatagataggtaaaaaaaaatagtctatcacaggttgcctcttatttttccccgtgttgttactagtaaaatatatcaccttggacaaatgtcaaggtgctttttaaagtgtttgctgaagaaaaaacacttttttgtttggttttgtgttttagagttggggtctcatctcagtctgtcacccaggctggagtgcagtggtgcaatcatagctcactgtatcctcaaacatctggactggtctcaggcaattctcctacctcagcctcccgagtagctgggacttcggggtgtgtaccaccatgctgcctaatttaaaaaaaaaatctttttttagagacgggggtcttactatgttgcccaggatgaccttcaactcctggcctcaagcaatcctcttccctcagcctcccaaagtgctgggattccatgctcagcctcagaaaaactactttgtatataagaggtactattcagtaatgtccatatgctgagtttttgtccatttccagagaagggtgaatttaagaatgggatggggttgaactgacatcttaacgaaagtatatttcaaccttaaacatttagccaaactcaattgaaaaattgagacattttctgacttaaggctcttcttttaagttgaagatttcttcccaatttggtcactccccagctgttacagttatgtagaaggaactcattaaaaagacaaattctttttgagccattctttctgaaagcacgccaagctatacagctatgttgtactactacttatttgaatctgactccaggaaatggtaattatgcaatccttacttacacattcttatgagaatgttctcttgggtttattctggatcccaaaaagccccactaaatttttgtctgttgagtactattggatggtcttgtttctagtaagttatgctatgattaaaactaaatggaccaagtctgcttttgagagaggcagtctctgttttctcttagcctcatagaatcagtcccggttgckccttggacacacctacaagtcctgttcattatttttcctaaactgctctctagtctgtcctattcttctgtttccctctgcattcacactcaaagcttctctcacatggactcttcctaatggtctacaagccagtgacgctacaatcaccaccctctctaagatggccggagatgactttctaaaacctaaatcaaatcacataacttctctttagtcaaaactcttgatggttccctggtaccttaaagatcaactccaaatctcttaacttggatttaaggctggtcacagtctgactttgacccagcctctagtcttgtctcctgccgcctccccttacagcccagacataggatgcctcatcatttcccagcttgcttggcttttcctctcctgtatattttttgtccaaactggcttttggttgaaatatttttctccttgctgtcctgcaactcctacctcagtatacttctgtttatacaccttgtctcaccttctctgtgaaacttgccctgatgaaattagtcacttcagccttagcttttaggcagcaatgggaggatccacgcctatgtcgtcttgcttgtatatctgtgtcttcatcaatctgtgaacgcttcaaatgtagaaatggctatggccaatgttacagacccctttgagcagctaggacagattgggggctcagtgaacaacatgaggtatgtgatacacagatgtaattgctcaagagttaagattccagaaagagtgcagaggaatgattgtggtgattaagagcttggactttggagtgagactgctagggtctgaatcctggctctgccatttacaggggtttaccacttggggatttgatttcctcatctagaaagtagagatagtcatagtaactaccttgtaggatagctatgagggtgtcatgatttaaaatgtgtgaagtgcttagaataacacctgacaccaaatcataaccaataattatgtcgtgtctcctattactgggcatagatttaagtaaggcagcaaagtaacctggttttggtgcctttgtcaggtgttagggttgtgtatgataacctttgcctctagaatttcagactgatccaggaaggattctggaaatgcctccctttctaaacccacactgtttcagaacaaaatttagagaagtcacaaaggtaaaagtgaatattttgtcaagtaaggatgaagagacataatcagaaacaattcctgaatatttatgttctaaaatgtactgaaaatataaaaaccctttaaatggtgatgaaggggtttcagataattactttttatttattttattccagttgtgaaatctatatgttgagattcccatgttcaaaacttcagaaatttagtaatgggaccactgtccttgtaaatgagcccttttggttgtgtgtagtattttgtattactgcggtagctttcatttttcaaatatttatatacagtacagtaaagattcctctgactattataattttcaactgtgtaacttcagtcagtttcagatttcagaagtggtataacatgaagcccagactgtgggcctgaatatatgtatgtatgtgtatgtgagsggggggagctgggggttggtaggtagaaatgaaaaggtgtttgtaaaatgagaatctcttaaaattgatttatcaaagattatttacataaattgtgtgatataatgttgtttcacagtgcttttatccctggaatattcttatctaggttgtttgtctagaagatactaattggtttttcaaaagttagttcaaatgccacctcctttgaggaatcttttacatcccccaggtagatttctatcagaaaacctaaaccactttatacttgtttacctgtcctctccctttcccaggcaggaagtcagagattcttgccggcttcgtgtccagatctctaggacctggtaactaactgtgcatggctgttaggaggccaagtatttaatatataataagtgactgaatagtcttcacactgtaatctttgggctcagaatttaagctaggtaggacaaaccaagacatacctttattaaatcccattttacctagagaggcttaaccagatgtgtttatgattctcatatttgagtgtatatcrgacatgatgcctctttgtgtagtatctagttttagcggtataacttgtaaagcgttgagaacattttttatcagagcactcttccaacctgccagatacttatcatttctggagatctaaacccctggcaaattgagaaatagctttcagatttaatggcagctagaaatactttttattattcatgtattatttatgtcttaagaaatatcccctaccccttaaaatattacatttttatttttattattatttttttttagacagagtcttacccagtcacccaggctaatgtacagtggtgtgatcttggctcactgcaacctctgtctcccaggttcaagcgattcttcttcctcatcctcctgagtagctgggactacaggcatgtgtcaccacgcctggctaatttttgaatttttagtagagacagggttttgccatgttgcccagacaggtcttgaactcctgacctcaggtgatccacccaccttggcctcccaaagtgctgggattataggcatgagtcaccgtgctcggcctttttttaaataaaatgtttaactcaaagaaaagttaggaggcaaatatccccatgttatatgagatttgacttttgatatgacactttgggcaaagactacattttttggcttcatctttttcatctgtaaaatgaaaaagtattaataatactaactttgtagaattggcaggaaaagtagccataatgtttacataatacctgaattcatctagtttaataaatgttttctgatgtagtatgaggaagaagaagtttgatgcttctgtgtaattgatgatgtctgatattgtatctacatcccagaatgtagacaagtccttcctgtagataaagagcctgaagtccagtgataaaacctcactattttagcaccactctccagtttctcatcacaaggcagatgaaacaactgtttattattttattgccctccagacaagccatggtttcccctctaagattctggtggccatagcatccaatccaggatacttttgagactgaaagggagcactgtgactacacagaaatcgtgggcataactgggatgtcctgggcaaactggcaggtgaggttaccctaccctaaggcccttcaacagaacagcacaaacatttcactctattcctgcaagttggaagtgaggttggagaaaggctttatctgcattcaacatggagggctagtactgcacaaaatcttagctgtgtgaatgcctgtgaccctggagacagaatgctaatcaagattctcaatctccatcctttagtagagaggtaggcaagttacttcaccagtctacctgaaactaatttaacttagttttcaaggtgcattccatcgataggaggataatatctgcataaaattagtggtaggatcactgggtatgtaacacttctagcaagacctgacacatagtagttgctttatcagtccctttccacttgttacttaaccccctcacccacagccgccccaagaaaagataaccattggtagatgaggaaccaaataaagtctaaataggttagttccacaatcagaagaaactcctataggtcaatttagatactttatatatataattcatgttattaggcaaaaatggtaaacctttgacaaaaatgtgatattacatttatacaaactttaatagtcttccccattcctttcattttcaatgtcaagaataaatatttaaagtttgattctctgatcaattcaagtctgtgctttggcccatgtggtctcactgcttcctatgaggattaaacaaggaggcatgtagactttagcacagtgcatggcaatagtaagtgctcagtcaatgctatttcttcccttcttaatccgawctatcatccaatcatttttttcagcaccatcattcactggatgtttcctctgtgccagatactctggggaacactggtaatgagtgtaacccccatcattcttaactcattctagagataatggtcaatttgatgataggaattatagacacaggacaggattctggggtgtcaacttgggagaggcgagaagctcactgagaatagcctctaagtcctcctggggtccggaacatgtggggtggacggagggttagaaagtcttgtgcaagactgggcatggtggctcacgcctgtaatcccagtactttgggacgctgaggcaggcagatcacttgacgtcaggagttcgagactagcctggccaacatggcgaaaccctgtctctactaaaaatacaaaaattagctggcgtggtgggggggcgcctgtaatcccagctactcaggaggctgagcaggaaaatcggttgaaccctgggttgcagtgagccgagatctcgccactgcactccagcctgggygacagagcgagactccgtctcaaaaaaaagtctcatgcaagtggaatgtgaaaggatctaatccatgatctggcccctgccaccctgtctagtctcctctgttccagaataccaggctgcttttcagttccttgaatgtgccaaggagcagaagtgggtgaatcgcttgagttcaggagttctaggtcagcctgagcaacatggcaaaaccccacctctaccaaaaatacaaaaattagccaagcgtggtagtccgcgcctatggtctcaggtactcaggaggctgaggtgagaggactgcttgagcccaggaggcagagattgcagtgagccaagattgcaccacttccctccagcatgggcaacacagtgagaccctgttttgttttgtattttacaaaacagaacaaaaaagaataggaamccggagctggagaggtagttcagaagtgaacacttgaatttgagagtcatttaccttgtgctgttaattgaaactaagktataggtaaactgctaatagaggaggacgcagagagagaaggagaaagataaagtcctggaaaggagttgagaaggggcccagaaatagagcagtgagagaggcaggaggaggcccttctgtagtcttcatctaatggaacgtcattggacaagcaatgtgttttgagtgagtggggagtagagcaccagaaaaggctttctgctctttcaatattgctttaaaaatattctaagccaaacaaaccccaaattgaagagctctccattatccatagagcatgaattcatttatctgtcaagaaaacccatggaccttacctatagaaatgaactatattgatctaagaattgtctctatgaagagtccatgccacaaaacagttgtgagttttggatggtggaaacatgttttatttttaattatttatactttaaacatttttttaaaaatagcatatttgtatgcggtaggcatttggtcatttggcaacaatcacatttgaatcgttgaattaccagagaaccaacatgactggcattggcattttaccttttaggatttctgaatttgggtttttgggtgttggtgagtttgtttgggttatgcggtgtggccaggctccttaacactctagatcgggtttggcagactatagcctgaagccagctggtcacatcctgcccggggctggattttgtatggcctatgaggtaagaaggttttttacccttgttaaggattgttaaaaaaacaaacaagaacatgtgacagagaccataagtggcccgcaaagcctaaaatatttacaatctggcccttttgagaaaagtttgccggctccttccttaggttataagttacacatgaaaggaatccaaaatttcataggataagctcaaactgatgacttcaattccagaatgtcttaacactttgaaagagtgacttacctgttgaatcaggagaacacatttttggtggtgaaatgaagacttgatcgaaagactgccttgtatgatttgacagtacagtcagatggtaaaagaacttctgtactgtatgatgtttcagaatagttctgtaaagtgtctgaatgtactctggtaccaytgttgtgtttaatttgtccgaggcagcctcaggtaaacactagaatctgttgcagcaagatatgcaaagtaaaatgaaatatgtatgtgagattgtattattttattgtattttgctggacttctgaagggacttttttttctacttgcaaaaaattaaaacccttgagtgttagatgttagaaaactttttgaattatataatttctttatttcagtagtgtttcatatcacctccttctgtctttgtaatgaaatgtcatcaatctgttctgagcataatttttttcagttctgaatcctccttatcctccttatatcttcctattctttctatcagaatctgcaagttgtaggaaataaaagttgatttgaaacagttctgtaacactaaacagatgactgtttagtgagacgttctaatcaattgctaaataattctctctcaaaagcagatttgatatttacattttgattttcatattctgctcacagtgtttgttgacggtggctaacattccctgccactggataaataaagcctattatttccttttcaacattttaggctattattctcatacaagagctaataagcagaaggttaggtatattaccaaacyatgatcctgtctatcagaagaaaccaggaaccttgattaatatgccttgttaactgatgatttcagttccatattggtagtgctagaataatttgtataaaccaagcagtacagattccttattttagcactaagacttacaaaagcttcttttagcagcctttaattttgtacttatgtatgtgacatagcctgtggctgtgatagctactgtgaagctgcagttgttttgggatgaaaggaagaggcagctggaaactcggtagctacatctagctgtctacctagagaaggccttgatttcaagtttatctaaacaagctcgactaatcccaactatctagggggatccactgtcaaaacaagcagcgtggccctgaggcaaacacagctatacagaaatgaaggctggggcttccaatactccaatgactgcatactggaggcctttttcccccctgaaagagggtaagagaggtagaatttgcataatgccttttcattggaaacttttggaaagctgacagaccttcagcttatagatctgtagccacaatacagagtctataggagaatccttgaatgacctaaccatattgaaagaaaatataaaagcgtccaagtatagccaagtgagagaggaaaagaggctgatgcattgtctaacatctgctgtacttctcgttagttttgttctttgctattctgtgtggactttggagaagcctaagacagcctaacatgaatcctataatcttccttctgaatatttatgtagcgtgccagcttctaagctgtcctttgcgttttcctacttccccctcattttcatgctctcaaatgaggccaacatttcaaaagctaaataaatgtttgtgaatgtttataaaagatttgcataaatttgtccttgtctgacaaagatcacttttttcttatgccagttctgaaaaaaaatttttttaaggttttggtgcttgtcttgacaacagagtcctgcatcccagaacaatgattgctgattaagtgggtatgcaattgtgactgaataggctttcaagattctgagtaaaaagacctatcatctgaaggctgaattatagaatttagaaaatgttatcagaagtacacatttgaatctattttttggtaccatatcattaggtaagacaaagcattcttacaagttaaaagtatagccacccatgatttaaaaaattatcctgtataaattttaataattagaatgtttcaataactcagtatatcacttttcttccctatgtttgaacatatttaaaaataatttttagacctttaggtactttttggaaactgtaactctaccagttgtatgcgttaatacggttactggggtggtgatcagagggaatttaccaggcagtcctttaagatatctgaatgctcaatcataccttgagaaaatataaactacatgaagtatgtgttagggcttaattataggacacacatacacagcgcccagacacttatgccaccgacgggtgtttgctgaattcatttatcttttacaattagaatggattttgtggggtggcaggggaagttgtgggtagaggtgctaatttagttcagagatatttgaagattggcaggagagagaggtaacagccagttctgttagtcctttggttgtattggtttagaggtttaagttgtcattaaggcacaaactagagccacttctctgacacagtttttatcacatctgctaggcttgtgtcccaagaggagacgtggagagcagcgaattcagcatgggcccattatcgactgctttttcgtgtgttgtaaaaggagtgagacctcagggaggcttggagcctcctcccgtgtaatgtccaagtcagatttgaaggactggtggcaggaaagctttggccttggggtgtgaattctaagaaatagaggcacaattaagtttaaaaaattcaaggactttgagcttgrtaatgaaagatttttctctagactaatgtgagcagaaaagttgcccatctgtgcacatttttgtgtgcatttaaaatatttaaaagctgacagcttttaatatgcttacaaaatagtatttctatcagtgctcttttttttttccccttttcttttaaaatagtatcttcctaagggcaagttgcctcttcaatgaaatcatgtttgcagttttactgttgggacccctattcctttggtatgttctgacttgtgtcccctcctccccccttcctttcagaaatattgataacataaatgtgcagataacaggaatttaaatgcttaaggaaatgagcaagagaaactattttagagtaatcatattaagtccaaggaattaccactgaattctgattagccactgaatgctaattgtaagagatcataaccaaatcatttgttcatcttggaagtacagtatttgaagcatgtgtgaagaattttattggcatttcatgctgaccttataaatatagctctcattttcaaccactttgtgtaagatttaaaattaataaaaggaatcttggaatagaggatgttatataatatcatgattatggaacaactttgttttagctaagtttgagaaagaggaggatgcaaaaggataaagttaattttgttaaaaagttttaaaaataagatggagtatttttgcttcagacttcaaaggtcatgaaggtgtataaagtggtttcagaggggtctctttcactgttgaaagccttcttcttctgcacttaatgtccttgataatttagatacacagtttatatgaaacatgtttatagagtatgatgaatttattatatttatctttgaattacaacattaatactgcatattaggtattacatataaaattgcataattataacatgtatatgactcaattaactgaagtttataaaaagtaaactaggggtaaatattgaaatgtaccaaagaaaggaagcagactctgtagcatttgagcagcatgttagaaatttgacccggcttttatgtttgggtgttgaaaggcctttctgtaaaaccccttattccaggcttctttttcccactgaaaaaaaataaaaatttggttgtaattatactatggatcttagatttaatttgacacttatagtgaaggagaaaaattttatttcctgtgttcacatttaggaaacttctgatcaacattcttgaacttggtgctaattaagcttccaggaacaactgctttacccttcttaatcataagcatttaaaacctttgtgagctttcactggaagcccctggttttaacttgaaatggcttaaggtagaaattttgttagcttttttgtatgtttggattttgtgtgtgttctgtttttaactttcaacttgagttttaagatcgtcaatcaggcttttctttcaagtcagtggcactgcttgyaattgcaggacttagagggtcagcatttcccttatggtattaaaaaaaattaaacatagggagtattttaggaatttgagctccactgatcttttcatcacacacctacattttgaaatgaacaaataaattagatataagaaacccaggaaatgttctcccatggtttcccttccccttcctctttcactgtcgtttttggacaaaggtaaattatcaactgctatatcggctttcagcaagccacaaagaggctaattgtggctttacatattttaaaatacattcatttattcaagctatctcttctctttatttaaatgttttcctgcaccatgtttttccctttgaactattgcaaatatgcctcatctccctgcattctgtaactccagtggacactataatcactctgcacttttatctttcagatggcatttatttatggggtgtgtatgtctgtgtctgactgtcagttgttttcatctgccaaataaagctaatttttgtttataagtttcaatgaagcaatgaaaacaaagtatttgacatctggaatgttggtcgttgcaggatttcctatagccccctacctagcaccccaaggtcagggtgaattagtctagccttctcattaataatcccagttaacttcattgaatttggtcttcgagattttgcttccagataggattctataatggataatattatacatttaaaactttactgggttcttaggctcagtatcaacagaatgtaatctaatttctccagattggagtaaattcgggccttctgaccggatgagaattagaattggatgaagtgaatccaragtagactgaaatgaatcttgagttcatttctgaatttcatttgcaagtgtatccagcgttaggtgtgttaatttcatattttggttcrtactctgaggcttggtgtctcttgtgggcagagctttgtagatgttacttttctattacactatgcaatctgctgcttcatgtatgcataactgaaagatttgtgcaactgcctctctaacacacttcctccctgccccctctgctcttatttcttcctacatgaagtatcatatattttgttaggaagaaaaacccttttggaaattgcctatttcataaattgtctggtgacacaaaggggttgaatgctgtattcttgtctcatttattttgaaaactttgctactgaactcaccttaatcaatgagctcagtgttgtctccaataagttatgtgttggatatattgattgggagggattttagaaaacccgtctggggtttataatgtcagcagtgttttgattatgaaaagagttggaaccaggggacatggaaccaggtggcgaatgtcctaaagccagtggtgacatggtggactggtttcctcctgggatctagttcatgccctgcactttaactgtggtgactggctactatagattcacttttttgctcattaaaatgttaaaaaatcaaactgtacataaaaagatttgtgaaaatataaacttgggaattgatctggagagctggcacacagtcctccccaccccctgccttagcaatgaggtcatttacatttcatcagctgtgcagcatccccaagatccgatttatgtggcagtagttgaagttgcaccgaggctggttgtctaaaagagcttgtgtaggcaagagaaacgggaaagagaacaagaaaattaccttctacaaagaaagtgccctagccaaagacacaagttctagagagaaaaaggggttggtaactggttaatgactgttgtcccaataaagttaatattgaaagactgtgggacactgccatgaatgtggtactcaaaatatatttaaatcaggattttaaagcccccactcttggagagtggtacttttcatattcgaataattttatttttctttgggaaaagatgataagrcatgaatgtttatgtgtaaggaaaacatcagtattaagaaaatgggtttatttaattgatttattaaattggtttattgcagtttttatttacagagaacattgcttgtttttccctccctcttcctgtcctccccttctcaaattaagaagtagatacctcagttccaattgcgataatatgtgaatatgcagaacacagagtagatgctcatttttgttttttcttctgacagcacaccaccatcttgtttgacttaaattggaatatcaagctcttgtaatatcacaaacatgaaggaacatattgtaatgtaccaacatgtgcctacattgcctatattccctttccccctcccctccccccatcctattgcttaattagatttactgctgtttgcttagataaaaaggaaagctggtgggtggttacactcagcctacattgggtattttgatatttgttctaatattatctgacagacaagttcaaggttggttattactcttgacattagagagtggtaagaagtttctatattgtagtgagtaataagttgggcatattagattcctttgactctgctgtaaagcacaatgccttctcgtagccaagggggtcctttctttcaaaaatctttgaggccttttgccagtacaactccagcatagagtagagaagtgctttctgcacctataacttttgaggggtaaaagatagctttctttgtagctgatattggcaatgagtgagcactgaatactgagttttaaagaatggctgtttcatatactgaagttaagagatgctttctgttactattcaaaacttgaagtggaaggaaatttgtaaggaatttgtgtgtgtgtaaatcataagggttttgtgtatgtgaattgtagtatactttataattagcacagcaggcattaaatgttttatgtgatctgttttcctatctttgcctgataataacattatgcactgaaaaattgcctttgttctgattctgtattacctattgcagtttatctaagcatgattagtttataaacaatatatatgcctgaatgccacattataaagttaactaatatataagtaatgtttcttaggatatgctgaggtgttctcatccactctttttcacttcttagtttcctattcattaattacattatttcatgacatttcttagcagtgctgtgatatacatagtaccagtccaagatgatattaaaaaataggatatgctcaattgaattatgtaggcggaacatgctctggcagagcaagtcaatgtgctttctgcttcattgagtgggttattagattgatgtggtttatttcttgaatgatagaactggttttaaaaataaatgaagcgagaagcatcaattcagttagcattgataattcattattattggttagaaaagtgctacatttgtaagctgatctttaatttatcacttggattagggtttgcaatgggcaggtttgttttaatttgaaccagcttttcaatgactgaaaaatgtgttcttcattttgtcttgaagttgggattttaaatagttaaaaagcaaatcaagtgcatgaaaggaatacttttttaaaatttataacattggtctatgaacttatgataagcaccaaccgtgggctgtccaagtctgaagttaaattaagttaagctaaggaaaattctgtgaaggaaataataactaactacctgtctatgtggttagctgtgtgtatatgtgctatatatatgaaatgtgtcttttagggaaagttatacaccactgtttattgtgtgtcatgtactgtttttttctgtggtaatgtaagaagattgtcttctatgaataagttgttaaaatgtcaccttactttgtgtaccctaatcctgaataatgtgcttggctttatgtacctatatatgtatttttttagaaagacatttaaactggtagtttgctttagatttyaatacattaaaattaggtgagtatgttcaaatatggtgatatttcaataagaatagtatatacttaaaactgttacagtttggttccaaaataaatatatgcccaaaatggcaacttctttgtaaagtaagtaaatgaagttttaaactctaaaaaatgtagctgacagtgttcagggacaattatcttcaagttggctttcgattctgctgtgatttggcctattgatgttgggaagcgttgtctaatcctggccccctctgttcctaggtaacaggcaaaaacggtgccagcaacagcggccctgccaggccaaacccatgtggctcggtgttattcactctgatccatatggtcaggctggagatgttccctggaggggtgttaacactcagcaacccaaccgcctccctcccttsagagctttcctgcatggctcctgctgcttgcccatgtgtgattcttgattaatttttcatttttaatgaagtttgatcatgtttattatttctcatgattgactgcctggtactcctcccatgtaattgataaagcccatatttcttcatctgtctcctctttctttagggtaaagttgctagattgtgtgctgtggttaatgttagatttactggtcccattagatgtataaattatctctctttctctccacaggaagttctacagactttgaccaagttttgtttccccttctatgtggacaggtagtgtcagattttcaaactttactagaaaaaaagtrtcaataaacctgctatagaaaataaaaaccrtaccattcttaacattctgtctgtttaaccatgatttaagatacctgtgttccaaggagagttgcaatattctcccttcctggggtttttattgacactgtcaaaaagtttaaagcttagagctttgcattggttagtttgtgagatgtattttgtatggcattaaagttttgattttgttatcagacttaaactgtgattaagaatggttggtatttaatctcttgctatttaattgttatttaaatatgaatatatttggcttaaacaagtaatattacttgattccaacgttttgtattatatagactttgtttttcctagacttcaacttataatttaaatcagcctagccctatcttgtttaaaagtattcagcagggaatattgctaaatagtattttatattttgtttaagtggytaagaatggtatctctgggaaaaagagaattttctatagattttgagattaaaagtacaaaaccacctaaacatttccttagtatttacattgtgataaactgtttcttagataggtacaaatatgagaactctaagacaattaaaatagtctgaggttttttttttttctttttarcgagccactggttaatgataagaattttagaggagytttttttttttactttataaaactartgtattaactatattaataaaataacaattatttyattttcaaaaaatgtctactctttttcattmmagttgaakcattagttttttacattcatttatttgcccatttgattgttgtctcttcagttttctcttaatggaaatttgaactatgaaactgtacatacattacatcttaacaaacccacttttattgacagaaaggttatagaaaataacattgtaagtaagaaatgccataatatggtccaagaaagctataaaatttgtgcttatcttcaggaagattctatcatgtattttagtgtacccaaacaaggcaaagcctgtaagatttcagtgatttagagtatatgtgggtagtatgctgtttgcatcttttctacacattgtaataccactgtcgtggtttatttggcataaacctaaaaatggtatgagatgagaattggtagccaaaggagtttaaaaggtactaaaaagcaactctggaatgttgccagccacttctaatcactgctctccctggttctaacattttattttttcttaagccaatcaaccattatagtatttccagactcagaccttgtaaatcctggtaccaggaatatttcagtagcaggttgatgctcaaaaaagaatagccttaattctaagagggtcagtctttgtaatgggagtcgtcttgtctcttctttagcctattcctcctaaaaatgcaaggaagtaaggttttgtttagagatatttaatgcaaacttcacatttatatgtatgaattagctatgcatgaaatctcctccagccacttataaaatgtatgacaaattatggcaaagacatatttataaaaagtaataaaactgaaatgttttataaatgcagttaggtgtttaataaagaaaaataagagaatacatttttacatgacttcttgttagagtggtgatttgttttggataggtgtttcttaattgactttgttaactgcttaaggaagtgagcaagagaaaatattttagagtaatcctattaatgtttactaatgttagaagaaatgcatagagattaaacctctgtcttccccaccaacacacatgtgcaggtgtgtgtgtgcatacacacatacacacactgattcatatttctttttcttagatgtataccatacacacacttctacttacctacctgtctgggtgattacattctgaaatggaagaaaagcagagtccttaagtgataattctaaaatcttttttgttaccaaaaatatctgatgcctttttgttgttgttagaaatatgtttttcttccagaatccttctctccaaattatgttcccctaatcatgttccttttttttttcttttttacaaaaggatttgaggacagaaatgtttctttttgaatatttcattccttaccatgtacaatagttctttcttacattgtattatattacataccctatgggtgttgataacttttattgataccaaaaaatcattttatgtggggactatatattttctttctgttcccccacctctaaccttggtatactttaatacagaagagataataataatgaataaagttcatttgtaagaaatataaaggtttcaatgtcttaatttttttattagtttgcagttagcactgtcaaatggatatccccagattctgaggcccataaagtcccctagatgggtttatgatattgtttgacttagaaaatatgccagcctgggagacaagtaatgccccaggtgattgcgttcaaaaaagaaagcttcctgatcttttcagtatctgtgcttttctaccccaaggaacagtcataaaactttctgacatttctagtctatatcaagaggtggattttcacagtcatcatcaaatcacccgttaacattgacatcttgctgtctcgtgtgttgttttaagatttttctttttsaaactaggacttaggaaaaataataaagccagtagcttttcaaaagaatgtgcttcctcatatattatctcattttatcctcctatcataagagataagagcaggtgccattatcttcatttgaacaaaattctaagctgcagagaaattgggacttgcccaaggttctctgagcacaacctagatttccatctcccagacaaatacgtttcagtagaccaccttgcagggaagaccagtcaccaaatatatagagaagaaggaaaggaaggaaacgaggtttgatttccttatcgattctagtcaaagtgctggatgctgccacatcactgtctcatttattcttcctagaagctctaggagatagatggtggtatcttttttacaaaagagcaaaggaaggttcaggatgtagagcattgtgttgggtaatatgggggataacggaaatggtctcagacttggagccctgccctcccagtctagtccaggaattataaagacatattaaacaggatcgacccaaaggatagtgaggttagagaagaccaaaatggtcagagaaaacttcttatggtgggggagacttgtattgagtctgccaggacagcaagaagtgggcaagtgggagggagagcctaacaccccatcagcactgaaaagcaaagcagaggagaagccccgagtgagcctagagcttgttcagccagagcagatggagctcgctggggagagggtgactgtgagaacctgggctctggccacaggaggccttgaaaatgtgtggaaacaagaccacaggattttaaaactgaaattcatctggttcaaactccccattttatagaaggaaaaccatgatccacagaggtgaaatgacttgcttatggtcacaactatataatttacagggccaggaaaggcactggtactctattcctaatccagagttatttctaccctacagtgtacgtgaagctgttggtgagagggagtagtgaagtgtcagtgttgagattcctgtatcaatctcaaaaactcattattactaataaaaatagtctcttaaaaaaagacttgtaccattccatatcatgtttgctacttgcttgcccttgatagctgacaaccagcttcagttactcaaagcacttgagacatgcattggatgatggaaaagctattctcttccatttttgtgtttatcctctttcagaaccctgaaagtcagctaccattccattttcctgtaaattatactggcacacacaactgacaggatagtcaaatgcaatgaaataatcttttcagggccagaggcatcatttaatggtcaggatgtaaccccagatgcaaatgtggctcaaatgctacttaccattttattgggcatctgttttgtgccaggcattgccctatgttcttttcctgtaataaaagattacaaatttgtaaggttaccattatcctcatgccacacaggaggaaacagaggctcagataggcttgataactacccaaggtctcactaccagttagtggtatagctgcttgcagaaccctcatttgtctgacctccaactccaccatactttccctgttttaccatactgcctccataagatccatcacagcataagtagcctaacaaacggttttatttcaaaagcaataaascaatatatatttattgtagagaagtaggaaactgagagaaagaaaaaaatgaaacccacacagacataggaccagtgtattaacatcttatcttcccagacctctcctctgcagattcaccctgctctcctttctaaacctgaacccactgggcccttgaagtcccttggtttagcatacaatataggttcagctgtgccccatgattattttctacagtgttgatgacaacgaagcagctgggccttagtggacagactattgtaggcagcaagcaggagatctgggttttggttttggttttaccactgccctgctctgtgctgtgaggcaagtgacttctcccctgaggttcttcattttttcatggataaaatgagggaattggattccatcaatctctgctgttccttctgcttttgatacttttaaattctgcagttatgcttcatgttgactttgtcaggctcatgtagagggaatggacagagctctgctcttagaattgtctggtgagtttctccagcaggtaggcattgcgttctgtctygaagtgtgtcacttactgttggtcccctcatattttgggtccatgtcattctcaccacttggatctttgagcagggaaggtgagaaacttgaggcctaggcagatgtaaggtgtgtttgtggaaggaagctttgaggcttacggaactaaaggctgggagatgtggtagtttgatgaagcttcattcctgcctcatgcctcatacgcactgaaggaaaggaaaagtgtctgttaggtgccctgccatggacaacagataattgtcggtaagctataatacatagagggggacaaaatgcttcagttctatctcttgaattttataattgcataacagtagtgatgatcatttttgtcaggtacctactatatgctagttatcttgtatacattatctctaatctgcaaccactctgcaaagtgatgtgattattctgatgatttacagatgagatcagagaagtataataacttgtctatgcccacataactgctgagtaacatgtctgggattctgatgtaaggtccaggccttaatgttttctcttctgtcctgcatcataaatctctgcctctgctgaatcatttccaacagcttaaaaacaagttctggtattcatcctaaaaataataaccaccactcagttgctttctgattctctattttttgaacgagttatctacacacttcaacttatccttcagccttcttcagcttgtcttctgcttctgtcattcaactagagctgtttttatcgaggtcatctaaaacctccatattgcttaattcagtagacattgttttttcttcttctcatctttgatgcatcaatacagttgaccactccctcttgtttgttctgctggctattctcctttctttggtctcttctccacccatcttctaaattggtgtttctataaattagtcctggatcctcttttgtttctctgaactccctccctaagtgatcccagtctttaccatggtgttaaataccatctgtttgtagatgacttccaaatttgtagtttcaatccaaacgtttcctctgatttcctaactagtgtattcaactctgtacttgacatttctatttagatgttttacaggcttctcagacttaacatatcccaaatggaactcttggatcttcccccaaacttgttagtctttcctatcttcaaatggtaatattctgcctttttgctccccaattcccagtccatctgcaagcctgtcattcatatctgctaactataacttgaactatccatccctctccatctctactctccctacatgagttaagccaccatccagtctcacctggactactgcaatcacttccagattattttctctactcctacttacaccttcttccaaactgctctctgtataagtcagttgaaatatttgaagctataaaccagactgtgtttttctcttgatcaaaatcattcagtggcattctattgcctccccccaccgccaaaaaaaaaaaaaaaatctgaattctttaccatgacctgtgggactctctgtgtgatctggagcttgctttatctagcagcttaatgtgatgccactttcccctttatctcctgtgcattagcaggactcctgtccttttggttccttgatcataactagytctttccagtccccagaatctctgcctagttcttttctctgcctgaaacaacccagtgccctgtttcttgagtggctkctccatttcatcctttggtcaatattgttgccatccctgagaagctacctctgaccacattatctcagtagggcctttccttcccttccattttcctctatcttcgtttcttctttggttttgtaataccactattacaagctgtatgttttgtggtatacttgtttattacttgtctctatctagacagaaagcctgcaaaggcaggggccctgcctatattgttcagtgttgtatatccagcacttgttacagtgcccagtgtagttgtagctcaatttgcaaaatggataatgaaacttaaagtgaagctcacatgtaaaagtttgtttctcactgggagactagaatcaaactgtccatcctcatgcttcataccattcatgcactggccctgtaaacaacttcaagattaagcaaaatgctactggagaggccctgaatggctgataggcatttaaaaggaagcatgaaggtttaggtctgtggcttgaatagctattgcttttctcccttgtttttcatattcacctaggcacgggaagctacaagaagcacagctaaggctggtcttggccctggtctcctgggtttatttctggagaacttcaaatgtggtctccctagcttagtgaaaaatatggttttttgttaagacaactatctgaattcctcgcataccttagttccttaaaccgagttgaaagcttcccagggaggattttcattgtgtttagtgcagcgtggcagaatggaaaggactttgaaccagaagttggcttggatttttgtcctagtcctgataaccttggaaaacaaaatgaaagtaaaccctaaatatcagttttctcatctgtgaaacatgagaattgggtgagatggtttctcctagcttccatcatcctgaaatctctggttcctttggaaattatggatgctgaggtaaactcaaactgcagactttaaggaagcagaccctttccccaaggtcatttttatggagaaatagtgaacactcccatagactaccccagcaagtaggagagagagaatgataaattccttggagattcagaacccttttaagttaacctctttgacttcccttgccagacctttagtttattggaaattgtccaaggaaacaatcttttagagcctactggtttkgggcttttgtcgacttctacttcaccctaccaggaattaaaaaagggaatcaattgagaataagtacctcctggtaagctgtggcaccccaaaaagaatctttttcactgtaaggcaagcatcagtcacttggtcacccagaggactagcctttcctgaaaaatatgcaacaggcaagagagaaaagaaagcagacttcttcctctactcacagatattataaagctgaatcaggaagattctaagcaaaggcctagtttttaatgtgagttttagttttcacagttggcaacagcttgcgtccctctttttaattgttcctactctggactgacctttatactaaattcttttccatttattctcaaaacatcctttgggttggatggtagtgtctcattgttattccaggtgaagaaactcaggtgcttaaaggttttaagtaacttgctaaatttagtcagtgattgagttgggatttgaaccaggtaaatgagtaatgattctttctctgagcctgtagggtagctaaacacatttccagcatttttaataggartaaaaagagagtaggaaattaatgacacacaattcacaagtcaggtgcattcattctctgtctttttcctggagaatcctgggtgttttcttttcatcgagtcctatcgatacccttcctttctaggatgatacttagtattcattttaaacattctagaagtgaaatcaaaacctgagttaaaacactgaacaatcatattttgtatgatcacgtagtagtgtttcttaaaagcacaaccttatttgtaacttggaatcatccagacctgttgctttaaatattttaataaaacaggatttcccctcccccattgaggcccacttttctccccaatcactttaattatgtgagctagaatgctgtttctcacacatcttcagttctcaaccttgttaaaattaatcatataatccccctttaaaacatagtattaaatcaccatagtaacacagtatccaagctttatggataaaacataacaggcataggaaggtagcgtttggtgtccccttgacggccctataacttttatagaaatgtgtttcttctcctggctgtgtaaggtggagggatagcattacttacacctgctttatgaccacgttgcttttaaattgccaccttgtttttgttcaccttcctagttaaataaggagagtggaacactttttctttctgaattattttcttgtactctctaaccactctctaagagatggagttgtctccttaaatatgaccaggcagagtccattgacctttgtattggaataccttgaaaattcctttaattttaattatttatgtggctgtataagggagttttagaaagtctaccctatctttgaaaactttattcatatcatatccaaagactcaataagaattctacctttggaaaaagcttggtaaaccatgatttttaaatttcttctgataatttataaagtaataattgatagcatagatttgactattttaccaatttgaatacactttgtaaaatacaatatgagttgatgagttcctttgaataactcagtgttgaattctagcatattacgttaatataaattcatgtattagaatttggattttttaaccaaaaatacctttattttaatcttcagagaaaaaactcttttcttctttttctgagataattactgtaacttacaaaaatggatatacatcttcaaaggatttcccttgaatgcgaaatttagctttatgggatctaagcatttaaaggtaaaaagcaaattctattttgttgccattataagacaaaactgaatctagcataaggtagggaaacccattcactcttcaggttcttctctgacaggaactagcattgttatattatttccacttagcaaaatctgctctaatttaattatacttcttcctggccaggcggtaatcccagcactttgagaggctgaggcaagcggatcacttaaggccaggagtttgagaccagcctggccaacatggcaaaaccttctgtctactaaaaatgcaaaaattagctgggcgtgttggtgcacgcttgaaattccagctactcaggaggctgagacatgagaatcacttgaacccgggaggcagaggttgcagtgagccaatattgtgccactgtaccccagcctgggtgacagaacaagactgtgtctcaaagtaatagtaataataataacaacaatagtacttcttccttctggtgtgatttcaaactcagtgacctcttctagtccatcttgacaaagtcatcaactcctagaagagtacccacgatttcttaatgactcttcaccacaatgtgaattcttgagcctatacatttgtctacaagctctagcagcaacagctgggcaagtaggtggtagccttagccgccataactgtgacggaagcgggatgtttaaatttttaaaatggaatgaaatccaagctaactggtaaactgattttaaaaactggatttttagacattttacaactttaaaaaaagagtttggccgggcgcggtggctcacgcctgtaatcccagcactttgggaggccgaggcaggtggatcacgaggtcaggagatcaagaccatcctggctaacatggagaaaccccgtctctactaaaaatataaaaaaattagctgggcatggtggcgggcacctgtagttccaggtactcgggaggctgaggcaggagaattgtgtgaaccagggaggtggaggttgcagtgagctgagatcacaccactgcactccagcctggcaacagagcgagactacatctcaaaacagaaaaacaaaacaaagagtttctgtaatctgattagtattgtttttaaaatttttaaaaatagatattttaatgttgcgtttatgtgtggtttttaaatttttgtattgatatatttttagcttttttcctttaacgtctttctttaaaatgttgtttccatttcttagaaaacaccatgcaatgctagacattttggttatttctgtcctctaaaataggaaatatgtttctcataaattcagaaattatgaaagatataggaatttaggaaagtaacacctaagcttgccctgttttctttccagtttcaatttcagctcctcctctttgtagctgtgtgaacgtgattcagttactaaggatgtattctggtccttagtttccttttctgtaaaatgggaacatcctctaaattccatggttgtcctgagagtcagggagatggtctacgcatatatgatgtctaactttgtggctggcacatagtaacatttaccttttgctctggcaagcactcttattttctgaactagggaagttctcaggtgaggattgttagcagcaagctggtagagtggcctgtggaatcagcgcgagggttaaaatccagctttttgccactgatcagctgaccttaggcaatgcctctctagactatttcttcatcagcaaaatgaggttaatagagggcacctttcggaattgatgggctgactaacagagctgcctcagagactgaactcagtaaggagaaggtatgatagctctgattatttgatttctgaggtggtcactagaataggctgctggctgtcttttttttttttttttttttaactagcttacagtctgttcccttgaaatgtgtaaattttaagagttccactgagagaggaaatgttataagttcaacgactcattgtgattagatactttatcaagaaacttactgcacattcattttcccctttgttctgcctttgctgcagcctcacagttagccaagttggccagaacttcacrttcgtgctcactgacattgacagcaaacagagattcgggttctgccgcttatcttcaggagcgaagagctgcttctgtatcttaaggtaagggagaaggcttgggctgttggcttgttctctgaagcaatgtcagcttctgcattgctcttccrtaattaaatcttccagctgttcatttcattttcctatctgtttcccacaagtcactgcatttggggagaaggacttcacagtgttgttcttgcactgtaagttctgcagataattgtatttatttatttgtatcacatcccttgggtgggaaaggggaccatctcttctgagtagtttgtggaagccagagagtcagtgtggcttcagtgccttctgctgttatctggagctgtcagaaattagcctgttagactttctcttggacattttgtgtatgtaagattattaataaagtatgtgtctgtagctcaggacatcttgcagacacagactgtgtccgccttaaagtaacacccttgccccctttgggtcggtgaatgaagaactgtgtcccattttggctacctctgtagaggtttgaaaaaattaagaatcgtgtaagaaggcttcttcaggtcttctaaaagcccctcatacaccagagccacacttgcttaaggctctgtttcctcctgccagaggggtaaggcatgttctgaggtgggaggatgtgtggaaatccgattttggagctgctggctctgtggactcctgctgggctcctcctgagggggaagtaaaggcatcccccatgctcccctctccatctgccttggttaagtaggtgtcagaggggcctgcctcctgtctctctctgctcatgtggaacagccagggcacagcagcaggaggtgcccatgacaaaacccgggcccccaggcttgggttgggcctgggcctgggaataaaaggccagaccctctatggattccagaaagggtagctctctgcggcactagtctctgcactttcttcttctcatcaagaaaagactcccccactgacttctgttccccaaacccacacaccctcacaccacaggggaggaggggctgactttggaagttcccaagctcactaactgtcaatctggactgctatacatttgcatttctctacacaaatcttagtatcattagtgcttttaatcagtgaagtcgactctcttctgcaccaagcatagcatttgtaacctgggcacaggaggatgactgctggggaggctttaggaaggaggctgctttgggagattctgtgtgttctgttgttctcaagcacgccttagtagcccaggcccaagaattacctgcccagagcattagaatttgatgtaaatgattatttacatttggattgaacagtgcagtctttttctttttaaagaaaaatttstctttcagttttgtctgttatatttcagccctggccaggccactgcatatttatacagttgacccttgaacaatatgggtttaagggtactggtaccctcacacagttgaaaatccacatataactttgactcctcaaaaactcaactatggccgggcacggtagctcacgactgtaatcctagcactttgggacgctgaggtgggtggatcacctgtggtcaggagtttgagaccagcctgagcaacatggagaaacctgtctctaactaaaaaatacaaaaattagctgggtgtgatggcacatgcctgtaatcccagctacttgggaggctgaggcaggagaattgcttgaatccgagacrtggaggttgcagtgagccaagatcgtgccactgtactccagcttgagtgacaagagcgaaactccatctcaaaaacaaaacaacacaaaacccacaaaaacttaactactattccatagcctactgtttactggtagccttacctgtaacataaacagttgactaacacatatttgtatgttgcatgtcttatatactgtattcttacaataattaaggaagggaaaagttattaagaaaatcataaggaagagaaaatatatgtactgttcattaagtggaagtggatcatcataaaggccttcatcctcagcatcttcacaccgaggaagaagaggaggggttggtcttgctgtctcagggatagcagaggtggaagaggtggaagggaggcaggagaggaaggtataacttttactttaaaaaatccacatattggccaggcacgtgggctcactcctgtaatcctagcagtttgggaggctgaggtggaagaggaggaagggaggcaggagaggaaggtataacttttactttaaaaaaatccacatattggccaggcatgtgggctcactcctgtaatcctagcagtttgggaggctgaggtgggcagatcacctgaggtcaggagttcaagaacagcctggcccacatggcaaaaccccatctctactgaaaaaaaaaaaaagaaagaaagaaaatacaaaaattagccggagtggtggcaggtgcctgtaatcccaactacttgggtggctgaggcatgagaatcgcttgaacccaggaggtggaggttgcagtgagctgagatcatgccacttcactccagtctgggcgacagagcaagactctgtctcaaaaaaaaaaaaaaaaaaatctgtgtataactggacctcagcagctcaagcctgtgttgtccaaggtgaactatgtattcatttggaggtggtgaggcttaaactgagttcttagagttttgcaaaaaggtttttctctataatatgtttgggttacagtgtttctttctaagctgtgtgtgtgtatgtatatgtatattctaaactggcactatcactcagcaaattttgataaaagtattcatttaaaaatttacatttgaatttgcttgtctctgattctgatgtgtgactttgtgtgcctatacaagtagggtcctggatttcatatttgtgagaagccagttgaatagtcttcgtgctttcatcctttagaatgaaaaatggcagcaattgatgtgttttttaaatctgttatagtaggttagaactatggagaaaaattcggtgggttaattcattcatttgtgtgtcagttcttaattgaattcctactattagctagtcactgtccttgagtagttcccagactagctggggagatggatgatcacaatacagtatgctgtatctaatacacagaatgatcccaaggcatagtgtcgtcttgctgttgcttttctagtgccagaggatagtgactgtggctaaaaataaaagagtcctagatgaattgtggaacatgaattttatgagtatttaatatgagggtagagaagctatcttttccagcttgtgtggaaataaagggcacacccactgacactttccctctgttgggtttgggaacattgctaggctgagactagcatgtaaatggaagggtttactgttaaagctggatgactggttgacggtgtatccactggggagtggagaggtctgccaagagaatgagagctcagtttgggtctaggttacattgttgtattgtcctcttctgctgctcagtctccttgcttcctttagatactttctctttagttaacctgtgccttgaggtccaatcacccttcacagtgtgcccagggctgtggctcaagtctgctcataaactacctctacttttgctttccatttcttctcaagggatgtagctctcagttatggcatctgtgcagacgtagcccctgtggttccaggatttagcttcacttcctccttgtctgacattccaaacttctatgctttctggtccatgtgaaccactcaacagtctctgctttcacatgtttacccatcctcccagactcagcctaggcacctctgcagagtagccttccccatgtagaggtaatcattccctctctggcacacccagcgtgctttgcattctttagttacacactcataaccttggtcctcctttgttttcctcctattggaaggtcaactcttcaggggtaaaggctggatcttaattaactatgcatgcatctccagcagttagtgtagtgcttatccaagatattgtgtgcattgggatcagagacagggaaatgcatcaagaatgggagggcagggcaccaaagactttgaatgagaggacaggtgtcatgggacgtaaattcagagaggaaataagaaatagttgttggaagaagtgtagttcacattaccaaactcatttcatgctagttgtaagagatgcaccttttaatctcacaatggaggttcaatattgagtgatagacattttgtccatgaagggttaagccatctgtattttaaaatttaaacttaatttcacaatgaaaggtttttagacaccctttgtgcaacataacctacttattaggttcctttttattttctgttcctccccactagggcatgagctccatgaaggctgggaatttttatgtttttttctcctcccacaaatacatccaaagtttattgaagaatattctggcacatagctgacattcccagctagtctgggaactcttcaaggacaaggacttagctagtacttgttttatgaaggaatgaatggggaaataagcccatgtttattaaaaaacattagaaactttggtatgaactcttattaccagctaaccttggcagaaacctagtcgtaccaaacaagtcctattaacacaaatgccactataaatcaaatgcrttatttcctcccatggttgactagttcctgccactgaagaattttactcctccttgagatttgccacattatttaatgagttcctggatgggagttgatactaaattaaaaacaccagmtaggagaacagtagttacggattagttagtctccatcataaacacagggatgtgagagcattttagcattttcatattgtaccatctgagtctgatgcaatatatgcatttacctctgaaatctttaaatattataaaacaaagtgacctagaattgaaatttgttatggcacttgatatttgatttgccccaatggcacatactccatcaaggccaaaactgtaatgaaagatgcgatttctagccaacttctagttctggatcaacagaaggaacacaggagttcaaaggtttaaatttgtgtttgagggttatggggagatatgtcatacaataattaaataccttttgtcttttataaaggaactacacaaatatttgccctacagttttctcctgcttccattgggatcttattgaagctcttaagaaagattgagtaactgtccttacacccaaataaaactaattttattatacattttggaaagaaaaaacttttttcctcaagatgctgtctaaatttttttagtttaactttttaaatttttattcaattaaaaagtatctgagtacctagtatatacccagaatgggcaatacataacacttggtctctggccttcacttgtttcaaggtcccttaacatgaacacagagatctagccccagatctccatttgaaaactcttcagatatcacactcatccaagattttgatgagctgaactttctgaacttggtagtacaaaatgaaaaaaaaaagtatttcttgtcatttaccaaatataaaatctaatgtgcttctaggtgcactgttcatggaccacctctgattttgatatccatctcccactgcacttctgctaccctcactcttttaggaactgctcaatctttggggtgggaaaatgtaaacaagtaatgaaaacataatgcgatcagtgttgttttaagaaaacatatttatgtgtaaggttcttcaaagtcacagattagacagtgcccatctctaacttgagaataagggaaagtgttgctgatgagttccagttaaactgagtcttgcagaatgagtgggggcttggctggaggaaaatgggagaacagctctctaggcagtgagaactgatacacaaagtccccaagaaatgaaaggtatagcaagatgaaaggatgctgagaatgcagtgagggagcaatagcaagagatgataccatcgaagtctggggtccaattgtgagtgcttctggggcgtgctcaagattttagatttatccggtagcaaatggaatactgtcagctggtttcgggtagacattagagatgatgatgtttttagaccaaggcaaaagtgattttttgaatgtgaaatgtgcttgggtttttctggttattgtttgaagggatgttgcgtgtcactttggaggtagcacccagatttagactggatttttcaaacctcaactgcagggggtttttttgttttcttttaaaaacaaggatagtgattatcccttcttccatgctagttggcatatggacttgattctaaacctgagtggtgttcagtgacaaccttcttccttctggagcactttctgatctcaagactggaatgaccattgcatccattctcagctgtgttacattcattttcactcgaaacacagaaaagctccatttccacggagcaaaaaagaagctagaagtaataaaggagtctggctttaagaactttggctttccttgctgactgttccagtgtttttaaacaacacatacagttcaggaataaaatcaaaggactctgtttcctcaggcaggtgcggtggcagaagcccttttgggttgtgtgttagctgctttagtttaaaataagtgtttgggaggtgggggagggagtcggggaggaaggctgtggggacagctcccagatttttaccttgaaagcaggtgctgctgaaatattccagaaacagatggaatctcctattcttgttttaagctgtttatggttgtctcgcccgagggtaccctgctatacaaaaatgcacagcctgatgtttgagggcagttgggcatcaaagccggggcccctctgggagaaatcagcctttcttcccagtgccttaaatgccattctggaaacctgggtctttcataccgtttaacagaggactttcctttgccttttgagtgtttctgtctctctggaactgtttgatttctttttaattcttctccttaaaagtaagctggatactgtgttgttcttgttattctctggatggtcagttggcagaaggccccactgctaaggcagattgataatttcaccgactgtgggtctcagaacatggcatctgtcagaagctgaacatagaggatgggccagggagtctgctctttcctaggcccagggcccttctgagttcctcagtattttgaaaggcttgtgtgggtgcagggcatggggtgctcttcagaacatcagtttgtgggagtttataactagtttttctgaattaaaaaatgaagtggttggggaatgttgcatgttttattgccatacagatgccttcatacttagaaacatatataatcctctggggagccacaactcaacaatagtaacaagctgtacagtttaaagaaaatcacctttgaagagaagaaagagaaatagccgaaactgcccttgcactcccagtggcctgctgttggaggttgatttgagggctgggaagctgcgcagttggaaggacaggtgtgtcttctgcagtggccatgggggctggaacaagcagccagcctcaggctgtccactgcaggaggaagctccctttctcctcctgattcttttcagaggacaccagcctggcacagccttccctcaagcaacctgaccctagggttgtagggtatttgtaactctaagactttggctaaaagggattttttatttttgagacggagtgaattctaaaccttacaagagatgtgatactttctctgttttggaaacagaacacttccttgtcattaatcctcatgaagcttagtacagggcaggaagtgaaaccacctcaagaactccaggagtgtagttctgccttgttttttgctctctacccacccccgcattcttcaatcatcttgctacctctagtgactgctgctgatggctcatgttacttcatcattttgaacatggatagactaactctggataactcactacagaggatttggagtggaaggcaggaattaacatttatcagcatttatttaatatgccagctggtttatgtaattttcatttatttttatagcaatcttatgaaattatctccattgtagagataaagggattgagactgagagagatacagtgacttgcccaagatctcaaggagaaagttaaggaatctggtttggaagctaaaatccaacccaaaatttatactctcaactgcaaattctgtcttcctgccaccaaagcaacttttactgctttcaaaaggttatttgtcctctctttctatatgtatatacttagtttaaaaagacataatgggtagtttgcccttgcagaatgaactcagaggtgagcttaaagagctttcagaaataatgttctacagctcaccctcatcttataaatgatgaaaatgaaacatgaatgagacaggaagatttttgttccaagctctttggctggtgaatgacagtcttctgacctccaacccagggttttgcccgtgatatggcaatgattcttccaactcaggagaatgagcccaaggccagctggaactaatgttttttcaagactcagtagcccctggttagtgtcaaggagtcacattcccttttggttagcatcattatgagcaatgtgaataatccaactatgtgattatagagtgaacaagatgatcagttctgtttaaatccgatgcaaggtatgtttgaatggaaaaccagtgaaatagagcctgtcttttgaaaggatctcagaattcgacatgagggaccctttttgggagatgaaaaagcattctacaggagaggctcctcggtgctttttgattgagtttgagtgtcaacaatttttcttggacctccctgcaagccagccactttccttcaacagcaataagcagaaggcatttatctgagcctgatctttgcttttcactgggtgggaggtagaaaagaaaatggctcaaaatacacctcactcctaaaattgccctttgcttctaagctacactcttaagagcaagatggatttgtgaatacaggagtctgaatttaagttgtctggccctttcagggatcagttttagaagcagtaggaagcctaacattctctccatcatggagaggccccataagactgcaataataggtacttctttacagaaaaatcgtagtaccatgattgaagtttgaagaagtttgaagactctacaattctagcaatcaattatgagccacttatttttrggatgttattttttaagattataaagatacactttctcattagagaaatttagaaaactgcagaaaagaaaagaaatctctcatcccaccatgctgataatgactaagggtgtttccttccctgaattgggatggtgctgtaggtataactttgtatctagctttttcacttattaaattgtaaccatctttacatgtcattaaatattctttcctgagagtgtttttaactacataatttatttgtgtgagattgatttataatacaaggaaagaagctcttagtaatgtgaaagaatatttcttgctaaggcttatcttctttttaaaaatgcatttgctataatgttgtcattcagctaactacttggtatttttttaaaagaaacactcaacttttttttttatcttaacatgtgagctattacctgattcttgacaatgaagaatagttactagcttctgaaacaatgaacagaagagtatggaaatagtatcaaaagtcttggttaaaatcaagtggcaaataatgtgttgagtttacgtttccgtattttattttgtatatttacatcttcagagtaagtaattttattagcatgagttgtaaaatgcaaattgtaacattaagggaactcttttgaagttagatagcartataattttgaaattagaatatattgcattctaagtgaaagcaaattacatgtatcttaaaactttacgtaaacttatggaatttttaaacattgtggagaaaattaaattctatatattgtagtatgcagtggaaattaagtaggtttttattttctactcatggacttgaatctaccagtgatcttaygcaaaaccaagggcaattgttgtgctttagctcaatccacaagtcttaaactaccacatagagattttaaatcccttatctataatacaaagcaatatttattacagaattaattctgagaggcatcatttatggtttctaatccattctatttcagatgcctttgaagtaaagtggtggagttttgcatgtgaggttaattgtcctattgttcatttatgcagtctggtattttaactacctctttatgtgaattaatggacccaaaatacagcaaaaatgcttgacttgaaaaattttacattttttaaaaaccgatttaagagtgtggtgggagaagaagttgggtgaaattcagtgtcctgcagtttgttgtctaagctccttgggatgactgactgattttttttttattttaagtttttaattttaaaattctggtcccatcagaaaacaagtttttaagtggttaaaaaacaaaaaaacactgcaaacaaaaacaaccccaagccaaaacagactctaaagaatgtatgtttgctagtatactgttttctgctgagctaggatttttactgtcacttttgtaaattttgtaattttggataccaactttggagaaaatttaatttgtgctttttcttttttattagtatatgaaaaatatagccaatattgattatccttattgagtaaagataactgttgtcccgtgaccactgaaaacaaaacttttataaatatcttttcattgtactctttgttaacattctccagagattgcaattctaggtctttttgtttgaagggacagtttaactttcaaggactcccatgaacttgtgcgttcctcagatttagtgtactcaagtatccctaatctgaacatccaaaattcaaaatgctctaaaagctttttgagcaccaacatgatgctcaaatgaaatgtccatcggagcattttggatttccaaattagcggtgctcaactggtatatattctgcaaatattccaaaatccaaacaaatctaaaatctgaaacatttctggtcccatatgttttggataagggatattcaaactgtttttgtgttgtaatgaaacaaacattggtgctatactttgattttttttcaatctttttaaaacatggatttataataaaaatatttttacttggctgtcatttggtttttgtctcagttatttcagtggcaaattgtggacaatactaatgcagaatattgttctaaagattaaataaaacagtaaatacttgataaagtccctgtatgctatatctattgtgtaaatgtttgatcacaaccctgtgtttttcccttttgtaaattgtgaaatataacctgcaaacagaaaagggcgtcaaatgtacatatacacattatacacacataagtaaacataaatatacagcaaatacccatgtaatcaccattgaagttcagaaattactagcaccctgatattaattttttcacctatgtatacatccctaaatagtatagtatagctttgtttggttttgaactctgtgagttgcattatgcaatttagaattgttattttcagtcttacttcttttgcttaaccttgagattcacccatgctgttgcttatggttatagtctgtcttctttgctatctagtgttctgtgttgtatgatgatataccacagctggtttatgtaattttcatttatttttatagcaatcttatgaaattatctccattgtagagataaaggggttgagttgtttatgcatgtaactgtaggtggccatttggactgtttctagcgtgtgacttttatgaacattcttgaagagctatactggtgcacatagacttaacttctgtgtactgtatgtacctaaggagttgaatagttgtgtcataggacatgtatatcgttgacttcattgggataaatgccaaattgggcaattttattctattaagctcaatcaactttattgagataatgccaaattgtttccttcagtggtttcaccattttctgcttctgcaagctgtgcatgagcattccatgcaccacactgctgccactagctccttgctttttaaagaagactcgccagcatacacttcacttttctcaaagcccatgagatctaggtattattgcccttatttacttctccaaacattaatctggtctcatcgtttgcagaggtgttgctagagaaagaggcagtccctggagttgtgagagaaagttgatcattatctgaaaggtaaaatgagttacacggtggcatggcataagagtgtggtctagtgtcagagtagggcctgcattccagtcctcctgatttggaaatgagcttctgattactccatttactctgtctgagccttaatttcctcatatctatttttttggtgaggattagagataatataagtaggccaggcacggtggctcacgcctgtaatccctgcactttgggaggccgaggcgggtcgatcacctgaggtcgggaattcgagaccagcctggccaacatggtgaaaccctgtctctcctaaaaatacaaaaattagctgggcatggtggtgtgcgcctgtaatcccagctactcgggagactgaggcagaagaattgcttgaacctgggaggcggaggttgcagtgagctgagattgcaccattgcactccagcctgggcaataggagcaagactctgtgtcaaaaaaaaaaaaaaaaaaaaaagagctaatataagtaaagaatattggtaaggtggtcgtggacatctcaccacatcacatagtatagtagatattgaaaggtagaccaattgtcataggtgagatgtatgtgggcatacatgtgacaaagtgtacatgagcctaggttatgctagcttgcagatgacacttggtaatgaggtaggcacttacacactgttgatcaggttgtaaaatggtccaacattcttggaaaacaattggcaatatatattcaaaacctttaacattttttccactttggggaatctgttttatgaaaaactcagaaatataagtacggatatatggacaaggacatttagcatatagagtgaaaagttagaaacaattttaaggcctagaaatagaggatagttaaatttaattagataccatgtagccattaaaattggttttggtgattatttgatgacatggaaaatatccagtacttatagaagaaaagcaagagacaaatttttatatgtgatgtgatctccattttgtaaaaagtatgtagaaaaaaatgacgtgggggatcggatcccaaagtattaatgagaatagttaagtaatgttatcatgggtgtttttaattctctttaatgaagtagttatcctggctgttctatcaagcccaatccaaatattcactgcacaataatttacatattttttagtttggaaaaattataaccaccttcatatatctatctcatgatttcaaatatagaatgccacaaacggcagtactttagctaccaaaatagtaactgatactctaatgtgtgtttccccactaagtttgtgaaacggacttacgctctgaaatcagaactgtgttcaaattttgattctaccccttactagatctaaggccaaaacatgtcatgtcacctttctgagcctgtttccttaactgtaaaacagaaagtacatctcatggtagccttaaagattacgaggtatatatatttttaatttaaatttaaatttttttattttttattttttttttgagatgcagtttcacttttgttgcccaggttgaagtgcaattgcgtggtctcagctcactgcaacctctgccttccaggktcaagtgattctcctgcctcagcctcccaagtagctgagcttacaggcacccacgaccatgctcagctaagttttgtagttttagtagagacagggtttcaccatattggtcaggctggtctcaaacccctgacctcaggtgatgcacccaccccagcctcccaaagtgctgggattacaggagtgagccaccgcgcccggcctatgtttttatttttattatttatttatttatttatttatttatcttttgggactgagtcttactccatcgctcaggctggagtgcagtggcacgatctcggctcactgcagcctctgcctcctgagttcaagtgattctcccacctcagcctcccaagtagctgggattacaggtgcacgacaccatatccagctaatttatttttagtagagacagggttttgtcatgttggccaggctgaccttgaactcctgacctcaagtgatctgcctgtctcaacctcccaaagtgctgggattacaggtgtgagccaccatgcctcgctcaggagagatttttttttaatggacataccacgcacagtgcatagcacatctttggtactcagtccaaggcagttattcccatgttgtctgccaagacttaaaaataccattagttatacactgcaccattgatgtaaaaatattttttcagggggagaaatgactgtgttaaatttttagtttgttcccaaaatgcattttgatttcagagatgttaaaggagttcctcttaattgagaaatgttagtattaatttccaagtgggatatttagcatctgtcctatgcattatcaccattctctactcacctagttgacctgttaattttctcagaaatttttatcttatttctgtaaaatgactaggaacctattcccaatgtgtgtctcaaacctgctttttatggcctcaggatctctgtcataacctgttttatgctttcacaaactgagcccctggggagctgtctgcacttttcagtgtgatccagctgaattccttcccttccccactcaagccctttgatttgccaggtttttgttcgtctaccctaaggatgaactgagattgctgagcatggcctctcttgtggtgcaaagtgagaattgtttttaattgagcagaaacatgtggaaggatcaggaatatctcaagggattacagaaaaattccaaatttgtactacttacagcttgtgtttagaacagggtctgctgggaataaatgttagttagtgtggcctgtgaccttaaaaactgttgacatggacttcagccagaaactagccacagacctcctttgttaaactcattcatagctccttgaaaactctagtcagtgaaagttgccagctccaatctaagcatagccttttttttttttttcccatgctttggaaacagaggacgccccttaaccagcaggccttctttaataggactacatggcctaaacgcaattggaattgacaacttcctggcttgggtttgccaactggcagagctgtgaggccgaggggacaaacagcgttggggcgctatgcacttgtgtttatgtatgtgcagaggagactgaactctagagcatggtgatacccttcgctctgagagcaacgctctggcctgaattggacacgtctttcaaatgttctgctggaatagacacatcagaattatccctcagtactttctttttaaaggaaagaaaagagaaaataactgccctttcttttttgataggaatgatcatggcctttcccctctctgctcagaatccttgatttaatcctctttttgtcagcgttgtgctatgttgctcaaatataaaatgagaacttgaaactcggattggggaattatcatttgttgaatgacactcagcacccactcactctggagctttatttaacaaagtttagtttcatatcaaggtgaagggataaccaggatatctgtctattttactcattgaggagactgagcaatgaggaagttaagcaatttcttctcctttcctatcaaaagaaccctaaggaagggccttaaacaattatgatgctgcctctgtaaaccagcatagtaactgagttagaaattaatattttccttagttcttgtctttaatccaaaagactacattgtctgaaatacctgaaattttgaaaaatggataaatggatcaggctaaaaagaggaagtagttattctgcttacagagtttcctttgacattgttgacattgatggtgggtagggaagctagcttagttatggattgtcattctgagatatccgatcatatccgttcatatctctttccactttaatcacttgtaaaattttggttgttggagtagaatatttatttccaggtatgccgttgaaattgtttttaacataaatactctagcagacttatcacttttaaaagttgctgaggtttggcatgatttcagccaggcatgtgtgaggagaaaaaaggaatgtcacattggcctaggaatatggaaactttgaaagaagaaattatataatttccttgagagggtacaagaatttagatgccattgagagaacccttgagagtagctgacccctagtagattctacataagtacttattgaatgaataaaagttgctgaaataactatttcctagtcctggtacttgcctgtccatactctctctctctctctctctctctctctctctctctctctctctcactttcccttcctcagcatctttctttaccytagaacatttatttcttccgcagaaagtaggtgatgccatcatgtttaattacctaacattctaaagcacagcttgtagattgagacctagattcaaattctgacttacgagccatgtgacaaatcatataacctgtctcatctgatccttgtttcccacatctgtaaaagaaagataatgaggcctactttgtaaagttgttaacatatgtgtaaatatgttatataagatacctaatttaggagttagcaacagagaattttttttttctaagaaggaatttcatatgtttttccacatatgctttttctcctgctctctatcaaagggaataataagaaaaggtctcaaagactttgctacctctacagatctccttgctcattcagggaaagtagttactgggtagaccagctaagagtaattgaaagtgtcccagactctaaatgggagatttataatagcctatgggagttgtttaatgcttatcttctgtacctgtgctctatactgagagtagattagatagttagaaaatatatttagacaggttattaagaaaaccagatttctatttttgctgcttttttgacaaaaagataatctcagaacattaagcagcatagagaattgtggagaattatctgaacttaagttctgttttgcacaggattttttttttatttccaacttttacgtagaggggcatatgcacaggacatgcagggttgttacataggtaaacatgttgcgcaagattgcactgtaagtgctccccttcttaaacacacttaaaggtggttttgtaagaattaattctaaaactctccccaatgtaagctgatacatccatgtggtcttataacctctgtgtacattatgtgactctaacccttggtgttttgtgtgaatagcaaattatatgaagcctttttttttttttttctcctatgtaccagggaattaagaacacactctggaaaaggatgaagaactctggtgtgtagaagagggaagaacttttttgtcagattttattttactggaatatattcccttaagatttcataagatgagagtatgtcatctttttttctaaagattttccccctaatgctacctcattttctaaactttcattaatagttctttgcagctgaagcaaatattttagatctttcttgtactctcctccagctgggagtgtctttcacacatcaaaggcagatatgagcctctcattaaaagatagtatgagttcatcatcttagaagagtaggacctgaaaacctgagataactttcagctgcaagtcatatctaagctggactgagatttttctgttggttaccgcatttcttttctcaattcatcactcccaggtgctctaaaatctgactttctctcttagttttgtttataactgaaagttatctttattcagaatacaaagttagttgtagaggttaggaaagataaatattttaacacttatttttaataagaaaatcaggactctggaaacttaggaagaaagcccggggtctgcttgttattttccctctctgtctttctgcacactttttgtgcgaggccttattaataccctctcactgcactgcctgctccagtgtctataaggtaattatttgaaactcataagtcagccctgaaaactccacaaatcctcctcttcctaacttttgctaatgaaaagcaaccctgaaatcagagtggttgaacagatttcttgagagtatggagaacaatgattatgtccttcagattttatttttgaaaaaaaattctagatccctatgaaggctggaatgtgacattctatctaaaagccacacgaaaggtttttagctccttttttgtgtatatgtacatatgcatgcttgtgaacaagttattgcaaaatgttgcaggttccatcgtttgagtaatagccacatcaaatcccaattcttttccatagtatttacttttcttactttgctcaatttcaagctctgtgttagtattttctagccaaaggtgaaagttgtccccagataaatattaggatggcctgccagccaaatcccaggcaacccagtgaattactctctttgatagtagacaggtccagttcaagttgctctgaatggcatttaactataaaacaatagccttaacaaaagttgctggtatccttgaaatggtttcataccagtagccaattctttcagcactttaggatatgaggcttgttccatcagagtgccagcttttggagctttacatagccaatgaatggtgaaagagggaagagaaaagtatgtagatgtattgaaaatgcataaaataaaaaatgaaaagcaaacaaacaaaaacatcactacacacacacacacacacacacacacacacacacacacagaagctgttgacacggcagtttttcattctttatggctctagggacaagtttaaattgggaaaaatttttttattctcttgtgctgtgttgaacaggaaggcaatgtttgatgtaatctggcccagatgtcagcagtgtgcagccttgtgatgattatttatcttcaggtttttattttgtaaaaggagaatccacaaacaattgtttagagtcataagctgtatttaatgactgtttttgacattttgtgtatgcaacgaacaaacatattagtttaaatatgttttacatttaatttcattttagctattatcttaaaatcctctttaacaaatactggttatgagtcccttgatagatgttaacatgttcagtgctttacattcaggatagcgtttctcttatttcaatttcttactcttctaggaagttttctcagctaagactgtcaaactagtgggctcttttaaatggtgtttgaaagaattttctcatataaatttcccagaaggatatcagtattttggggttagaaaatggcttagaatgtaagtggcaaaacttcaataacagctcccaaatggcagtccatttactcacatttgaggggattaattatcttggaattcaggtgtctttgttttaacagtattgttttcaaaatattttgaaagatgagcattgcttatgatttatacctgtctcttgtctaccccctttgaagtgctgctgatggctgctaagacccctggaaagagtggattttgaaatttcattttggggatgggaggagcggggagtacttttgccacataatactcttttaaagatcgaggaatgtgtacaaaaatcttagcttctgctacgttttttccaaacacaactaagctttctcagtaaatttaatttggactactcagttgtatagtgggttgccctttaaaaactgagttcaggctgggtgtggtggctcacatctgtaatcctagtgctttgggaggtcaaggcaggaggattacctgaacccaggagttcgagaacagcctgagcaacataatgagaccccatgtttacaaaaaattagccaggcatggtagtgcacacctgtagttccagctacttgggaggctgaggaaggaagattgcttgagccccaggagttcaaggatgcagtgagctatgattgcaccactgcactccagtgtgggcgacagagtgagaccctgtctcttaaacaagtacaacaacaacaaccaaaactgagttgaattaaaggttaaattaaacattttaaatatattccatatgagatgccaatattaattctaacctagcacaataataattttaacccaggcaggattaactcctattctccattagctcacctcattgacttcaatggaatttttgtcttaaaaaataccgaataaattatattgacattttataacttctagatcagtaacctcacagcattggtagttagtccattaaggtaatcttcattggcatcagtgtaggatagcagaaagatgagtagttttaggacctggattcaagtcctgtatgtactgccaataggcccagtgacattgggcaagacgtctgacctgtatctacctcatctgaaaaatgagggttgtcagtgtcccttaagactgagatattctgtgattcaaaaaaattcaaatcaaaataatgttattaaattccaatgagctcattagggctttattgccataattcatttttttgacaattgttttcttattcccatgaatgtgtttgagatgcatgatcagagggattacagaagttttagtgcagtcttgctaatgcatggcagtatttctaaaaaaaatgtaattgtatcttattatcagcattgtcatcacttttagataggacattaaatatgaggcctcatttattccttaaaatataggaacagtgactctatgctgttctcttaccttccctaacagctctcctgaggaagctaagacacagggcaagggactttttccttgtgacatcatagcatgacctggcctggaattctgatgtagtaaggaaagaaccactaagttggcagagagaccctcaatctagactccgcccggagcctgttggactctgactttgggtatgattctgggcttctctccttccagaaaatggaaatgataacattagcccttctgagcttacaacatagctcttacaggtcatgtgttctcatacactgacttgaagaccttcttttgtttatttgtacctttagccttgataaagacaaaactgctattggtgtgtatagttactataaggatttttagttctcattagaactacttatccagctatgagtacattggtagagaaggtgcagtctaactagctagcttcagtgatttttcttttttctttttttggagacagggccttactctgtcacccaggatggagtgcagtggcagtggcacaatctcggctcactgcaacctctgcctcccaggttcaagcaattctcccaccacagcctcccgagtagctgggactacaggtgtacaccatcatgcccggctaatttttgtatttttggaagagacagggtttcaccatgttggccaggctggtctygaactcctgacytcaagtgatccacccatcttggcctcccaaagtgctgggattataggtgtgagccaccacgcccagccaagcttcagtatttttttctaaaaggtgactgttgttttgggaattcagaattcttgattaacaataaaaacttttaaaaaaggaaacatctcaccacttactgttttgttactcatgagaggacaatttctagaatatcaggcaaatactgagtgtggtatgtgtcacggacgacctgaggaaatcatgatgctggcttttttgactaggacttcagagatcatgggagcatcgggaagtctctgcaagtgagtgcagagagtgtgagctgtggagtcagaggggtttgcatttgcttaccagctcttgcccacttatgatcttcttacctaacatcttgcaacttatttttgtcatctttgacattcagagataaggactcacctcaaagggttgcgagagagagagagtgtacaaattattcagcagagtgtctgatatatagtggggactccatgaactcgttccttcctggatgagctggtttagaacatctagaaatggtcatagtggaaataggggtattttaatttttatcacctggttaatattgggaagttcactgagcctttagatagatgtgccctttgatatcttccttgattttcttggggggagaaaagcttagaatataaactcagaaggttcaaatcccatctcctcttttcccagcaacatctccatgagcatctccaacttttctggcttctccttctccatctacgtaatgagrgcaatcataagtccttggaggattgtagcgaggatcaaatcataacgtatgatgctgcctggtagtagtaactggttcctacacaagttttacctagtgacaacttgaaagctaacacggctttttttaaaaaataaaaaaaattattttcccaagccctctcttgggatgtgctcatgtgagaggatgaggcagaaacttgctgtaatacacacccatcatatgtctagaaccaagtgccctgaacattcacgtgcattctctcctccactcttcacagcagtcccgcrraggaagaattatcctcgtcttacagaagaggaaaaggaaccttagagaatcattattagctgatattgwcagtatttgaacctagctctgtttgactctgaagtccatgttcctcccattcttttgtcttgcccccatcccaaacttggtgccttatttgacttaggctaaggaaacgtgtattgttatttggtgtctgtaggtgtcctatactccactgcagacactgaggatgcagtgatccccgagacatgcactttccccactttcacatggcccaggatctgaaggcagacatataattaaacaattagttgcaatattgaactctgataaagaaagttaaattattatgtaaatgagtagtcatctgtgtattttaaacaggcaatttcctctgaataggtgacttctgttggtttcagggtatcacataatcttaaagtagttctccttttggggtgaatgtaacatcctgtatttccataacttaycttgctaaaatatgaataaaaacttaataatgactctgcctctacataaaaaaataaaaatgttacctgggcttggtggcagacatctgtagtctcagctacttgggagactgaggtgggaggatcacttgagtccaggagttcgaggctacagtgaactatgaactatgtgcctctctgtactctagcctgggcagcagagtgagactgtcttgaaaagaagcaaacaagaggcctggcacggtggctcatgcctgtaataccagcactttgggaagctgaggcaggtggattacgaggtcaggacttcgagaccagcctggccaacatggtgaaaccctgtctctgctaaaaagtacaaaaaattagctggtcatggtggcatgtgcctgtagtctcagctgcttgggaggctgaggcaggagaattgcttgaaaccaggagatggaggttgcagtgagccaagactgtgccattgcactccagcctgggcaacagagcaagactctgtctcaaaaaaaaaaaaataaccaacaagaatatgattctataaaaagtaacattcaggaataaaaaaaggaagttcttaaaaattaagaaagtgaaagcaaggctggatgtgatggctcctgcctgtaatctcagtgctttggaaggccaaggtgggaggatcgcttgaggccaggagtttgagaccagcctggccaacatagtgagaccctgtttctactaaaaataaaaaatataaaaattagctgggtgtggtggcacatacctgtagtcccaattacttaggaggctgagatgggaggatcacttgagcccaggagtttgaggctacagaaacctatgatcacaccactgcactccagcctgggcaacagagtcagatcctgtctttaaaaaacaaacaaactggccgggtgcggtggctcacacctgtaatcccagcactttgggaggctgaggcgggcaggtcacctgaggttgggagtttgagacccgcctgacctacatggagaaaccccgtctctactaaaaatacaaaattagccgagtgtggtggcgtgtgcctataatcccagctacttgggaggctgagtcaggagaattgcttgaacccaggaggcagaggttgcggtgagccgagatcgcgccattgcactccagcctgggcaacaagagcaaaactcccatctcaaaacaacaacaataaacttagtagccactcatttattgaatgcttactatttgcttagtgctgtccatgcgctctctcatttaatcctcattaaaaactctttgagaaagcactatggcccccattatacagatgaagaaacctaggtttggacagattaagtaacttgccaaaagtgatacagcaaaaccttggcaggattctcattccagagcctctattcctaactaaattcaatcagataagtgtattacaagagttgcaatgtattcatttttcaaaattaatagatttggtgagacttttctatttttatttttaatttgtgtacagtaaaatttcctcattttgtataatttactgagttttgacaaatatgtagtcatatatctgccaccataaccaccatacgagcacttctgtcctctcccactccagttctcttgtgttgcccctgtgtggtcaaacccttctcctactcttaacccctcttctccgtctctatagttttaccttttccacagtgtcacaaaaatgtaatcatatggtattaccttttggagactgtcttctttcacatagtaaaatgcatttgagatccatccatgttggtgtgtgtatctgtgatttattcccttttattattgagtaggtattccactgtagaatgtgttcatagtttgtttattcgctattgaaggacatttaggttgtttgggggttttatgattatgaataaaactgttacaaacatttgcacacagattttggtgtgaacacaagtttttgtttcttttggacgaatacctaagagtggaattgctgggtgtatgttgccaagcgtatgttcaactttgtaagaaactgcctgctttccaaagtggttgttgtatcattttgcattcccacaagcaaggtgtcagagttccagttgtcccacgtactcacaagcattttagctattctatgtgtgtagtaggagctattgtgattttttaatttgcgttttcctaataatcagtgattggggcatatcgtgcttatttgtcatttgtatatcttctttggtaaagtattcaaatcttttgcccatttaaaaaaattgatttgtttccttattgttgagtttcaagtgttctttaagtttcttgacataaatcttttttcagatatatgatttgcaaatcacatattgtcccagcctgtgatttctctttttattctcttaacagtgattttctacagaacaaatgattttaattttgataaaatcataacacatcaatcttaccttttatggatcatgtttttggtgtcatatctaggaactctttgcctatcccaaggtcacaaagattttctcctatcttttcttctcaaagttttatagttttatgttttacctgtaggtctgtgatccatttagagttaattatttttaaggtataaagtataggttgaatttttttgtagattgtttttgttttgcatatgagcatctagttgttccagcaccatttgttgaaaagaccatcttttctcgattgagtcatccttgtgccttcgcaaaaattaatggactacgcagtgtttgtgtggatctgtttctggactctattctgttccattgttctgcgtatccatcagtattatactgtcttgattgtggcttcacagtaagtcttgaaatcagatagcattaatcttccagctgtgtttttcattaaaaatttttttttaaattatactttaagttctgggatacatgtgcagaacgtgcaggtttgttacataggtatacacgtgccatggtggtttgctgcacccatcaacccgtcatctacattaggtatttctcctaatgctattcctcccctagctccccacccccacaacagaccccggtgtgtgatgttcccctccgtgtccatgtgttctcactgttcaacccccacttatgagtgaaaacatgcagtgtttggttttctgtttgtgtgttagtttgccgagaatgatggtttccagcttcatccatgtcgctgcaaagaacatgaactcatcttttttttatggctgcatagtattccatggtgtttatgtgccacattttctttatccagtctatcattcatgggcatttgggttggttccaagtctttgctgttgtgagcagtgccgcaataaatatatgtgtgcatgtgtctttatagtagaatgatttataatcctttgggtatataaccagtaatgggattgctgggtcaaatggtatttctggttctagatccttgaggaatcgccacactgtcttccacaatggttgaactcatttacactcccaccaacagagtaaaagcgttcctacttctacacatcctctcctgcatctgttgtttcctgactttttaatgattgccattctaactggggtgagatggtatctcattgtcsttttgatttgcatttctctgatggccagtgatgttgagctttttttcatatgtttgttggctgtataaatgtcttcttttgaaaagtgtctgttcatatcctttgccctctttttgatggggttgtttgttttttttcttgtaaatttaagttctctatatattctggatattagccctttgtcagatggatagattgcaaaaattttctcccattctgtaggttgcctgttcactctgatgatagtctcttttgctgtgcagaagctctttagtttaattagatcccatttgccaattttggcttttgttgccattgcttttgttgttttagtcatgaagtctttgcccatgcctatgtcctgaatggtattgtctagactttattctaggatttttgtggttttaggtcttacatttaagtctttaatccatctcgagttaatttttgtttaaggtgtaaggaaggggtccagttttagtttcctcatatggctagccagttttcacaacaccatttattaaatagggaatccttttcccattgcttgtttttctcaggtttttcaaagatcagttggttgtagatgtgtggcatgatttctaaggcctctgttctgttcccttggtctatatatctgttttggtatcagtaccatgctgttttggttactgcagccttatagtatagtttgaagtcaggtagtgcgatccctccagctttgttctttttgcttaggattgtcttggctatgcaggctcttttttggttccatgtgaaatttaaagtagttttttctaattctgtgaaaaaagtcagtggtagcttgatagggatagcattaaatctatacattactctgggcagtatggctattttcatgatactgattcttctatccatgaggatggaatgttcttccatttgtttgtgtcctctcttatttccttgagcagtggtttgtagttctccttgaagaggtccttcacatcccttgtaagttgtattcctaggtattttattctctttgtagcaattgtgaatgggagttcactcatgatttggctctctgtttgtccattattggtatataggaatgcttgtttttgcatgtggattttgtatcctgagactttgctgaagttgcttatcagcttaaggagattttgagctgagacgatgtgattttctaaatatacaatcatgtcatctgcaaacagagataatttgatttcctctcttcctatttgaatgccctttatttctttcttttgcctgattgccctggccggaacttccaatactgtgttgaataggagtggtgaggggggcatcattgtccttgtgctggttttcaaagggaatgcttccagtttttgcccattcagcatgatagtggctgtgggtttgtaatagctcttattattttgagatacattccatcaatatctagtttattgagtgtttttagcatgtaggggggttgaatttgttgaaggccttttctgcatctgttaagataatcatgtggattttgtcattggttctgtttatgtgatggattacgtttattgatttgtgtatgttgaaccagccttgcatcccagggatgaagctgacttgatcgtggtggataagctttttaatgtgctgctggatttggtttgccagtattttattgaggattttcgcatcgatgttcatcagcgatattggcctgaaatttcctttttttgttgtgtctctgccaggttttggtatcaggattatgctgatgtagcatctatgtatctatcaatactatactgtcttaatcgtggcatcatagtaattcttcaaatcagatagcattaatcttccagctgtgtttttcatttttaaaatagtcttagctattctagtttctttgcttttccacataaattttgctcttctagtttcttgacctttaatagctatagaaaatcccactgtgatttggtttgacattggattgaatgtataaaatgacttgggtaaagatgactgatgcctgtttttttttttttttttttttttttttttttgggagacagagttttgcaattgttgcccaggcaggagtgcaatggcacgatctcggctcactgtaacctctgcctcctgggttcaagcagttctcctgcctcagcctcctgagtagctgggattacaggcatgtgccamcacgcctggctaattttgtatttttagtagagacagggtttctccatgttggtcagactagtctctcactcctgacctcaggttgtctgcccgccttggcctcccaaagtgctgggattacaggtgtgagccactgcgcccagctgcaaagataacctttttacaatatttgggtctttcagtccatgaacatagtacatctctccatctacttagggattctttttttttttttgagacagagtctcactctgttgcccaggctggagtgcagtggtgcgatcttggctcactgcaagctccgccttctgggttcatgccattctcctgcctcagcctcccgagtaactgggactacaggagcctgccacaatgcctggctaatattttgtatttttagtagagatggggtttcactgtgttagccaggatggtctcgatctcctgacctcatgatctgcctgcctcagcctcccaaagtgctgggattacaggcatgagccaccacgcctggcctatttagggattctttgatttctttctttggtgttttgtggtttttggcatacagttcctacacctgtattgttagatttatacctaaatatttattcccttttttttttctttcccttattggtgctaatatgaatggtacagctaataattaaatactaagtttttattactttcattcttggctttctgaaggtgttttcctatcatttaaggtctttagcaagtaaaagattgtttcttgatgtttgtcctttgagtcatcatctgtttatgatttcacagcccttgcaccattttgtaattatgatgtcaaagcaagtagcttcaaaggatacatctggaggatcggaaaagtgctgttctctggataggtgggttagatttgagacagaatccatgtttctttccttgagtgtcataggtgttttagaatttcttttgttttgcctatgagaatatcatttaatttcttttacttcagaaaatctagtttgaagtatggatattaacttttagcttgatataaatgaggctctgtagtaggcattccaggaaaagtggatgttttctggctcttttctcttagatgactaaacaagaaaacattttctgggaaaagaagagcagctggtactctcattatatttccttcagtggttctgtaccatctcctgttcatgttttattgttgtataccttacacactagccaagtagagagaaggtattgtgttgaatactttaatgctgatcatcccgtttagatcttgtgacaactgggtaaattacacgtgacaacactgagcttcagagtcacctgaccaaggttctatgactgcctggaggacatgacttgaacataagccctctaccacagagtccctggcctttcccactcagccccatgacaataaaattggagaagactcttagaaggcaaactttttgggaggataggatacctttgcaagtctgctgaaagctccaggaactgtctccaaaaaaatgtttatgtgggtttccttaaaaagttctatagacattataggttttcacagaaccccttctgtggtctctggatcataggctaaaaatccatatttaagatcttttcttcacttgctgtttttttcaccattattaagaattacccaagtactgtatacctcttctatgataccagggagcaaatttcacactacctattgtgggtgcttgtgtgtgagcaactggtaaaagccagaggctcctccctctattctcttcattcattttttaatgctctgtgctgtgtactggggattcagctgtgaataaagcactatccctgtcctcaaggacttcatggtctggtgcatttcggaaatggtcatttttggaatggctaaagtatgttcgtgtgatagggagaggcagcatggagtgtggtggaagaatctggattcatagtcaggcttggattcaatgtgagacacgttattattgaattatctgaggggcttttgtgtcaagggaataatgatgctaatgcctaccttacatcctttacaaatgagagcttttcttcgtaaaaatgacttcttctgaaaatgaaatacatgtaaagtcctgagaagaacacttgttgcagactaggccattaataaaggttgcccattattaaaaattaacacattttattcaacaaatatttgagagggaaatcaatgctgtgagtcaggtcccattaatagagatggatgtataaagtcgtatcatagtgcaacacaaactttgatatttaaggtctgcattcactaatgcccagtaagattttactaaaaactggtttaagtcgtgagtagaaattatattaggttgtgcagtttttcttacttactaaaagctgaacgtgtttttcttttgttgtttgttgtttacctgttagaatttagtttataaggggccacgtaggtatttcctcaggaagatatcttcctcaagatttccatggcataatttgtgacagaattaagttatgccacctttgaagtcggtcacagcccgaaagcacaagaagttgtttacaaaggaacccatcgattctccttctttctctggaagcatccgagcagtgaggcccgtacagtctgtttggcacagtgactgctctcagctggccaggggccctcctgctgctgggcagaggatgcgccagagctttgcttgcagctaagcaaagcctgcctgcagttctgctcgtggttaactgcggccttgcaactgtgtaccacagcctactggtttagttgcaatctcttttccttaatattttccatctggccaacaatgacctataaagacagacacaaaacagggtttgaattatagggagtgtgatgctgaaatgtttccaaatcacactctagaacctgtagtcccgggcagctgcctttgcatgcgggacagaaggaaacttttctcaagttggtttgcaaagcactgagtcacatcaaagacctgagccattcagcttttaagtgttttaaaaggcttcataaattccttctctgtcactgaattttagcatttaactcacagttctgctactgatattgaacatttttgagaaaaatataatgagggtcacaagagtgtttcatatccaacttctaaatttttagctttatctaaagctttaacaattagtgaagcttgggcataattggtgtcattgtgctctgaatggcgttacaattgcagagatgttttactataaatttagaactcattgaaacagatttcaaaaatgagtaagagttgcttttgaatttctcttgctaagaattttcctgaagatgcatttgttaatggttttgagccagattgaaatggtatgcaataaagtcatctcatatttttgtatcattagaagccaatttagaatatttgtcaaaattagaatggaagttcagatttggaaaatttttttatcagctatcaaagcacttggggatgatttgtgttttttacagcttgaatcgtttgagaattgctattcttcttagtctttattttcagaatatctcttagtctaagaaaggcgagttgcttctccctttttggaagatgacctgtgctcagagaggttatggtttggcttctgtggcacagccttgaagagaaagctggggaggcctggccagacattttgatgctcagacctcaagtccatgctgccacctcctgtctgcatcctagctttcattttaaatcaaccaagcttttcttcagaagtctgctcaatgactttttttttttttttaattttatgcttctctgtcctgtcttttatttctctcttctcctcccctctccttcccctcactccaggtggttaactctttgtgccaaagttgaagtcagatttggcctggagccaacattgagaattcagtgtgtctatttttcagtacctctaaaggttgagattcatgctgaagtctcattaggaaatttaggtatgtgtggttttagaagctgattagatgctccacagatttgatctcctggatgctccctcccttcagcctccctcaacgagttgtgcttcttttctattgtggctctcaatttccaagtctggggttaggatgagaaatgcaggttaattagagcaacccagttgactctaagaatgggagtgagcaccaagcattatgactacaaaggttagactagttcagtgtctttgagaagggaagggaagaagggagggaaatttggatgttcttctttaacaagctgagcagcaaataaagatcacactagaatatggtgggtgttaggtatcacctattcattccttcaataaatattggtttagtcaacatctactgcattatactatgaaccaagcaatgtagttgacactggagtcagagagatgacatgtccttgcaggagagatggtcagactaaaaaccttgatgtgataagggtataaaagcatgaagccctgagggaggtgtattagtctgttttcatactgctgataaagatatacctgagactgggaagtaaaagaggtttaatggatttacagttctgcgtggctggggaggcctcacaatcatggcggaaggcaagggggagcaaatcacatcttacatggatggcagcaagcaaatagagctggtgcagggaaactcccatttttaaggccatcagatttcatgagacttattcattgtcacgagaacagcatgggaaagaccacccccatgaataagttacctcccacagggttgctcccatgacacatgggaactgtgggagttacagttaaagatgagatttgggtgggaatgcagccaaaccatatcattccaccccagcccctcccaaatctcatgtattcacatttcaaaactaatcatgccttcccaacagtcccccaaagtcttaactgatttcatcattaactcgaaagtccacagtccaaagtctcatgtgagacaaggcaagtcccttctgcctatgaacctgtaaaatcaaaagcaagttagttacttcctggatacactgggggtacagaaattgggtaaatacagccattctgaatgggagaaattggccaaaacagaggggctgtaggccccatgcaagtctacaatccagcagggcagtcaaatcctaaagttccaaaattatctccattgactccrtgtctcacatccaggtcatgctgatgcaagaggtgggttcccatggtcttgggcagctctgcccctgtggctttgcagggtacagccaccctcctggctgctttcatgggctggtattgagtatcttcagctttttctaggcacacagtgcaagctgtcagtggatctgccattctggggtctggaggatggtggcccttttctcacagctccactaggcagtgcctcagtagggactctgtgtgggagctccaacccacatttcccttctgcactgccctagcagaagttctccatgagggcccccactcctgcagcaaacttctgcctgggcatccaggtatttccatacatactctgaaatctaggcagaggtttccaaacctcaattcttgacttctctgcacctgcaggcttaataccatgtggaagctgccaaggcttggggcttccaccctatgaagcaacagcctgagctgtactttggacccttgtagtcacagctggagtgactgggacacaggtcaccaagtccctagactgcacccagtagagggacccagggctcagcccatgaaaccattttttcctcctaaacctccgggcctgtgatggaaggagctgtcgcaaaggtctctgacatgccttggagacattttccccattgtcttggtgattaacgttcagctcctcgtttatgcaaatttctgcagctggcttgaatttctcctcagcaaaatgggattttcttttctattgtattgtcaggctgcaaatttttcaaacttttatgttttatttcccttttaaaactgaatgcctttaacagcacccaagtcacctcttgaatgctttgctgcttagaaatttcttctgccggataccctaaatcatctttctcaagtacaaagttccacaaatctctaaagcaggagcaaaatgctgccagtctctttgctaaaacataacaagagtcacttttgctccagttcccagcaggttcctcatctccttttgagaccacctcatcctggaccttattgttcatatcatgatcagcatttttgtcaaagccattcaacaagtctctaggaagttccaaacttttccacattttcctgtcttcttctgagccctccaaactgttccagtctctgcctgttacccagttccaaagtcacttccacatttttgggtatcttttcagcaatgccccactctactggtaccaatttactgtattagtctgttttcacactgctgataaagacatacccaagaatgggaagaaaaagaggtttaatggacttacagttccatatggctggggaggcctcacaatcatggtggaaggcaagaaggagtaagtcatgtcttacatggatggaagcaggtaaagacagctggtacagggaaactcccatttttatagccattagatctcatgagactgattcattatcatcagaacagcatgggaaagacctgcccccatgatttgatcacctcccacagggttgctcccacgacatatgggaattgtgggagttaaaattaaaaatgagatttgggtggggacacagccaaaccatatcatgaggtagctcacttttgttggtggagatgggaaatgggatgaaacctgaagagcaactaagaatgttacccaggtggatggggaggtgggacaggaatgggagagaaggcagagcatgataggcaggttggacagcacgggcagaggcccaggaccaagggagcacagtgcttctgcagagtggtggagcattcagtatgcctggagcagaggagaatggcaggaaatgaggctggaaggaccagagagcaaggacctcacaggtcatgtggtggcttttggacttgatcctgaagtcagtgaagaatgacttggagaatcttaagtaaagggatgacataatcagatttgtgtgttagaaaatcattttggctctagcatagaggaaccacttacaggtgaagtgagaagttgtggggatctgcattggggcagagagggaggggaagagtgggtgtggagagtaagtgagcaagcaggtgagcttgcactctaaggctgaagacagttctgggtcagacacttggagtatcatttataatctgaaagttctgcttttcatacctaattccctagcattctgctttttaaatgatcatgggatgtttgataaatgaatgcatgaatgccatttcttttaggtaaagactggtttactcttctaattccattttgcctaaactagccttgagttgtttgtgttccccaagtgtttactcccagcaagatggaggcagcccaygcatgctggatggcmgcaggaagtcaatcttggatttcagaaattgccatagataagaatcagctgcaaataatcatggcccaacccataagagacagtgttggcaatgataaagttaactctgctaagattagtctgaaaagagtttgcatgtattttgaatagccctgatagaagggtgaacatgtgtctgtaccagttgctgggcctagtaaagagattgtattttggtgaatgaaaggatcagaggggcaaatctcctgatcctttgctaggctgagctgggtcctccactttgattacatttgaagtcgcaggcctattaatgagaacactttaactggtctcggaccaatctttcttcctcttctctttacctttgttcatttggggccccccttttgccccccagcatgcacagaccctcctccattaaagaataagagcattttccctcggagccctggctgaggcagctgcctcttctgtcatccctcactcccgctgccctgttgttatcttcaagacttagctggtggttgccaatctgttacacctgctctcaggggccctccctgtttgaatacgtggtgatgttgagctacattcagatgtagaaggttcactcttgaaagaaaagctcatgtatttaattgcttattgtggcatggagggaactgggtaattgagtatattttccattttcagtatggaaattaaatcaaagcaagcctttatgatttgtggtcggtacttaggcagcatggcatggtgaaaggagagcaggctttgaagccacagacttgagttcaagtattgctatcttcatttgctacaggttgagcatcccttatctgaaaattcaaaatccgaaatgttctagagttggaaactttttgagggacatgactccacaagtgggaaattccacacctgacattatgtgatgggttgccatcaaaatttagtcaaaactttgtttcttgcacaaaatgattaaaaaatattctatagaagtaccttcaggctatgtgttatgaggtgtatatgaaacataaatgaatttgatgtttagacttgggtcccatcctcaggattatcttgctctatatatgcaaatacttcaaaattaaaaaaaaaaaatctgaaaacctttaacacttctggtcccaggcatttcagataagacaactcagtctgcgatttaactgagcctggtattcactctctttaaaacgaggattaataatagcagcagagtctcagtcgttgcaaggatgatgattaaacaagataatagatgtctaagtgccagctctgtgtgtgatacctagagagcactcccaggcggacagttcagttctcttcgtgattgtcatccacggcagtggcagccataatgcaatggggagaggatagtctcaggtgtcagaacagggtttgaatcctggctcagctgcacattagcagtgtttgtgatactgagcaaggtacctctgagccttagcttatcaaatgggagtcgtaattcctaccttacagggctacgaaaacttgggataacgttaaccactgtgttagtctattttcacactgcctataaggacatacctgagactgggtaatttttaaagaaaaagaggtttaatggactcacagttcctcatgcctggggaggcctcacaatcatggtggaaggtcaaaggcacttcttacatggcggcaggcaagagagagaatgagaaccaagcaaaaggggtttccccttataaaactgtcagatctcgtgagacttattcactaccaygagaacagtatgggggaaactgcccctgtgattcagttatctcccaccgggtccatcccacaacatgtgggaattatgggagctacatttcaaaatgagatttgggtgaggacacagccaaaccatattaccacttgtacagagcttagcaagttgtggacactctgggtgtagtcctttgttactgttgtctgggcttgcctttgaaaagaacattgtcccaacagagtctgtagttccaatggcagttcagtttgagtcccaaattttgatgagtcttaatgttcctgcagccaagagagtccagaagagaatcgttccagtgttcttctggacctggatctcatatgagtaacaaaatgcaagcatacaatcctcactgtgaatctacaggaggctgttgtttcaactgacttaagaaatttcactgagtatggaaaggatgtcagaactttagccagagctgcaactataatcacattattttgctgctgctcagtggagctaagaaagcttaagagtattaccatctgggcaaagctaggcaatggtgaactgtgaactgcttaccaacttaacagaaactcttgctacctcattcattaattaggcctttatggcacaccttcttttggttgcttggcaaccataatagcagtcattaaattctgtcattttgtattaaccctttggccctgggtggattgggagcccccaccttaacactaatgcattttacattagtacgtctacctgggaaatcccattcccttgacacttcagctataaagagcaaatagccagagtccaaaatagaaaaagttctttttttcttcacattagtgtatgtgcttttaaggctttacaaaatgtatctgtcaggatggaggccatttcccaatttgctgacagacagacataacatacacccagcaagatgaaaagacagctagtttcccagaaaacaggagctgactgtgacttctgtgggcttatggaggaaggagstggtgtgaaaaccagatgggagagttgttaagagttgtatgtttccaaaattgcctttgtagctcctttgcaaaaatttggaccatgcatgctggagggatagggggctattccaactacacactgtttagcatttcagcaactgattagagtggtagggaacaaactgtgtactctggcaaagtctgtgaggaaatgcagtggacacagggcaacctctgggagactgtcaagggctcctatgatgctctgcccactaggttacataaatgtgaacaagatataaaagccttacattaaaatagggcttaggaatttaaactggaggtatatcctcttttctataatgagctaaaatgatttgagacttgtgtagtataattagaataattccatttctcagaaatattaatttttctcttagtggaagaaaacaggaagtacgttaggttttggcatcagacaaacctaggttggaatccttactctacccagtaactgtgtaatcttgtacagttgcctttcttttttatctctctttccttatctgtaaagtggggataatcattccccttcagagtattgttataaggattaaatgagtcacatacattatacgtatctcctagttaaggcatggcccatggtatagaccccattcattctttcaacaaacaggactgcagtggtgatcaagaacctctccactctcatgattttacagtcaagcttagtgtcagatcctctttgtccctcagtttactaatgacgcccagaraggctgtcacttgccaactatctgaccagatctgatagtagtatctgggttgcctggccaccgggtctctcaaataaattttatatgtaatactgctaagtttcctaggcgcggtgtgactatgtatttactatttctcagtatattttgggtggtaactttagaaggcaaaaggaaaagtaaaaagtaaccacaattaactagtccaagttattagtatcaaacttaaaaactagattagtcatttgcacttaacggttcatgtggttatagtaaggtgggccctgctaaaaatgttggcattgtttattgaggagtttaaataaaaatttactccccttgcctctgccccgtcaagcatgtacgtgatactcacagcatctgggatttaaagtggctactgtttgttaaaaaagcagtaacttccctgaaggagttttgtgagttaggagaagtcacaaaggcaattaattttgttcttcagagcagtacctccactgcattcgtttgtactttttgcaagcttaaattataacccaggagccagccgtaccatgatccgatttgatatttagttttattttattagtagttgtctttaatggatgtcttgtcatgtaggtttcctgattattagtaatttaaattgactctgagaatgaaaggaaaccacaggcatgaaactgatggactgtgactacagcggtcttccagctttcaaggcagctgtgatggctctgcaggctcccttggttcccccctccttcgtccttttaaagctttgaacactcttttagctaatgctgaaaatgagagcttaatactgttactatatgggaacttttaaaagcaaatgggcatcctaagtgttctttcctctttgaaggtaagtgttatgcatgggtctactctctacttgatcagatctaatttgacccaggagtagagatctgtgaagatgctaactgaaaaacaatgattgcagggaaaataatttcccttgttcttatgctgtgcctttctaccactccctagaattgcttacagtatctttgtgaaaggaacaggtgaaaatttacttttcttgccatcttttggtagtagccaagatcacatgtatcctaaaagaggctgctccctggagtgctccagagcagcacaagtcatgctgttaaagggcatttgttgtggctttaagatccagtgcctacccgggtgtggtggctcatacctgtaatcccagcactttgggaggctgaggtggggggatcgcttgaggccaggagtttgagaccaccctgggcaacatggcaaaaccccatctctattaaaaatacaaaaattagttgggcatggtggcgccgcctctcgtcccagctactcagtaggctgagttgagaggatcactggagtcaaggctgcagtgagcggaggttgtaccaccacactccatgctgggccatgggagtgatatcctgtctcaaaaacaaaaaaacaaaaagcaacaataaaaaacagatccagtgcctatagcattaatttctctgagctctagacatatagttgatgatcctggagtctgagtactttaggttagatttagtttagttgctgcttaacagctgcaaactagctctaggtagtttgctaaataactttactcactcattcattaatgaagcctgtgttaagtgtctcctttgttcagtcattgatgtgggtgaatgaatgaagaaaggaagttttatatgagtcagtgaatgaatgagagttgtactttctgtcttcaggcagctcacagtctctgataagatgatctgaccaaggctctttttatgtgagtgaattttagaacctcgtgccagtgggatatactgccaacccagagtctataaatcacagttattttttgcaagaattgagtattctcatttgtcttgctaatccagaaaagttaagttgtaaacaaaacatttattttttattattattattattttttttggagacagagtctctgtcacccaggctgaagtgcagtggcgcgatcttggctcactgcaacctccacctcccaggttcaagcaattctccctctctcagcctcctaagtagctgggattacaggtgcccgccaccatgcctggctaatttttttattttttagtagagatggggtttcgccatgttggccaggctggtctcgaactcctgacctcaggtgatttgcctgcctcagcctcccaaagtgctgggattacaggcatgagccactgtgcctggacgtaaacaaaacatattttagaagttactgaaaaataatttttaagaagccaatgaaacctgactgtggagaaatatattcctagcaaccaacctgtggactcagagaaagaacctaggatggaatcaattttcaatttgtctgttcccccacttcctccattgttttatagttatgatcatttaaaggcacgtgaatgtatgtgaaactgtgctgtttttctcatgctagagcacttctggttctcttacagtagggctgactctgagagtaggtttttgtttttgtttttgtattttgagatgaagtctcaccctgtcccctaggctggagtgcagtggcatgttcttggctcactgcaatctctgcctcctgggttcaagcaattctccttcttcagcctccctggtagctgggattacaggcatgcaccaccacacccggctaatttttgtatttttagtrgagatggggtttcaccatgttggccaggccggtctcgaactcctgaccttaagtgatccacccaactcagcctctcaaagtgctgggattacaggtgtgagccattgcacccggccaatgctgagagtttttgtccctgcaacatgatggtagacaaggtcgcctggcaggagctacctgcacagacagcattccccactgctggggctggtatctgtggctgaaacagggttagctgcaatgtgagaggacgctagtcccagcccaccagagtgatttctttggagtgttctgataaaactgccgatcctttctcgagcataaaatgccactgctttgtctttcctttactcaatcaattctaatatacttgctaggcaagcatgcttctaactgtacacactaatttttaagtactgttaaaagtaaattccaatttttagatggctcttataaggggcatcatggcataatttgtgatttttttttaactcttctctccatatgtaaaggtatagtggcaaagtcagacagatctagagtcaaatctcagccccgtctttcataaactatatgaccttgggaaagatatttcacctctgaatttcagtgtttctgttgatggaatagtgacaataatgttattagtaataatattcttattgtcaaaattaaatatgataatgtatctaagaattatcaacatagtgtgaatttcaggagagtctagttttttttttctaattgtctttattttaaaatgtattcattgttatttaccccaacttgtggaaaactgtgtaggtttcagtgccatcataaggagtatgtggaaaggtatgatgaaaagcccaaagtcccgtggtcccactcctatgagcagttgctgtggagacatggaaatgctattctgaattgacctaaccagtggtcctgtgctctaatctctgattcccagatgataacagatgtctcttaagtgattccaggtgttctgaacatagtgaaatctcttatctgccacatccacagttactccttaaagttcttttatattacctctttaatagtatttgaaggatcgagattccttgacagctgttggaactctaactccctacttgaagggactctgcttttagtcctcaggtgatctccagactttcatgctgtaccgtttgatttgggcccacatgccaaatagttttaatatgttctccttttttattaaacagtttttgtcatgtccaagagatttcctgctggtagcagctataactttttctcaccatcaaggcattctctgccccttgttaactctcggtcagggattttctgcatacttctcttcaaaatattctcgttggcatcgtataggcggtgaagttttccctgactaccttaggagttcagtactcccttttccatcatttagagtgttttatgcatacttgtagtttcagacctttaaaggcccatttgtactttgggggacattcgcctttgtccaacctgagctttgcttctgtagcaggagctgaggtatttaggtagaactttctgccagattaaatctgttggaaatatcgaaggcagaatgttgtagttacagagttgaacttgatttctaatgccagctctacattttaatatccttttcaccttgggctagttacttaagtcttttcacattagcctgttttgttaattaattaatttctctcctaaacccagttaaaagaagccaacatttccactgttataacagaagcagggaggaggaaccagtggctacagatttccatatgtacatctggtgcctggtctatgtcattgtcgtcatggtggtggtaacaactaatgcttatggcatgtttactctgtgccaggcactattctaaatgctccatatacttgtctttttaaatctccatcacaaccctgtgaagttggtactactgttatctccagtttagaaatgaatgaacaggagcacaaagaggttaaataatttacccaagggacagagctagagtaagaacactggtgatctggttccagagcccagacttccaaaagtgtttaatgaatatgtaaatatgtattgaatgaatgaatgtgttgttggaaagttgaggtaactcctgtctaaacttctgttttcttgatgaagtaggtggtaagatcagatactgagggtgaggaagagagagtatgaagattaaagatttgagtagatatggaatagtcatgtaggccaactagtggaaaaggctggacagtgttgaagacttagttgatgttgtagattttataaatgtagaattcctagaggtataatatgtttgtgtggaatttttccctagctatgcatattagcctaatggaggcacagagaaggtaaatagttgcattcattcaagaataaggcatttccatgcatcagggatgaaaggaaaagagacacatgcctttatggtctggatatgatggaccatagaactgagctggataagccagtggtgaagaaaggagagtctcatacttgaggaaaatgaagagaccattagtgataagggttaagaacaggtagaaaaggagccgtaagatgaatgaacaccaaggataagaaactagtttcagatttgggaagtcttaattagtgattttagaggcagggcgggtttggtaatgggaaggttaaggggagactaaagaatgtggctgggatacagtaaagaaggaggtcagaatgatgaggtcattgaagcccctgagagccagggtgttgaatgactgcccccatcaactgtgcacatggtagttatgctttaggtttgcagtaggtaggatgtcacagtagcagtggacttgaaagacattgctttgttgaatttatatatatatatatatatatatatacatatatacatatatatatatatatattttttaatttattattattttgagatggagcctccttctgtcctccaggctggagtgcagtggcgtgatcttggctcactgcaacatctgcctcctgggttcaagctattctcctgcctcagcctctctgagtagctgtgattataggcacccgccaccacgcctggctaatttttgtatttttagtacaaacaaggtttcaccatgttggccaggctggttttgaactcctgacctcaggtgatccactcgcctcagcctcccaaagtgctgggattacaggtgtgagccaccgcacctggcctctatatattttttaattgacaaaaactgtatatatttatactgtgtagcatgaggttttgatacatgtatatattgtagaatagctaaatcaagctatttaacttatcaatataatgcgtatttgtttactcctttttgtgtaaatattctcaaatatacattactcatccaagatagataggggaaatacattaaaaagatctcttccggctgggcatggtggctcacgcctgtaatcccagcacattgagaggccgaggcaggtggatcatgtgagatcaggggtttgagcccagcctggccaacatggtgaaaccctgtctctactaaaaatacaaaaattagcctggcatggtggcacacacctgtaatcccagctacttgggaggctgaggcagcagaattgcttgaagccgggagatggaggttgcagtgagtcaagatcatgctactgcactccagcctgggcaacaagagtgaacctctgtctcaaaaaaaaaaaaaaaacctccaagatttttcattaaattataatctttagggagtacagcttgtccctaacaacatttaaaaattatcagaatttcttaaaaagctcaaagcaaatttgtatgatgccagtgtgtgtgtgtgtgtgtgtgtgtgtttaatgaggctttatagatgactcagcagcgtagctgcactcaagttatcttttcttggttggtgagtgactagaaaggattctctagagtggtagccttgttgaacttagccttcagaattcagcattcaaactccagtggggatttcccagttgattgttgcctgtaactaaacaaaaggccttcaaaactcttattacatggtgtgtttttgcaaaattttgttggtgacataaaaagacaaaacaggacatgcaaaagcccttatatcacaataccctagtattaccttttcttagattttgtatctttagacgcacacactttttaaattagtgaaaaacatttgtatgtatgcaaggattatttagagctaggtaaagatttggaagtgctttcgtagttcttaggtatgttggaaatttggacgtcatcatgatgtgaggaaaagagtattaactttgaaagcagaaagacctggttcaaatactagttctaccacttgctaccacttggctattgtgagaaagttattaaactttcctgagtgttggattctttatctctagtgataattcttaattcattgagttgtgactagggtaggtaaatatatggcacacagtggttgccgaaccaatattaacttttcctttccaatacccctcttcccattattcaagtgaattttggatcctttgtcttgaagaaatcttggttttccaagttccttagaaattccaaatggaaactgtcatatattttgcagctttcatgagtgtggctagtttttaggagaaatttcagtagggaccatcagcagtgcagtttacaatgcaggcacatgatgtctgctgaaattggcccctgcagacgttagggtgtataggtgggccatcactgagcagcaggccatatagcaaggcagtagcaagctaggatgcaggaggaaggcaagatctacggaaaacttaaagggacatggggaagtaagagatcaggggtggagggtaagaggcctctgacattgttctctgaggtcaagttcagactgtgccaaagcagaatcagtgccaagccaagtatagagactcaaggggaattcagaatggggaaaatgaggcaagagaatgtgttagagcagagttgatcccagtataagaatcagtgcttgatcattacgagaattctatccaaaaggcacaagaacaaagaacataccttctcacctagaaactggggcactggtgctcagaggggggcctgggtcgggagtaggattgggaaagagaagtcctgggaacagaggaggccttagttacagagtctgctaaactggcaggggatctgtctgctccatttaggccttcttcctgatagggttgcagaaatgctagcatctccactttttagacatagaacagacttgaccactttcagtcctgctgggttgtagagtgacagcccttgatatgctgaccagctggctcaaagtcgattccaggggaatggtaggcagcctactgatagccaaaaagggctgaggcgggggagttatcccaatactgtaaatgaaattcaagtatgtttaacccatggtcatctatttagtgtatcatacataacagtaaagtcaaagccaatgacctcctgaagaaatcaagtggtgttttcttaagaggttagaattcagttaaaagcaaaattcaagtcttaggtactgagaatgctaaaacagaaggctccggtagtcttttctttttttgtttttaaaaattcccaattatgtaatcaatacatgctcattgctcatcctactccccctgccaaactgaaggtgctataagaaactagaagaagaaaaaaccccacataaccctaccatctgcatgcaacaatgatgacatattcttttattttttatatacttgtaatattttatatgttgttacttaaaatttatttttctggtcatgaatatacttagactctgaagtaaatgtgcaacatgctaaaaaactgaagaaaatggccccaaattccatctacccagagaatttaggcttccaaaaatattgtgcaagcaatgcatcaatatttttcttgtaaatagttaaaataacatataaatatgtaattaatataggtataatgcaggtttcctttgatcacctctcaattccagtcctctatccagaatagaactcttatacataattattacatatattctttcctatgcatctaattatatagaatatatgtaaggtaatgataaaataaacactggagagtctattgcccaactaaagaatatgaccattcgcattcaaaccactcctgttggtggaccacatgggttgttcccaattttttcttctctttttttttgtttttgctataacaaacactgctattatgaagcctcagagaagaaattctgcaatctgctatcaccacatctcacccacctacaacttcacccgtatacgctaccttctcccctgttatcatgggtgcattttccagattcctagcaagaacaaaaccatgcatccatgcactagattccatcccctttcgtctactcaagacacgattccatcagttttcttcttcccattctgaattatttccccctctctacttgatcttccccttattgtggaagcatgtagctatttctcctatcttagtggatgggagyaggaaaacatcctcttgaactaatactgttctcccattaggtctctatttcctcttccctttacagcaaaattcctttaaaaagttgctgaatttgttgtcgtcagttctccactgaagtcattccaatcaggcttccactcccaccacccctctgaatctgctcttgtcatggttatcagtgaccaaaaatgtgattaattctcagttctcctctttcttgatctgtttgacacaatcactgccttctctttgatatattttcctcatatgacttccagggaagggaaccctgttttcctgatttcctgctacttccttggcttttctttctgtctcctttgccagttattccatacctccccaaagtgttaaatggtgctcccttccagggctcagtccttgggcttcttttttttttttttcctttttgagatggagttaacgctcttgttccccaggctggagtgcaatggcgggatcttggctcactgcaacctccgcctcccaggttcaagtgattctcctgcctcagcctcgcgagtagctgggattacaggcatgcgccaccatgcctggctaattttgtatttttagtagagacgaggtttctcgatgttgatcaggctggtctcaaactcctgatatcaggtgatccgcctgccttggcctcccaaagtgctgggattacaggcgtgagccaccgcgcccggccctgagcttcttttctttaaatatatttactcccttcattgcacccagtgtcatgtcatgtctattaacaccttctgacaactcccagaattaaatagcaatctcagacatggacttttcccttgaactccagctgcttacaccttctcttggctatctgataggcatttttatataacacatccaaaattcagcttctaatttttctcctcaactctattcttagtcttccccatctcagttaagggcaggacaatactatttttttccatttgataatgccaaaaaccttggagttgtttttgacccttctctatttttttttttttttttttttttttttgagacggagtctcgctctgtcacccagactggagggcagtggcgtgatctcggctcactgcaagctccccctcctgggttcacgccattctcctgcctcagcctcccgagtagctgggacgacaggcgcccgccaccacgcctggctaattttttgtatttttagtagagaccgggtttcgctgtgttagccaggatggtctcgatttcctgacctcgtgatccgcccgtctcggcctcccaaagtgctgggattacaggcgtgagccaccgcgcccagccgacccttctcttttttgtccacatactctatatccaagccatccacaaattcagccatatcttatgttgaaaaatatcctgggaggccaaaatgggcagatcatgaggtcaggaatttgagaccagcctggccaacatagtgaaacctcgtctctactaaaaatacaaaaaattagctgggcatggtggcggacgcctgtaatcccagctatttggaaggctgaggcaggagactagcttgaaccagggaggtggaggttgcagtgagccgagattgcgccactgcagtccgcagtccggcctgggckacagagcaagactccgtctcaaaaaaaaaaaaaaaagaaaaaatatctagtatctgttgatgtagctccacctccaccactaccaccctggtccaagccaacaccatttcttgctgcattgttagaactggtttccctgtttctaatcttaacctcctagatgcagcttttctcatactgcatttctcatctgatcccagaacacaaaacagaatttgaatgacactgttttctcagttctcccaaggatggtacatattatttttgctgtgtcaattactatggtcttaatatctatctagttctctacgtcttcttttcttcttggatgttctgcttttcttggtattgtgcctttccatgtaaattttagattcagtaatattatcaagtctcataaaaaccaggttgaaattttcactgaatacagataagtctggaatgaattgacacctttatgttagtgagttttcctgcccaattcctgaacatggtgtcagtttatttagattttattttaatatcttttaaaaacacttcaaaatttcttccataatggtcctacatatctttgcttcatttttttcccctaaggacctatgtttttacgggttctataaatggcatatatttttaattacatttttctgttctcgtgttgtttagaaactcaattgatttctgaatattgatcttttgcccagctacctaattctagtagtttattatatatccttttggatttcagatataaaattatgtaatttataaataaccactttaccttttttcccctttcctattctttgtaccctttatttccttttcttgtccagctgtgctgcttaatatcttcagtacaacgttgagcagaagtaaagataatgaatatactcttattgttcttcattttaaagaaagtatattagcatttctccaataagtcgtaaatagatattctgtcttagattaaggagattcttttttgctcttgttttatttacgtgccacaaatgagtatgtctaattgttactcttaaactaattcacttatttgttcttgctgtcttcacagtgctttgtctctcatgtgtttgtttgttttttttttttaaattcatcttgcgtgggatttcagcaattctggaacaatctcaaccattatttctttgacttttgatgcttctttttcttattatatccttctggaaatttgattagaatacattaggctttttcactctctttcatgttgcttgttttcctttttcagttatttcttcttcttgtctatttagatccattatgaataacgtatctgggtttatcttccggctcactaatgccacttttactcgtgtctaatcttttcattttgtgatattccatttggttcttttatagatctgcttggctgttggtagtctttttttccccaccattgtcaatcattcctttaaaaaatgagaaactaagttttttacatgcattaaacactgttttattctgtttctgattattttagttgtccacaaagctttatttgtaggaattgggggagtggggcttggctcaatttgaatccctctagagtatatttatatttcaactatgcttctggctattacctaggaatactaataatttgggttctctataaatatgtttgccattttatgagaccacgatgggtgaatttggattgcaactccatgtgaaagcatacttttagttagacgtgtcactggagatatttgcttgtaccctgcaacagcatcaagaatgaagaattttctgctgatagaatttaatcagaatattttatccttacactaaagatgtagcccttgactacctaagtattaggctgttgtgtacttaagagatttctaggctttatctcctttcacctctgacctgtgtctccatcattttgggagctcaaagtgttcatggtttggcaaagagcttcaggggtaaaaactagctttattgcttgtttacttttctgagttccatttttttttttcattttatttttcgggcctctagagtgtttactttttaccagattagcaatatttttaaagatggtacatgaaaatatatagtctggcatttaattgtatcagttgggagggttttaaaaatatctaatcttccataggccaaaatggatgaactaaagaaatgaaaacatatataaatataaaatatatatttacatacactaaaattcaccaattttaagtgtacaatttaatgagtttgacaaatgtatacagatgtataaccactaccatggtcaagatacagaacgtttctgtcactcccaaaagttctctgtgcccctttttagtcaccccaacctcccctggccctaggcaagcacaaatctgttttctttcattgtcaattaactttatctttcctagaattttatttaaatggaaaggagtacaatatgtactcctttgtgtctagcttcttttgctcagcgtagcatttttgagattcattcaagttatttatatatgagtagcttgttctttttggtaaggacttattactgccattttcattgttttctaggtcctttctttcttcctctcttactgtttcctttgtggttgagtgatttttctatagtagtgtgttttgattctttgctttttatttttagtgtatctattatagttttttgctttgtagttaccatgaagcatataaaaaacataactataacaggttattttaagctgataataacaacttaactttgatcacatggagaccaaaaaactctgtagtttaactgtacatcctcccctgacattttgaaatttgatgtcataatttacatctttttataacgtatatcccttaacaaattatcgtagttattttttaggctgggtgcagtggctcacacctgtaatcctaggtggatggatcacttgagtccaggagttcgagaccaacctgggtaacatagtgaaaccccatctctactacaaatacaaaacaaagaaattagccatgtgtggtggtgtgtgcctgtggtcccagctacttgggtggctgagccaggagaatcacttgaacccaggaggcagaagttgcagtgagccgagatcgcgccactacactccagcctgggctacagggaaagactctgtatcaaaagaaaagaaaatcattgtagttatttttaaaatagttttgtcttttaacctatatacttgatataagggacttacataccaccattatggcattagagtattataaatttgactgtatacttacttttactttcagatgttttatgttatttattagcatccttttctttcagcttaaggaactccctttggcactgcttgtaagacaggtctggtgatagtgaactcccttatcttttgtttgtctggaaaaatctttctctctccttcatttctgtaggacagatttgctgggtacagtattcttggttgacagtatttttccttcagcactataaatatatcatcgcagtctttcctggcttataatgtttattctcagaagtttgctgctgggtgtcttggaactctcttatatattatttgcttcttttgtcttgctgctttcaggattttctctttgtctttgatctttgacagtttgattagattctatcttggggtagtcttatttgaattgaatctgattggaggcttttgacctttctgtacctggatatttgtatctttctgtaggtttggtatattttttgctattatttatttaaataagctttcctacctctttatctttctctaccccttcttgaataccagcaactcatacatttgctcttttgatgccattccgtaaatctcataagctttcttcgttccttttttttccttttttatcctctgattgtatattttcaaataacctgtctttgacttcacagatttttttccttctgcttaatcaggtctgctattgattttctctattgcgtttttatttatttatttatttttgtatttttcaactcctgaaaaatgtttttaaaaattattttaggctctgttaaatttctaattctggtcacttattatgtttctcatttcattgaattgtttattgagcacctttaaaatagctattttggattctctatcaggcagtacatacatctttgtctctttatggtcagtcactagtacctcattttgtctgtttagtgacaacgtgtttccctgatccttgtagtcatgcattgaccttctgtacattgaagaagtaggtacttattccagtctttgtaagcttttgtggctttgttttggaacctccttcaaaagtaagcctgttcagagtttctaggcaggttgtctggtctggtccctaatcctcagattgctgtagctgtggtagcttagcatgctaagcccatggctaccaaggctggtacagcactgggatatacctgaagctcttggctgctgagagcctgcctgttgctgtgggttattcatagcctaaggccactgtagtcagctggcagtgatgcaggccagaactcaaatctgtgttataggggctgcaggtctctggtgctggggtgggtctagaagctcagttcacaggtgtcggcctggagttagaggccctagaggtctgcctgatgctgggttttatggtggcaggctcagtattggggacctagacaaagtcttagacttatttctctttcccccaggcagatgatatctctttccactgcctgaggtaaggggagggatgacatgggtaatgcaaaattgtcctttctaccctctttgatgtgtctttcttattattgtgctataaccaggcactatgatctgttacatggtttctttagctcttgtgagggtattttgaactgtttaaattgatgtttctgtgtggggataatccctggagagttcatttctgccattttgctctaccttctatcaatttttacttctgagttcatgctttttgtgttctgtgaaatctctgcataacttaagagcacagagattttcccctatattgtcttatagacattttgtaggtttatctcttatacttaggtcttcagtccatttctataaatttttgtatgtagtgtgaggtaaggaaattggtattaaaattgtaagttcaaattaataaaacagaagcttttataatagcatcaaaatatgaaataccaagggatacattgaacaaaatatttgcctgacctgtgcactgaaaatacaaaacattgctgagatacatttttttaaaaagatctaaatagatataccaggctgatggattcaaggattccatgttgtcaagatgttatgatggttaatcttgtgtgtcagcttgtctaggctatggtacctaattatttggtcaaacactagtatagatggtactgtgaaggtattttaaatstaactaacatttataatcattgacttttagtaaaggagatcaccctccataatgttggtggtcctcatccaatcagtttaaagccttcagagcagaaactgaggttttccagagaagaaggaattctgcttcaagactgtaatttaaaaatccttcctgagttcccagcttgctggcctgccctacaaattttggactcaggactgcaacatcagttgttacctgagtttccagcccactggcctgtcctatagatttcaaacttgcctcaaccagttacttaacataaatctctttatacacacacacacgcatgcatacaatagtctattctgtttctctggaggactgttactgatacagatgtcagttctccccaaattgatctatagagtcaatgcaataataccaccaggcctttttttccttcagaattgggcaagctgattctaaaatctgtatgaagatttttgtggcaaagaacttaggcaaaataactttttaaaagaagaataaagttggaggacacatattacctgatctccagttttattgtagagctacagtaattgagacattgtggtattggcacaagggtagaccatacggattagtagaacagaatagagaatcaactgatatctagatatattttttagaaaggtgccaaggtaattcaaagggtagtctgttaaaaaatgaaagggtagggmaggcatagtggctcacacctgtaatcccagcactttgggaggctgaggtgggtggatcacctgaggttgggagtttgagaccagcctggccaacatggcgaaactccgtctcttctgaaaatacaaaaattagctgggtgtgttggcacatgcctgtaatcccagctacttgggaggctgaggcaggagaatcgcttgaacctgggaggcaaaggttgcagtaagctgagatcacgccactgcactccagcctgggtgacagagcgagactctgtctccaataaaaaaaaaaaaaaaaaaamaaagaaagaaagaatgaaagggtagtctattaaaaaatgtcgatggagcagttgggtatccgcagggaaaaaaaaggaactgagttttggatgaaatcactttttccaatacagaagaagaaaataattatcttattatttcagagatgggcacagggagccagggtgaggggggaacctggaagatggggacggggtgagcttgagggagaggtcgaaaataattacctttaatttcatcatccaaagatagatattgtggtgttttctgttagatgttgtcttataatatatgtaatatacagataacttaaatgtatatatttttaaatttacatgtttgaaaacctttttactggatttgctttttacatatttttataacatcacagctttccatctgaaggacatttgaatgaccatatgatactaagtcatgaaggtgttccatattttacctaatgattctcaactgttggaattaataatagtgatagtaatagcagctgccatttattgattactttctacctggaaactatgctaagcaggttttatgaattgtattatttaatccttatgacagctctttagttggctccattaaaaaaaaagtagggggaaccacgggttaagtcacatgcctgtctctaatgtgtgaagcttagatttataattaattgtcttttattccaatacctgagaaaaatatactgccattctttaggctttttatagttttttgccaccgtaaattctgaggcagatatctttgtgtagaaattactgtctacatttcagacatctgaacttcttctcttctgctagtcctttatatgtttgatccatcttcactgaatgaaatattttcaaagcctgtgtaggtgtgcaacgtagtacgcagggcaaagcagtgcacaaactgccaagctgttcttttggttgccagtggcttgagccaaacagcaccagaccatgatgggcatttctataggaatgcatatcttctggggaacgaatctaagggatccgtagagctgactatttggtggttagactcatgttgtaaaacgaaggagaaacaactttagtagtctgtaccctaggacatttttaaatgaaattatataatgttggtccagtgacttaaccctctgccttggcttttccatctgagagaagagcattaagttagagctttgtctccaagtaagatgccctaaagaggtagtattgcctaatgagcaaaatcatatctgttgatgatttggatgtcactaagggggcagtactactacacttgtggtatagccttgaagctagagagatttaggttcagatatagctctaaaccatttatagcttaccaaatgatttcagacaaatttcctgagcctttttgagctccggttttctaattacttggaatataaaacaagcacacactgatctttaagcaagggatctcttctcacgactccttggtttgttctttggacttttcctcaccttatttgggctgtgattttgtagaagaatcagggtcctctacccctccacaacccccatatgatctaaggcttcttttctctaatgagcaacttatttctgcttattctgtatgatatgataaggatagagttaaatcttctcggtccttaacttctattatctgcaggtctgcctatcttttgcattctcttaacctgttgttgacagcaaaagtggcctaagtaagacaggaggccatgtctaaatttgtgaagagttgtttttaaacagcctaaaggttgtgtttatatttagaatgtcttttcactttcatttccatgttaaaggcttatgtaccattagtgttagggtaaaaacaaaaaagcacagcagctctaatagtctctccagtacaccttgtgtcactccatgactactcctggggttcctggtttttcgcattgaggctccaagaaccctggaaactcactgcagaagtgggggaagggggaggaaggaaggaggagggagactgtgaagtaactcaggaatggaaaaccaaacaccgtatgttctcactgatatgtgggagctaagctatgaggatgcaaaggcataagaatgatacaatggacttcggggacttgaggggaagaatgggacggggcaagagataaaagactacaaatagggtgcagtgtatactgctcgagtgatgggtgcaccaaaatctcacaaataaccactaaagaacttactcatgtaaccaagtaccacctgtaccccaataacttatggaaaaataaaaatagaataaaattctataacaacaacaaaaaagttggagaaagatagctggtgggtagaataatatgggaagttgtacttttaaattaattttgtcttgtatgactaaagacacactgatttttgcctagagaaacctttgtttaaaatggttgttttttaatccaagaaaaaagtggaatatggaacctaggtggggattaaataaatgtgcatgtgtgcataattttttcccttttctcctgttaaaatggcaagcaaaatatctggggaacagatatattctgcaagcrgatcttcaccatgttagaatttggggattactcttaatgcaaaagaaatgccccttttatggtttgtatagctccaaattgccggttaaatttaaccggcacagtggcaggtattttgtaagatgtggctgatacgtagcaccttacaaagtttattttgagtgatcaacaaagaatactggtgaatagagacctttttagttgtgttcttatttctttattttcctatgccctgtccaactaagctggagaggacatgatcagatcactatagtaatttagaaaggaacacgctctatccctgccccttcgctgtctaatgagttcatgtaaaaaatatatcaaaagaaattctcatcgcagaatcctcacatttcaaaggggagtatatttattataagaactgctgattcattaggaatgcttcctaattcgcacagcagcagctgcttctggttagaataaactctgtctcctcctttgtgccctgtctctccaaagggatgttaaattttggtttaagattttctcttgctttagctttttctctcccactcttcctctttccccagttgtaatgctttattctaytcagtgttcataggatttgaacaacctactgtacccactctccacctttaaaaatgactttccttaagattacaaatgctaacaaaactcttccgataatgtgttttgtttgcattcacagtggcagtggagtatattgtacagcagtaaagaaaaaagttgagacaccttgtagtcatgaattctaagtgcaataatttaaagtacaggaactgccattgtctgttaaatgaaaccactgtattaacgtatcatagcatgctgttctaatcacttttctccaaataccagcttttgaaagaaacatggctgtatttttttatacaaaatctgaaatcgtgtaattgaatggcttggcagaataggtaaatgaatgtagcaacatgcattcaaatatgtctcttgggtttgtaatgagctgattttgaagttcacagttgtaagacttgccattttatttcctgattttatactccggacccagacaaaggtgccagttttttggtgtgggttttttttttttttttgtattaacagaaaaaggaagaagaaaattgttcataaaaatcagtttgccttttttgggcatcactattggattctgtgttccagtaacctttattcaactgtccttctataaaattatcttctaatgtgaccatttctacttaattttagaattattaactgcctctgttagagctgaaagaaattctgtcatgttggccggggttggtagtctgccacgggtgtgtgcccacactagtatgagagagagttgttgcctgtgcatacttctctcatagcattaatcttagtaattacacttgttgatttacaagtctgaatcccccactagacactgagctccttgaaactagagattgtatcagaatcgcctgttagccccaggacccagcaaaggacctcacagtcagtcaatggtttatgaccaatgagctatagaatgctgtattagtcagagttctctagagggacacactaataggatatatatatatataaaactcaatgacatcatattctttagaatctatagtgttcttatctctaatagtgttttgaaaattggtatccttgttagcttgaatcctccaagaagctgacatcaagacaggattaacagattctgtgttgaaatagaatgatttataatttcaataatatttagcgtatggacttttaacagtaatgtgctgacaacaatcttatttgaatttcttttgaagttaaggcttatattcttagagaacttttgtttctccatatatatatatatggagagttattaagtattaacttacacaatcacaaggtctcacaatagtctatctgcaagctgaggagcaaggagagccagtccgagtcccaaaactgaagaacttggagtctgacgtttgaggccaggaaacaatccagcatgagagtaagttgtaggctgggaggctaggccagtctctctctccttttcatgtttttctgcctgctttatattcactggcagcttattagatggtgcccaccasattaagggtggatctgccttccccagcccactgattcaaatgttaatctcttttggcaataccctcacagacacacccaggatcaatactttgtatccttcaattcaatcaagttgacactcagtattaaccatcacaactggtaagccaaatgggtgtccgagtagataccaaagtgtgcagtagacaaaaagatcatcagctttggagctaaagagacatcatttcgaatcctggttaattaagagattgggaattgcttatggaatccaattgagattttgatgttttaggacaattctagatattgaaaacagcgactgcactactatacattcagacaagagaaaccatgtacttttggtgggagatagggcaaaagaggaaaggacagagtaatattgggagattgccattcaatgggcacagaaagatctacttttgggtttgtcaggatgtcctttaggctatgcagatgtgtgactctaggtaagtcccttatattctctcagctcatctttcttttgctacaaaatgagagagttaaacagtttagagcaactggctgatctcccactttctttgcctcacctggttgggcttgatgacacagagcttgggttttaccttttcttttcaaggagcaaacccttggcaccactcatggtattacggccagacctctgggatgggcatgatttcttagctaggagagagcttggtataataaggaggttctcaaccccagcatacatagacagacttggtttatttcactcacttgtgagatgtttcacaaataatttgttagtgttaaataatatagctaggccaggtgcagtggctcacgcctgtaattgcagcactttgggaggccaaggcaggcatatcacaaggtcaagagatcgagaccatcctggccaacatgatgaaaccctgtctctactaaaaaaaaaaaaatacaaaatttagccgggtgcggtggcacacgcctgaagtcccagctactcgggaggctaaggcaggaggattgctggaacctgggaggcagatgttgcagtgagctgagattgtgccactgcactcccgcctggtgaaagagagagattctgtctcaaaataataataataataataataataataataataataatatagctaatgaaacttgtggatgatatactgttttaatacattaggtggactgaagacattcctatactacccttcacttgaggtggagtggcagctagcaccatggggttgtgatacatgggcatgtccatggaactctattgccatgaaaacttgtccttcattggtcagcagtcagggaaaaaagctaaaatatacagtgtagcttaaaagatcatgatagaagccagacttaaaaggctatgtactgtattattccatttctatgatgttctgaaaaaaaaagcgaaattataggaataggaaagagatcagtggttgccagggctgagatttggggaggcaaggttggccacaaaggagcaacacaagcaggctggatggggtgtgatggaagtgttctatatcttgattgtctgtggttgttacaccgatgtgggcatttgtcaaaagagtgacttttactgcatgtttaaaagaagtgaatttttaaaagagagatggtgggaaggacaggtggaaaacagatgatctcagtgctgtgtgctaagagctatgacacataaatagacagtgagggagattctgttggatggtgcacaagcaaacatttaggggtcctggaaatgttgtatggattcattgcgggtggtggttacatagctgtatccagttgccaaaattcatctatatatacacatagaatgggtggagtttatttgatataaattaaaattcaaagttgatttttaaaaaagaaaaaggatcatgagctttggaaccagagaccatacttcaaatcttgaccatttctttacttgcttggtgatcttgagcaagtcacttcatgtctctgagcctcagtttcttcatctctacattatagctaaaaatacccatctcacatagttgaggtgaggaatagaaataatgcctgatggagctaaggtaccagatattttcattttcatccccaaaatggcccagagcacagaactggtctttaaattaactgaagctgccctattttagagtcataataaaagttaagttcaaacatttgtgaaaggtaaaaatgttaccatccatatgtttgtttaatagtagctcttagaatcttattagctttgctatcttttatatcactatagcatgctaaatcttctagggttaagtcatatttaattagttaactaagaataatatacgctgttccttcagtcaggaaagcacagggaattacttatagtgttagctcggaaagagtcattcattgaggaatgattgaaaaagtactagtgacccatttataatccccatctttttttaatttgctttcattctgtctttgaaatgaaatctttatcttgggttaggggaataaatattaattttagaaatccctattggcccagcccactcttttgtgattgacgcaatcttaaaagtaattggaaagaacatctgtgtgcttgtggcactcaacattttaaaatcattcaaaatgtggttgagaaccattctttctcctaagagagtagacatctacctaacagtcataacagaagctacctatttttgagtctctggtttgttttgtgaactgtgataggtactttgtgttattttgcttaatttgttccataccaccactttgttaggtaaacaggaagtgttgcccttttgcagaggaaagtagccttggagagacgaaggaacagctcttgggggagcctgcttgtcaatgggaggaccgcacctgctgctctggatggtccagctcccctcctctcctgccatgtctcacaatggacactgcttctgaaggaagcaggcaaccctctgcctaacaaattcaggtcaatcttctacatgacaggagctcctttgttagctctcttctcccagagtcaaatctgtttttaaaattttattcagtaagtaaaagagcactgacggaggccctcatttttggaacctccttcttccttgaggactttcaccagccacattggtcttaaaattgttgagtttatctgattccagactatcctccttctaaagcagtctttttacaaagacaaaacccatcagatctgtccactgcttgaaacccttctttgatttcaggaaaagagttaaactccatggtccagcatgtaaatttcttacaagctgggctctttggactgctctagtttcatctctactattgccaaagatcctctctccacccatccccaccctccaaaaaaaaaaaaaaatcacacaaagagacaccccgctctacccttactctgggatccagtaaccccgagccatttgtaattctttgtttctttgcctctgtaatttttggtttcctccagacagaatgtgcttctgtttcatccagttcgccttcctcacttagctgatactacagtctagtggagatgcccttccttggtgctgccacagccctttgcccacctgtgttgcagcatcatcacgtagcattgtgatccatcctttgcaggtctcttccccaagagacttaatagttccttgaggacagacagcactgtgtcttgttcattgatttatcctagctgtctaggacagggctggcacacatttatgcttactaaatgtttgtatgaatgatccagccttgcagatttggcctgaaaatctaacagggaaaaaatagcttctgacccccccatttattccctctcaactaagagtgaccttagataagggagggttgctgtcttcctgagcctgccagggtttattgaggctgactgtacccacattaaggaaaggtcactgaaaaccttattagcacaccatccttgccctgaactgagatccatgataagcatggcacaggaggaagagcatgaggctctcgtgtgaccagtttgttagagagtacaaacttccgcttcatccagaaagcccattttggaactgggtcatcacagttactaagctcactcacagaagcaggagggctgttgcatcttcattctattctctctgaccaatccacctccctagcccttcggcaagaccacttggaagttggtagccagcggggaatcatacctgtggctgtttgtttgttttttaaagaaagaaaaggaggggggatattttgttaacagttaataaaataatacatgtagactgtagaaagtttggagaatataggaaaacacaaaaactaaaatgaaaaaatccttcgtatatattatagagcctgcttttatatctaaatatattgtaaatgtttttccatgttaagtattcttctatagtctgattttaatgaatatataatattccatcattttgatagttcataatatattgtaatcattctattattatacatttaggttgctttcaagtattttcaattatgaataacagtacttaacaggcaacttttttttcttaaattttaaggcactgcatgctcaatacataagctgtagaagacacagaaaagaatgcagaagaaaaagattttctacaatcccataatctagaaaaaccactattagtttgtcttttcttctggtctttctaggagcatatatgatggcatgtgacacatagtggtgtataccccttgttttccctcctccttcctccctccctccctccctcctttccttcttcccccctccctcctttttcttcctccctccctccctccctccctcctttccttcttccctccctccctccctccctcctttccttcttccctccttttcttccctccctccttccctcctttccctttcccttttcttttttggtacagactcttgctgtgtcactcaggctggagtacagtggcgcgatcttggctcactggaacctccaactcttggactcaagccatcttcccacctcagcctcctgagtagctgaggcatacaggattacagtgactacaggcaggcgccaccacacccagctaacttttgtatttttttgtagagacagggtttccccatgttgcccaggctggtcttgaattcctgggctcaagtgacccacccgccttggcttctgaaagtgctgggtttataggcgtgagccaccacacctggccattcttttcaaccactattattttatggacattttcccatatgattaaaaataatctaaaatataattttctgttgcctggatttgctgtaatctctctagccattctcttagcacatgtttagagaagtgtgtgtgtgcatgtgtgtgttgtgctgttataagtaataaaagaactatcatttaaaatatattaccaaaaaaattgtcacaatatttaaggccggtaaaaacatagtaaaaatgattcatgcgtacatttttctgcccttcgttttaattttctactttttgtagtaactcattaaaaggcaactttcctgcattcattcaatcctatatgagtttatgaatttacatcagaggccaggtgcagtggctcacacctttaatctcagtactttgggaggccaaggcaggtggatcacttgaggtcaaaagttcgagaccagcctggccaatatgatgaaaccccgtctttactaaaaatacacaatttagccgggcatggtggcatgcacctgtaatcccagctacttgggaggctgaggtgggaggatcgcttgaagctggaaggtggaggttgcagtgagccgagatcacgccactgcactccagcctaggcaacagagcaagactctgtctcggaaaaaacaaaaaagaatttacatcagagaaacatatttctgccaggaggtttgctgactgagcatcttttctctaaaatttagtttttagggtttctgttttgaaaattataaatacagccttaatttgagggagtttttttaacaacaaattagggttttgtaacattatggactgcttttcatggcttataataaagcagtgccatctgtacaaaggttattttaaaaatcgggagtggctgagggtaagaattccatcagggtctcaacagagagtgaccagtggcattttatgttgtagctttgggtgccttgtcgtggattcccagctcttcagcctcctcgtgtttggggccctctgttctgttgaaaggttcatttgagaaacctgcctatttcatgctgtggctgctgtgtgatttgggtacagaaggaatgcgcatcatacctcttttcagggcggcccaaccattacttaccacattttccaagctctgcgcctgttgcctctatcagatcattcctaatgccatgatgacttctcgcacaaatctaaaccagggaccaactttagtggaagttatgccatattccactctctactcagtgcctgacttatatatattaggcaatgaatgagtgaatgaatgctgtctataacacaaatgagcttaattattatctcattttgacaacagctaatcaaatgtaaagtataatcactgtgtaacatacactttactgaaaccattcccagggatttttttccagaaaagtacttactagtataggaagtcacacagaactggattcgaccctcatctactttgtggctgtgtgactgtgagcaagttagcttttctgggtgtcagttttgccattcggtatctggggatatgatggtaccctatctagaattacaatgagtaaataagcaaaggcatgtaatgctcctggcatttggtaaattcctgaataaatggtctccactactattaaaatatttaccactctacttctaatactttgatcggtttggtgcacagcagtcaatgtgcttgcacctaggtggatcttgtagttgtagttgaatagattcagtcctcttcaggattgctgggcttccatgtaattaattgtgtacaaataattttgcttccctcagcctgacccaggtctgctgcaaaattagatagccgtgaagcttttccacagaataggagaatctggtgggccagacagaatcccatggcagagtgaagcaagaagaagggctgcttgccttgcacaaattcttgctttactctctctaaaaacccctcggtttcattttcagaaacattttgggaaaaacttctcagtgaaagagttgcttcgtcactaaaggtaacttgagagcagaccagtttcccgtctgtctttgttgccagctctctagttgaaaggttctgctttgtacccgaaggaggctttgaacatcagctgtctggaacaatctctggccttatcgcttattttaatgttccttgcacagggtcattcttggatgtggtgctctgggcaatctcaccccagaatgcttcccttcctttatttaacctctgacctgtggaaacaagagttaatcaagagttctaaggtagctaagaggaaggggaagtgtttggttacaaattaaatatgaacaagtcataagtcataaatccccagtagtgccaccagttgtgtgtctcaagttgcatatggtacagagtgtttgggttataaattcaagttcagagctctctgatcgctgggggggtaggtgcgaggttcattttattttgggctaaaactctgcctcctaaaacattacttttattggactagcttcattcatatcctactttctctgtgtgcccgtctctccttcttcctttctttacctgcctgcctgcttgtgttgattggtgtgctgttctgtgaattgagacagaactgcttccctgaaagaagttaagcatatggaaaaagttgccaaggaaaggcattgaagcatagagcgtaaatgggtttaagagacagccagacacttttatagagagatttgcgattgaatgatataacattcaagcagagatctggggtggaaatgaacttaaatgagtactatttgtggaaagctgatgccctgtctaatctagcatttccttaattgtcaccataagcatacatttaaagctttatactttaaattaaaaaaggcaacacagtctgtttaagaatctaagacataggccatagtttttctagaaaaagttcttaaaaatatgcatttagggtatagcagaggcactgggtcttgacacgaaacactggaaacttaaaatactcttctgctgtgtttgattaaaacattttaaattgagctatttatatttgtgtttctgaatataacatgtacactaattcctgaagcaataaagagctgacacatgactagtgtccctggagctggcaaagtaagaaaacacgctgaattgttgggaggcagccagagttagattgctcagaacacttggagccgaggggcttttggaggcaagctttcctttatcttatcaagcactacagtgagaaccacaaggtaaggattttatatcctaatctcaggatttaycattgtacgtgatcatactactattgtactgtttagagcaggtcagactgagaaatcatgctggactggttttgtgtctgatctgtggttttagtagctgtgtcatcttagggaaattacttcatttctctacgactcaattttctcatctgtaaaatgggataattcatctcacagagttatgaagagtaatatttcaaagcacctaacacttgatacctagtttccccccttactgcattagcttctactctctagccctaaaatgaggttaatatcaaatggcatctgactgggatcattgatttttttgtttattactgcaagtaggacacggatcctcatgtagccatttcttccttttgttgtgttttttttttttctagtagagacagtgtatttcctaggctatgaaagctccagtagggtgggccttagttagaacctcactaacccattacattatattacagtagtaatttaaaccataaaataagatactctgaatggggaaagtcttgcaggtgtgtgaatacaggagtaggcagcatcataaactctcctaggaaaatgatgaaaggcctatgtgctcaccctgcctgggctcaatggaaaatattgagaattacactgaattgtcagtgcaggtgccattattccaaagatctcatgttaccracacttcaccggtgataacagaaaagtgcctctgtgctttcctcctgagcaatctccttcaatcaaagtaatactctcatrgaaataagatgacaaagccactctctaaaagcaacaattattgaatgcccatcaagaaagaaaagagccttgtttccaaaatcaaatccaagtgtatgtttgggtagatttatataagcacagatgttttatgggagtttttggtgtttcttcataatgcaaattaatatttctactcattcagtacatatattttcctgcatagatataataggtatcacaatgggacattaattatggacataaatcagagattcttgagcttaactaaatatcgtaatcaatttacagtttgagattagcagctgtgagcaaagcagaatgcccagactgggtgagactggcttagagctcccaaagaggattgtgtttttctcttattgaggttgctttgacttttgatgttatcaaagagtacggtattatcagggtgaaacaaattgtactcagtttcaggcactgtgataggtgcatttacatatgtttcagcctcaaaagaaccatgtgagggtagatattcccatttcacatgtagggaaggaagagcatggctcaggccacagccagtaagtaacagagctggtactcaaacccaggtgggtctcctgactttgcaatcagtgtcaagctgatcagtgaggtgtcacttcctcttggaagactttctagaatctcttctgtgttccctttgtgaacctctatcaaagcactgacccagtgctgctgacattatctgccagtgtgtctgctttcctctttagactgtgagctccccagatactgagacatgggccttattcccccatgtacctagcagagggccaggcatatactggtgggtcttaataagcatgggaaaatatgtgggtagatgccattgatggaacatttgaaaaatgaatcatctagaaatgtgtgatgtttggactggaaacgtctcagttttaaattctgtaaaaatgttcattgaagctaaatgtggttatctcaggaagatgaggtgtgcttttcccttagggaggaaccacatataaccttggtgctaaggttgtggtttgagaatcatagaccagcacacatgagtgatttctgttgtgcttaaaggtgggaatgcttgctggctgagtataataggggagaagatgtgtcttacagaaggcagtgcagttgggctctggggtctttcctccttctcacctcgagttaggagggagagggaaaggaatgagaagtataggagtggaagagctcatgtgaaagcttttctctttggtgcgtttggagagaagagtatcttctgaagagagggacagaagaggaaaaatgtttggagcagactggagggggtgggcaacaggaggcctgtggcactgcagattagaggattcttgaacaattttaagggttcacgtgtgcttgaaaaattaggttttcagatgattgtcatcagcctggttttgtgaactttttacatagcaattgaaatgggaacaaaaagagtagatggtggggtttacttgtgttgaggagatgggcaaagggcaagaaatcttgtttgtaagtattccttgatctactttgaataatcacttgctctatactcattatttatcccagactccagcaggacatttgcaggaattgttttttaaaaaccaggtcattttccaaacccaaatgctgcctgctaaatttggatccccacgtcccgactagagttggttgactgttactctgtagctctagtggtaattaatggccttaatagaacctatagagatgagttacgtctgtcaaggtaagctatgatttattgaatgtctcacatgtgccaggaataattaggggttaaatagtcaatacacagtcaccgtccttgatctcatggagttgacaccaatggagaagacaggcaaacaagcacgtattataaacgatggggagttttaatgtctagtaagcccaggaggtcttcatattctgggaataaaatgcatcaatttaaatggggaccaaaagctcatagtaaaaatgaggaaaaggttaggattttatctagaaaaagtataaaaaagtataaatttacctcaacaaactctgtctcttaattccaacaatgcagtaattcttagaaagaataatgcatcaagtattgtggggagaggaggttataatttttctgacttaataacagttcatagttgactttcacagcataatcataaaaggagtcatttttttccaaaagtatttgaggacttcagtttcccgaaggtctcttttatcctttcatattgaaatcattttcttttgatgtgactgttgtgttactatccttgtttttcttgatttttctcttcatgtcttgttaagtggtctaatacagccaggtcttcatttgtcagtgactttgcctcaactctgtgcaggtatccagcatgtccaacatgggcttcataaaatccagtctcctttgcaagagttgtagttttagttcatggcaaatttgcattttattatagatgtttggctgagatacagacagaggagcagggatagatgctaggtgaaacttgaaagggtggataggggacgtattgtctggaaactggaagggtggagaagggtcatgttgtttgaagcagtcacattgttggtgagtattttcctcttataagagcttctgttttcctgcccattctggttgaccacatggtatgaggaatttctgtagaattctggaggagcctctgacccagacaccaggaatcaaagagagattcccaaagctgagattgccaagggggacaggaagcgtgttctggattggtggctgtcatgtccatcaggtacattagcaggtggtgtatatcttttcatagaggaggaaactgagttttgggaagaccgctttctcgaggtgtcacatctagaaaggagcagaactaagattcaaactcggggttaccagactcaagccagtgttctccccagcatgtgccatgctgctctgctttttaacattggggaggaggtttttttgttttgttctgttttgttttaataggaaggctttaaatattgagtgctgaatggtcttaaccaagggatgctttgccattggaaacacgttggcaaaatctgctgacagaaagaaagggatacctctcctcaggtattcaacatggaatgtcaggagctcctcagacagtagcaagtcaccaaaagcaactgaaagaccctgtgtcatgttacttttaaactcatcagtcccgacatgaacacaagcagctctgccgcaagtcttcccccgggaggcactgcttcattgtatcatctattctaatggtgcctgagtgttacatcctaaaattttattgcaaattacttttatttttatttctcttttataggagagccagagcattattttggttttgtgaatgactagattacattaagattttgtttttaggatagcaaagtagatgctggttctgataaggctgaaatccactgggctctgctgaggtcaagatgaggggaaagaattacttcccacctggttctaaagccatcgctcatgcgctttcttctgcctgtcatgcagattttgtcagtggaagcccctcctcactggctttcgtgtcctgttgatatgtcctgatcatgtgttgagcactgctatttttttttttttttcctaacccaacacagcatttcccagccccagccctggaatcagacattttttttcaaggagcccaggttcctattactggagaatagtatttagaaaccaatatctgggcactaagtgtgctcattataattgggatatctctgcttccaggccttctcagtgactaaaactagggaaggtatgtatgtacatagatttgtatttctatttattttatctgtctctactttcctacctgtctactgaacatcatgatgccccacagttacattcagttccagtttgacaccgtggggttcattctcattctttccctaactggatttgtaactctcttctgatagtaagatacctggttcccattatatatttaccagcttggtcagtcttgatctgttccttgtttgtaaccagtggccctctgctgcagcccccttcctacacagcgccaccctcctcaccctgtttttacagtagcatgtgctactgtttgaactgtggcaccttaggcagagctgctgctgccccttcctatcacggacagcattctcaaccacatggactctgcctcgcctccctcccctcccccgacccccactttggtggaagccctcccacccctcaggctctgacatcccacattgaactgccttccagatgttctttgtactcttctgggttctaataccattgctggtcaggccctccactccacatagatgctgtctttatcccatgccaggtctaacccctccttgcccccttgagtcatgaaactccaagtcaggcctcccccatgagactccctcctcatcctgctcagacgctgactttcccttactaggcccctcactctgcttgggccccagcacactatgcccaatgacccctcagtgggacacccttctcctcccacttggactctaacaccaggttgccccttcgggaggacagcttcctcccctcacctgagtctgatgtcctgctgtggaccagcattctcccaggtggttgctgccttcctcgacttggtcagcctctcccaccatccctgtcccctgctctcttccatacctaccttgcctggtcccatctcatagctttgaactgaactagtagaaagaggtgtcggagagctcttaaaattttttaatggttttctgttttaatacttaaagaagtggaatccctttatattcacgctgaacttacacaaggccagtcatccacgtgtacacaaactcaccagttggagtgattatcatcccaagtggagtgagattagaaaaggcagtcctctgctctcagttcagctcaagagccagcagctcacccggtcgacagatttagatgcaggatgctgtcattcagcctgaccccacaactcaggttaactactttgtgtttacacagaccatgtccgccatatttggaggtaatttaagggctttttcagggtgattttgactatgggctgttgctgccataagtgctgtctttagaacctgcccttgccctccttacaagggccggtgggaccccggatcgggaaggcagtgggtggaggaaacttctcaagtttaaaacttattacctcatatgaaacacaagcctctccatttgactctcaggcctgggagtgagggtagagcctgggacagagttacctgagccacagtgggtgagaagggagagaagcctggatccaggcaggtgcctggggagcaggctgttccttttcgcttttctctgtcttctgattgggtcatgatgatgctccatgatcatcttctacatcagtccgaaagcctaaactaaataaagcacttgggaaggacttccagctccttccacccaaactgttactctgttgtgggtgtgtctctttctgatgaggaccatagctttcttgagtgcaggaggaccctttgtgccacagccttggacagagcccaccatagtcccaactgtggtactccgcagtggggactcaagccgtcacacaaaggcagcaggcagaggcggaccacggatggtcgcaccccgttagatgtccaaggtggtgcagtgtactagagtgtttgtttctgtctttggactgggaaggattgtttattcaatgatgacagacacacgcagactggagtgcagggtccctgcagcctcacctgcagcctagcaggccgcgcaagctgttgtggcggctctaatgaagcaggacaggaaacgccgctggatagagctccgctgtgaaccctggcctcccaacaggggaaaacaggggccctttgaagaagaagacagctgggtttcggtttcaaaaccttaacactgccatcactagatattcatctgtgagtgtacaggggacaacatgtggggaacagttgtgtccggtcaggccaaagggagaaagaaatggctgatttccagggtaactgcaaaacttcttgtggccagtggttctgcttagcatagccaaaaagaattgacttggtgaggctgaggctgaggctgaggctgagtgtgagaaccagggtgccatctatagtaggctaggagctccttcccacgtcacctccttcatcctcacagcaggtgacaacttggaggctggagcttctgtgcccaagccacattggtcagttgaacctactcatccaaaactacttcgatggattctgtagtcctaaactgtcagagcacccagcctgccccatatcacttcaccaaatatttctaaaatgattcagtttttctcttgtttacttgaagtcacagttttcttgcaagattctayttccccttcttgccttttcccccctgcctcctgactttcagtggctggatttaactagtggtattttgctttcaggaaaaaaaaaatttgtaatccttggtcaaatttgtttactgagtcgtctaatctgtgcaagagttttcttctgaggggatttctcgttcatactataatggcttttaactcggccgaggtttatttaacagaataggaaaggagaaacttatctgctccctaatccctcttgaatgtttacattactctgccaaagtaaatgctgtgcaaagtggcagcagtcatttgctatgtaatagtcaatatgcagctgccagggctgattgaaacatattaacataagtgataatactgtcatagaagtgaaaagttaagttgcttatcagtatattttgataagctacttaaattttacagtagcatgtgctggctttagacagacgttaatgacagaggactgtgcactttatctgttctctttgttgcctctcacttcatttattaccctcagtggcgcagccggtaatctgtacagggtgctgattcccctctccctggcaggatatcacatctgtgcgctacctcgtgtccatatctgtcggtattggactctgttagcacagcagggcagacatgaccaggccggcaagcgcttggtacaaccttcttctcgcttgctgttagatgtagctttggaaaatttccttctagagaacaaagccgttgaaagtaagtggcaaaactgcttgggggtgtggatacttttcaacaattccataggatgcgtgcacccttgccgtcagtctttgtctggctttatttgctcagtaaacgctgagcactgacggtgtgccaggtgccattcttggcaccggaaagacaaagtgaagaaagataggccccttcctctctgtttgcatgtggtctgttgagaaaacagacatgccattgaggactgcatcatgtggggaatgttctgagagcagcattctcatgaccagggcagcacagaaaagagagaattagggcacatgaagtggggatggggagggggtgagggacagttaggaggatgagtagaaatcagctagactagacccacagaggtctgggagaaaagggcccagtgtatgtaagcccaggcaggctcaaagataccaggacgttccggagtgagaggagtgaggggagcatatctatgaggaagtagacagaggacaaccagaaaagtgggcaagggcctggcagtgaagagccccagaagtccatcctaacaaatgtggactggatcctggagtgacggacatcattgcagcaattaagtacaatgtgcgatggagatttgcattttagaaaaaccattctaagagccgtggccaggtggctcacgcctataatcccagcagtttgggaggccgaggcaggcagataacctgagttcaggagttcgagaccagcctggccagtatggtgaaaccccgtctctattaaaaatacaaaaattagccaggcatggtggcgcacacctgtagtcccagctactcagaaggctgaggcaggagaatcacttgaaccagggaggcaggggttgcagtgagccgagatcatgccactgcactccggcctgggtgacagagtgagactccatctcaaaacaaacaaacaaacaaacaaaaaacaagccacacagagtggaccacaggactgaggtcagcagccagtctgctctgagtgaaggggagcaatggccaggacctggtggagggcagtggggatggggaagtggaactcatcttgaagtagatagagagatggtgtgtgatgggtagaatgtctgttgcagcaacatggatggctttgggctcatgggggcattgggaccctttgcagatgcctgcagtgggaatgctgtgtgtgtgtcagtgtgtgtgtctgtgtctgtgtctgtcccatcatgagaaactgaatagaagctttcctggaaagggtgggtgtgctgggagaggccaggggacttctcagagatggtgcctgattgtggagtcggctttgaatttcttctctgtgaactgttctagctctgaggcatgggaataatttataatggacatttaatcctctgccttgcacaggcaattttttaaactctcagaaataattagcatttcgccagtttgtgtttccaccagtctgtgacaggaagactcttcaggatgtagagcaaaactgaaatgtatcagtcttgaattagatcctggttaaagtttttgacctgcatactmatatttcatgtgtttcctcttcttcctccagctatctcccctggttcgaggtattttataagctgcttaacatcctggcagattacacgacaaaaagacaggtatttacctttttaaaataattcttttaaacaaataagctttaatttttatgatgaaaaagtaaaacatgccttatattttaccaaaaaagtgatgcatgcccattataggaattttgggaaattcagaaaataataggaaggaaaagaaaatcacttttaatttgccccactcccttccctaaaataaatattcctagcattttgggttgttttcttttttaagtttttctttgcattaaagaaatgataaatagacccttaacgttcacagagttaatgttcaatttctaatattcccaagcagcccggaaagtttgtgacatgtattaaattataattttgctgaggcacatatctgaattgctcatgtcatgctgcagatctggggtttgcaagtaaaacacttaaccagcaagtgacctacccagctgtmctgagttcccatttcaataaagctttgtggtgcttttacagtaacttttgtaggggtctgaaaatgacgttaaaaattcatctgtaccttgctgtacttttggaagaagtggtaaggtaaggtatcttccatggatgtcaaaggccagttggacctttatgtagatttttgtagcccacattttcagataccattataatgagcatgcctcccacactattaaaaatgttataaatatttttcatggctgcatagcattttgtcatgtaccttgatttaccaaagcattttcctattattggaaattgttaattgtttgggatttttctactgttatgagaagtgtaaccattcgcatctatgagggtaaagcattttcttcattttggattgtttccttaaaaggagaatcccagatgggccactgtaagatcagtggacataaacatttttaaaacatttgtcaaactgctttccaaaataattctgctgttttcttaaaggataccctttaccagcaatgtaagagagtgcctgggtcacgatactctcatcaggatcatttgttgaatttgttgtttgacaagtaaaaaagtctcattgttttaattgcatttctttgattattaatgagttggatatttgtctatatatctaatgtcttatatttttctttttgtaaatggcctaagatttttaattaaagtgatccattattattaaacgttaaggaaaaatttcccttaatttttttctgttgaacgttctgagcaatttgagtgttagttctgagaaatggtccatgaaaagggtgccagttcagccacactggggtccagggaagggaaagctgtgtttcattttcatctccttaagattcatttaatgtaagctctacgaagtcttgcattggagaaacctgggtcgcctgtgcttcccatcttgttttgccccaaacccctttaattctgtgataaatcttagcattctgagatagcagtgtttcctggaacacactttgggaaatgctgttttggaggaaagggggaaattgtgtgtataatgactaaatcatttttttagagatagatttactcactggcaaatgtattccagaggtcacagtaaatggaaggaataactaatagaaacggcttccttgatcactacactcactgtgaaaagaagcttagatgtcaggggattctgtcgtaaaagaagtggattactctttgatgaatgagttaggaggtcaccttgggtctgttcatctatttctgattcacagttacctttagtcaaacattcaggttttcactcaaatttgaaaggtgtctttaataaacagaattgtataatatgtaggctcttaacaggtttgaattggagattgactcacattttttccctccatatgttccagtccaaaaaaaaaaaaaaaagagaaaaaaactcagcaaaacaaagaacttagtacactttttaaaacatgtgatttgggaaagattataaaagggtaggtacaacctacacatatgggagattggattattaccgtgtaaaactggtgaacctttcctctgggcgattgcttcagcaggactctgcctcttgggatgtcggactgagatcagtaacatgttttagttggagtctgtttctcttgaacccaggactcttttcttccccctttggttaaaagaattatgacacagatgataggaaatctgcctgtaattggcttaattgtttgcaaggttttagtcaccagattagaacaggaagagattttttatttaaagaaatagaatctacctcctgccccagggctgaaaccttctctcatccaaaagtcattgggaaggttgggaagcaagataggcttctattgtgtgtgtgtgtgtgtgtgtgtgtrtgtgtgtgtgtgtgtgtgtgtgtgagagagagacagagacagagacagagagattgtgatggctaagcatggggtgtgggagaccaaggtgtgagtaactgggatatctgtttgggccatggacccatcatgctcatcagaccttgaatgggcacccttgtggaagggatggcagggcaaggcaggcatctgagccagggagcagcctgcctcagggtgtcggagcctgagggagagaaggatgtttatgtgggagcatggtggtagaggctcagcatgggatgtcagaactcaaataggatctagaagaatccatgtgagaagggaggcagcagctgtggcccagtgctggtgtgttggatcctgaggtaaggaaggcatttgtgtgaggggttgggcagtagaggcccagccctggatgtcagtgttggggagggaagggagggcatctggacagggaaggaggcagggatggcaatagaagagtggttccatacaaataaccaaatataaaaagaaaatacaggcaaggtttttcactttcgtaggatgaagtcacagatatgtagagggagaaaactagaataatttctatattggattggaataggagccattggtgtgaacccatggttttcaatatgggaagatgaatatagaaataaatagagatgtgaagtgcctattgtgattccatgtgtgtgttatatattccctggctcaattgactgaaagggcctggcatgagcaatactaaggagcagtgagcacacatggtgcccagatcttggtttctaaataccattgcccactaaaaggaacccagtctcattgaagaaataacctgattctggggctgaggcagggaaagtataagatgaacctgaaatatcttttctgccaaaaagtaaggaattgctaaaaacatgatcatgatgggaacatgtcagaaggacacaaaagcagtaagagtgctccctctagtcatatctggaacaatttgagcatcaaaacaaattaggatagtaaaggattatgtcacactgaataaaacaggaaactatggacccatggtaaaataaataagtaaatgaatacattgaaagtttgaggaatgggatatttacacaaagtgtgaatccacaaaatggttatttactgcaaagagaaagaataatgttactgtagagatatcaagtgaattaatcaattgatgaaagcaaacatcatgagtgaagggacattgacatcagacattagacaaaacattagacaattgaaagttattctacaaaatgggtggtctcatcgtcaaggccatacaaatctagaaaagactgaggagctgttccagactgaggatgagtagagggttataactactaactgcaacatgtgattctgaagtggattgtttgctgccaaggatattattggcacagttggcaaaacttgaggataaggtggtaattctgcatcagtgttaatttccagattattatgattctcttagtttgttttctgctgctataacagaataccacagactgggtaatttataaagaaaaaagatgtatttggctcacagttctggaggctgggaagtccaagagcctggtgctggcatctggtgaggaccttcttgctgggtcataccatgcggtactcaagacaagagacacaagttaggggccaaatttatcctttatcagaagcccactctcacaataatggcattaattcatgatgtactcactcttaaaggtcctgcctcttaatactgttacaatgatatttaaattgtcaacacatgaacttttgggggaaccatttaaaccacagcaataattaattgtggtgatttaggagaatgtccttgtttgtatctgtggatgatggggcgtaatcttggcagctcattctcaaataggtcaggaaataataaaaacttttttttttcaacaatttctacaactgttcagtaagtttgagattgtttcagagcaaaaccaaacacatgcacacacacccacaagttcatctctctcctctctgagaagcttgtttgatttgtcagagctcagattgaaacaagcttgtagtctgggtgcatcttctttttcctttcgttaaattcactacttaaagacagctgtagtgaagccaggagggctctggagcttgcatttcaccctttagctgtgcaacttactaaagggctgatttgagacaagttgcttcaccttttggagcctcagttttcacattgttgaagtgggtagttgggaggatcaaatagagggtgaatagatacaaatatacacttatcagtattagcacaaagaattccacatggtgggagaaatagcatttggataattctgtgagcagtgttcttttgagcattttagaggtgaatccattttcaatcaaataatttgcattgctttgtatgtcatcatgttgctcaatttcacaaattagaatgcatagccaccatcctatattgcatgctgttgtacttagttcatttctaactttcyataattggaggctgccatgtgtatccggtgaacactcaataaaattaattgagggtaatgatgatgaagacaagatctatagtgtcatcgttatttctcctaaccacccccgccctgtaagctaggattgtttgcatttaaaagttgttgctatggagtttaggggatagatttgctgagagcttatggtatatgatccataaaaggcggtcatggtaggtgtctcactgagtagaaaatgtcaaacttggtgtaggaggatctatttggctctttatgtttgaggcatacgtggtgtcttttgtcaaaccctacatgaatatcaaacctatttctgtactggggccagcatctccccagccccctcagtcrtgtgtgcccagacctccctgcaggtatcttactaagggctcagccttgcttttgttacttaggccttttatttctttcaggaaaatcagtggaatgagcttcttgaaactctgcacaaacttcccatccctgacccaggagtgtctgtccatctcagcgtggtaagtggggcggagtattagccatcactgaaaacgcatttcattattgacagtaagagggagctagctgaacagkattgtattttgtcagccatacctcccctaaccctacccccaaatactctgagacctctgagttcaagataggccagagagtagaatttcttcctttctctgagattctataagaaacagacatgtcctgaatgtccccaccctcctctgtggccatcatcccatcaccagcatctcttggatcacagatgctgggctgaaataggacagctggctccgcctgcttcttcagtccctgtcccagcctgcctgtatcaccctcgtcccccagcactgctgtrcatgtccctttgctgaagcccatcctgtaccctcagctttcaacattgcctctcccctgtttgccagggtaacacatattcatccttcagaactcaactctgattttatttccagagaaatcctcccttgatacctcgtaggttttgctaagattacctcctttgctcgaagcatcttgcacactttgtggtacttagttacaccctattggaatgattccttttcctgtccccctcactggactgtgtgtcccttgaggacagagcaggagagtgcttaatgttgttcctggcctatagtaatagtttctttgaatgcctataaatatatactgctattacatgttctgcactgtgctctgaaataccaattgggagatttccatcctagtcattgtcttgccaatgacctgagtgatcttaatcaggacctttaacctcgtgggcttcaatttcctcatctgtcagataaggcatcagaagaggtgtgggagatcttttccatattttggttccaggaattctctaattccctaggtcaaaccctcaagcccttgtcaccaccttcatcagaattctcagatggacatactttgaccaagtattgattattatccaggagctatttcccttatgtcatggggcctgaaaattttaagagttttgtctttcatcttcattagaaccaggtacagtgttggtattcagtggtagaaaggtatctcccctcctaaagaaaattgatattccttgtaggttttttcaraatgatgataaaattgaaagcagtgttactaccagtaattaataatagatctactattttaataaattcctaatttatactaaatatgtatctctaatattcaaaacaagtttacaaaatagatattaacattcccatttcatggatgaggtttcaagaggaaaagatacctgcccttccaaggtcgtgtagttaataagagataagacttgagttttcaaagccagggctaacttcaagcctatggtctttccactgtgccattcgtgtggaaggagagggagagaaggaaggaaggaagaaaaaatgaatttacagagacttttgcccattttaatagagcataggaaagaaagaaagaaaccttgttacaaaaattctcatacggcaggggagaccatctggaaaagatgaaaaaatgagctttaaacctgccccagtccttgctgtatagctaagcaaccctgcctttgtctctgtcctttttcctaagcagcttgatctcaccacttcagtccgtaatgacatccgacaggtagctgtggagtagcctggctgggtcaccagctgctagggaggaaggtccactccttccttcaaatggctgctcaggcagcatgcatgccaggcctcaaggacaagccatctcaggggcagcaggaactgctggggtggcgcagctgtttcatgccagtggtttctaggaatgtttctgacctcccctggtccccagcatttcatgggcaatggagcaagacagaatctcaaaggacagcctggggactacttggttttggaattgtgttggctcactatttactatcaattgcatctgtaaaggcagatttttttttctttccttttcactgggaattcctctctccatattgcatttctgattgtgaagggctactctcatctaggttatacatcctgaaatgttgataaaatggtaatcctggactttttgtctctagtcactctctgcaagagtatatttctgtgtgtctgatatgagtgatggtaaaaatagtaatatgaactagcagttcacagcaataataattttgtattaaaataccatttattgaatggtaagcatttcatatatataacatttattcttcataacagttttgaagtagataatatgattcccatttatagattcaaaaacaggttctgtgctattaagtgaatttgctgagctacataatcaccacatggccatttgttactcaactaaacttctagccctttggtatagaagttggtatctcatggagtcatactggaaccttgcatattacttttcctgttttaatcctcactgttgaattaatcactagttcccacgctacaccgtctctactgtaatacttcataggtagtattttgatatacacacagattttggaataatgcatcgaagaaggcttttttaagttatcttttttatactttttattttttacttttttatttgttcaagcccctttagctgtcatttgccataaaaagcacaggtataacagtctgtcatggtggaaagagcacagctctagttacacagatttagttttggtccatattctgccacgtactagctgtgtgacctttgactgactacttgacctctgtgagcattaatttacccatttgtaatatggagataatatctatctcaaaatttgttgtgggaattagagataacatttacagagtactagacataatgcctttcatgtagcaggtattcaacaaatatctgttgattattagacaagtaccttatactattattgttgtcaccatcatcattacgattgtccccagggcctttcatttcagaaagcctatacaactcattcttctacacacctacctattttgcaatcacccaagagtgggggttggggtggataacttcctgaaatgtcacttgggggtccagatttgaacttaggccatggctacgctgaccttctctgcatgtgacctttcctggcctttgcacaatcccatctttaattggccggcaccaagctctttccgttcctgcttgccattgtcttctgagtctttaatagcagcaaaggaggtgccatcagttcagcctgttgtcatttaattcagggatgcatgcttgttgcatatggagatgcctcattggacgttctttgaagaggtcaatttttcaactccgctgagtctccagtcaggaggcttatggtggagtgggcttcgggggcagaatttctccactcttagtcatcggcaatggtctcagctccagtgctccagcaactggaactcttcctaacatcacttaggcctttggggcagattttggccacattttatagatgaatataatctcagatgctgaaatgagatgacaggtttggttggtaaaaataatcactgagtgaatctggtgatattttgttcctagaatacacttgcctcactgaacaataaattatgaaaccaacgcctttttcatgtgtttagccatttaacttctttgaactatttatgtatttatttagagacagagtttcattcttgtcgcccaggctggagtgcagtggcacaatctcagctcactgcaacctccacctcccgggttcaaacgattctcctgctttagcttcccgagtgtctgggattacaggtgcccgccaccacacctggctaatttttttgtattttcagtataaacggggtttcaccatgttggccaggctggtctcgaactcctgacctcatgtgatctacctgccttggcctcccgaaatgctgagattacaggtgtgagccaacactcctggcctgaactcttcatttatatctcctaaagaagttctcctctcatagaaaagaactccatctaccaaagtgatgatttaatgcatctggttcaatctgacattatccaaagaaaatattccatgggtgtttcttctgagtgaaaccgtttccttttctgagtaaggaaatattttccaatcatttacctgaattctgagtaatgcaattgttacacattttagcagaaataaatcacttttgcttttcttttctagcattcttattttactgtgcctgataccagagaacttcccagcatacctgagaatgtaagtacttgggaagaagaaaaaattaaatttttattcttctctgttttctgcctatttgtttgaataaataaaggatgtgatttaaaagtatcattataaaaattatggtttttaaaaaacacattataaaaacaaaagtataagaactgaagtgtattataaaaacaaaaacaaatagagaatatttgcaaagtatagaaagtataaagacaaggaaggatttttattcctttttctcaaaggtaattatgtattaatatgatatttgattccctctttttagaatgtatttttacatagttaaatcacctattataaaaacatcttttccattttcattcatatgacttatttttgtcaactatctaatattccatttactctgtagtttagccattctctcactgtagaacatttagattgtttctcatttctgcttttataagtgaaatgtttccatataaagaattttccaaatagaggtttattagggtagatctactcaagcagaattacacttctactttttacctttgtatatttacctttcagagaataaaataaagtatttgtgggtgaagcatgagggcctccatccctacctccaaaggatgtaggagcagtgaactagagtgtgagagagcagaaggttgatgtttgccttctgaacaagctgaatgacatatctagtctagctgcatgacatgttttcaaaatgttttactatgattataaatagtactatgtagaatcagataaagaatgtctaccacttagacacttgattacttttttaaaattgtggtaacaaatacataacataaaatttaccatgttaatcatttttaagtgtacagctcagtggttttgaatgcattcatattttgtacagtcaatgtccagaactttttgtatcttacaaaactgaaactctgtactcattaagcaattccccattaccctgtctccccaacccctggcaaccatcaatctgctttctgtctctgtgaatttgactgctctccatatagtacttcacataagtgaaatcatacaatatttgtccttttgttctgagttatttcacttagcataataccttcaaagttcatctgcattgaagcatgtgtcacaattgcctgcctttttgaggctgaatgatattccattgtaggtgtagaccacattttgcgtatctgttcatccagtgatagatgctgagatcaatagatattgtttttaccctttggctattatcaatattactgctttgaacattggcgtacaaatgcctgtttgagtctctgctttcaattcttttggggatatacttgaatacttgataagaaaagtactggaatatgtggtataccttttcataactattgtagattcacagaaaggaaatttttccaagtgtcrtctatagaacaggttacaaatgtcaggtgatcaaatgtaatgaatgaagttaggctgtagtattgtgattagataacagtcttgataagttgggattatcaagcatatccatgtagtatattatctgtatgatcagactgtggtagaaaatgttgcatccttttttttgacattaactaataaaaaattcagaccagagttcccatttcaacaacaatagctaatgttgattgagtactactactcgaaatattatatatttggtgcttttctccattttctcatttagctctctcaacaagcttacatggtaactaccataattatttaatataaggaaacagaagccctgaaaatttaagtcacatattcaatatcctacaggaaataaatggtaaaatcagaattcaaatattggtctttctggattcttgagactgagctcttacataacatgctatactttgagcctgtgattttttacctttcatctctcagaaaattccattgaaatgatgaacgaaaggagaaaaatatttccctaatgacagaggaagctaccatgagccagaaagtttgggaatttacataatataaaggagatgattactgatagttgcagtcaattcagtatagacagtggagaaatccaaaaagaagtgggaaagtaatgcaggaagagcagaagcagaggcatactctggctatgaaggaggctactgaaggattattttaaaatgccatgggacatttataagaactgatcatgtactaaatcacaccaaaaatttcaaaatagagcatactaaactcttacaggtcactgtcttttatggtggtgaacgaaaactataataataaattaattaaaggtttaaaaatattcatctatttgaaatagcagttggatcaaagatgatacaaattgaaattagttattatttagaaattaatgacaatgaggacactaaacaagtgccttagggatgtggccaaaaccacactctggggaaaattcatagctttgaatgcttttatataaataaaaaatttagaaaacaatgaacttgactttcaagaagctaaaaaaaaagaatagtaataaataaccaaaactagaaaaagaaattataatttaatttattagggaatattgttaaagtaaaattgaaaaatagtagtttttaaaaactgaatttgtgaaaagaataaaattttaaacttattcaataaatttaaagattgtgaaaagagaaaattttctagaaaaagacaaatgatagttggcctgagaaataggcaatatgaatatagaattataacttgaaaagattaataaagctctatttcaatctccatccttcaaaaaaatctatcaggtttaggtggttaaggtgtttcaggaacagataattattacttaaacagtaccaaatcataggaaaggtatgtatgtatgtgtatcacacaacagcaaaagaaaaatcaggcataatctcccatctcagagatctgtttctgagttttttcatccttcctttttatgacatgtagttttcaaagtgtgcaaccgggaaccccagtgttgctttggcagccctggaaggcctcacagaggtagatggctaactgatcagagcactagatccctgctcctattttattcagagcaggttagtttccactgcttacactgggggttgagtaatactttgtttgagacagaagtattcttttggttttttttttttgttgttaagtttcaaaacttacatttttaaaagcacacaaaatgtacacactttatatctgtttttcttgtaacaatgtacgctgaacatttacctgtgtcattaaaaattctttacaaatattttgttgtaaaagattaatactgatacatagagaaaaaaatgaaaggcccccattaccaccaccccctccaaccccaatcccactctccctccaaccccaatcccactctccctccagtgtttgatgaaacctttctctaggaatttagtgttatgtgtagctatgaaggaggctactgaaggattattttaaaatgccatgggacatttataagaattgatcatgtactaaatcacaccaaaaatttcaaaatagagcatactaaactctcacaggtcactcttttatggcggtgaacgaaaactataataataaattaattaaaggtttaaaaatattcatctatttgaaatagcagttggatcaaagatgatacaaattgaaattagttattatttagaaattaatgacaatgaggacactaaacaagtaccttagggatgtggcctgtgtgtgttgtagatggtttttaaacataaatatgattctattcatacttgtttagcaactcattttttagtttaatgtattctaaaaagtgttcatatctacctacttcttcctttttaatgacatacttatttagtggtatttttactcttatgaaagtaatgcatattaatggcttaaaaacatgtagtactacatagttgttgatgaaaaccagcaattttcaagttgcccagctactttcaagtttttagcagctgtgtttccctctgtatttttgagtaacttattcatattgctaaatcttattttttttctgttacagatatcacttattgattttcctatagaagatgagagttttggtcttttaccacctataacactccccaccccgaaacacacagaataacgttctctcagtcacatatttcccctctcccattctttctatacctttagaaaatttttacattaaatcagaagttaatgtttacattttaatgagcatactgaagtagttagtagattacctttcctttcttatacaactttttgtcacgtaagcattcttgggtttcacatcttcctcattcttgatttcactccctcattttggtgagacatgcgccagtagttttcttgagaaagtgcttgttagaggcaacatttttagacctagcatgactaaaaataactctcttcttctttttttgagacagtctcgctctgtcattcaggctggagtgcagtggcacaatctcggctcactgcaaactccacctcctgggctcaagcgattgtcctgtctcagcctcccaaatagttgtggctacaggtacacaccaccacacctggctaatttttgtacattttagtacagatggggtttcaccatgttggccaggctggtcttgaactcctgacctcaattgatccacctgccttggcctcccaaagtgctggaattacaagtgtgagtccagcctctttattcttcttttgatagtttgactgggtatagaactctaggttggaaattactctatcttcccaactttgaagatgtttctccactgacttctagctttgctgttgcaactaagaagtctcagccattccgattcctgtgatttacttattgtaaccatcctttggtggtccctcctggtatcctgaaattgcagtgatgcgccttgctacgggcctgttttcatctattgtgctgggcacttggtggttccatttaatatggaaactcatgtcctttagagctgagaacttttcttacattatttctttgaaaaaatattcttcatttttctttctttctctggggcctctatgatagaatgttaaaatatcctgtgctgatcctctaattttcttgttttttctctcctattttccatctctctcttttcgttttctctctactttcttcagcaaatctttccatctttggaaatttacttctgccattatattaatattttcactcatctgtgagactgttatttatagattttaaaaagtgttcttctcctcgtattattttcctgctcaacattcctatcttctgtttgttttattccttaactttcactgtagagcctttcctcaaatggctgccccgtcacatttaagagtgaggcactaaaaagctggctgaatgctctgtcagtcatttctggagcttggaactagtgtggctattttgggggcagtggcctctcaaatatcagtatcagaatctttttctttggagttggtctgttttctttgcctaggtagtgtatgctttattatcagtgttctggaagctgagtaggaatggtaggttatgacatgtcagcatctaatatgtataccttcgtttagtactcattttcagtgtaagcctttattgcctgtcaaaggctttattgcccgtcctcaactgtacctggtgtcaccaggcctttctggttcagttcttctagaaagtaaacacatattcctctggagaggtgtgggaaagtctgttaactagctcattgagctgggagaggagatccttgggattgaattactcctatttttatttgcaccccgtctcctagccttcagagattctgggtgtctccagttcctttttggaattctttttgtgctatgagttgggctgaatgctcggtgctgtgcctgcccaccttatccgtagctttaagctttccttctcaacctcagtcgcatgcttgtcagcttgggccagatcattctttgttgaatggggctgttttatacatcgtaggatatttagcaagcatctctgggctctactcactatatgatggtagcacattcccctccagctgtgacaaccaaaaatgtccccaggcattgccaaatatcccctgggggactaatggccccagcttgaaaaccacttcgttagtcacatctgctttttggctttcaaaaatttgatctctttgttccattactaattcttctcctgttttttggcgtttgtgccttttaaaattcttttactttgactttttctgggaggctggtatcaggagagagaaaagataaatgtatgtttaattcactgtatttaactgttttaactgtgcttttcctactaatagacatttacattttctataaataatgttatgataaaaatgattgcctaggttaggttcattaaaaaattttttttttcttttaagaataaataatttcttaagaacttcattttaaggtacttggaaattctgatcatttctaatttttcaaaaccacaattgagattaggaagtttttttttttaagtcttctcatagccttacctccaaagcctgtctgcactgtatgctacctctcctgcccccactattttaaaaatttacattccttctgctggttttgctactaatgaaccaattccctgtgcatgacccattgtccctaaatcctcctttgcaaaccagtaaaaggctagcgttgtttgtttctaagcagaatggtgataccaatctgccagactcctaccgtacatgcttccactttaatccttagagctactccgaaaggggtagacctgagccccgttttagacagggagcccagagctcacagagctgaggtggcaaggtctgctcgtaagcacagtgtagcgacccaggtttgtaagcttttgttcctgttgtaccccactgcctccctggaattgatgtgttctattcatgaggaaaaaaagaaaagaaatgtttttttaaatatatagcaaattacaaaatgaagcaggaaagcctttcctctaaggagaatctgaacttttgtaggaccaatttatgtggtttttgacacagaatcactgttgagctctagcagtgttgaaatttgcatattaatctcttgatgatttttcaaggattaatttaaaattactaaattgctgcattgcaaattgaaacaagcagtaactgtggggttgttaatcctttatgatctggtgtagtggaaagaacatgaattttagagacaaccagactctgggctttgctaccctgggactttggggcaatgtacttatactcttggagcctctaggtccttatctacaaaaggaaaatgtgagaaactcatgaagtattaaatgtagcgttccaaggacaatgtctggtttgatggagatgctgctttcaatggtctgtttctttttctccttttcttggctctcccagaattctagtcttaacctcccttgagatctgagttgtggctgagggctgaagaacattattcttggagcacatcttttctagatttttttcatattcatggttatggagattaattctcttccttttatggggcatatatttcatggggccttgaaagtgtcttagcaggcccttttcacaccagaatgtctgaagcttggaactggtgtggcagatggagcccagggctccgctgcctgtaatatagatggtttgtaaatatttattgattatctcctctaaggaacataagcaacaaaaaggataaataggctttgggatgtggaacttaataatgttctatcaccagataatcctgttctcctggacagcttcagagaagtgttagtgtgcaaaaagagaggaaggagctggtatttattgagcatccactgtggatcagatcgggcactgtttgttatgttatgaaatcttcacaacagccttatagtatggttgttatctctgttctggagaggaaatgaagcccagagaagtgaggtaacttgccaaaccaggaagtgctaaaaccaggattcacccttcagtgggtatgatctgagcattgagatgctgcctggtctgggccctggctccgtggctctctctgcccatctaagaaattgctcatcatatgtgtaagttatataattaattgaatgaacgtttggtaaaatgtcctctctccttctctaaggacagggatcagtattttttttcacagtagcactgtacccagaacagaatagatgcccaatatgtatttattgactgaacgaatgactgaatgaatgaatgaacatgtagccacccccaggagaagaaaaaagaacaattcctttcagttggcttttgggccaatttgtctgcaagacattaatgaaaagcaaacttaaaaaattaattcttttccctttcagatccccattgaagttaattctcattatttctacaatttctttgtaaaaatattttctttcttttcactgaaaaactatcactctgtaattgctcatcagggttttctctgtctatcaagataacacatgtaggagtgaattttatgcaggcaataattaaatgagcataaatctttataaattttaaacagttgacctgcatttaaaaaaaagtcacagatcatgaacagttatgtagtaataattacattgtaaaccagctatataaaggatttttttttagtgtccaggttttgaagtttacttttgattaatggataatcatatagaccttcatttggaatattaaacaaacctgtcttaattatctcgttggtgtcataccaagtggttaatgatgcgaggaaagcagttagaatggacagttacatataacattgcccagactccactttgtcaaaagatgcgccatgatatagaaaagatttatgaactcatcatgactttcaaacataaacaaagttgaagtggtagtagaagacctattatcaagaactgcgattatagagaattccattgttgctcttaagagttgtcaggtaattgtttattctaatggtttttctattcacatggagggatgaaagttgacctctgagtaaactctgctttcctttctagaatactcttctctgatttgattgcttatgtgaatttctgggattctttcttaagcagattgttttataatccaaatttataattccctttaaagaatccctcccaactaaggttacctaaattcttaaaaaaaaaaaatcagttgagggttttaaaaatttttattatggtaaaataatttgaataggagttatttcagtaaacaagacccactgacaaaaccaagcctcttgccttggaagctgccttcagacacaagacagtaggtctttatcatgtgtaccatgtatgaagtggaaagtcacaaagactaataaaatgacagacagtggggcggactagcatctgtttcgaaggctccaaggagtacccagcttagagtcagttctttggtttgaggattatctcatttccctaaggtattgaacctaagacgctttctctctaagccccactatatcccctcccatccccaccccactccaactccccccatcgccaccacccccacctgcttcgtaacctcaggcatggatcacagtgagcctcaagtccccagccacctggattggtgcaggagccagcagggacagctagaagggagcagccattataaggcttctcctgggaggatgggggttttgccaggtgccattccctttctctttgtctggatttagagccacagggggttcgcacttgacctgacgcttaccaacgtttctttgcagagatgagaagtgggagccaagagtctaaggagcttgtgcgttgcaggcttcttctgaagtgcaccttgcaggctgctctgtccagagaccttcctcagatttgagccctttccagcctgggtgggggatagctttgtagctgtgctacccagccctagagagtgtggccagaagagatgctaggtggagaggcacatgctcatggggacataaatgtatgtgtaactgaaataatgtttaaactccatgagtaggaaaggaatatcctcaagcctaaaaacttactggcactaagaaaaccgagaccttttgagcacagaaactgggaactagtccttgaagcaaggttttcctttccaagtaggtgagtcacacagagaagtaattggcagagaatgaagaaagtggttacttaggctcagccatggtggcattacagcccaggacactaagcctaggaagaggtggccagggacaccatgtttgacagaaattatggtgctttagaaggaggatttatcctttattaaaagaatggactctccctttaaaaacctatttgggcaagtagactagtatggtgcatagtaatctagaagtccaggggtcacttgagatttttttctccttccctccccaagtctaattcatcgtcaagtcctgtgattctactttatggatatccctgacatctacacccaaagcttttgtctgaattggttttctaatgtatattttaatcatttctttcccagaatatggcagcagcctgttagttgactgtcctgcctcctgtttgccctcttatctgtcctccacagagtctctaggaagatttttctgaaacacaaatagggtcatgtcaggatccttcagcactgccctgtccctagctcccctgccccctgctctccctccccgccctgcctctcactctcttccctgcgtgtgcgctcctctccccaccctgtctttgcctctgcctggaatatgcttcttccctggtccactgagtgaacccctgtttggaggcccagaccaaatgtcttctctgtcacactttctccagccttcccctgcatatccgtcaaggggagtgaggcttctcagccatgcctggagtgtagcctcaaccacggtatgttgcatactggatttctgagtctaatgtccctcccaccccagagtaagcaggaagatggagatcacagttagtttatctctgcaggcctagctcccaggagggtgctaggcacatagtaggagttaaataagtgtgtgttgattgcctgattataggagatagaaatgagaggatgaggatttagtctgcaggagaagcaaagtgctgggagagtggcttatcttgtgtcttttatcagcagaagctcataacgtgttctggctgtagtcttgactgaggacagcctgccgcggaagtcctcccttctatcctctgatcttacccatcggagaaatatgcttggcctggctgtgaaatgaacacatgcttctgtgtacagccctcaccccagttacctgataaaccactaatttatttacatttttaatacatgtagccacagctaccatgaaaagtcacccctccctccctccgccattcccagttacttaccggtctttgtgtagcttccagtggcagttctttttctgcgggttcttcaccattactgagtaatcaattgcttcatctggctcagagccaggttttctggagtcacatgctacgttcttcctaatgtcccacctggtccatcttctgggctggtgcattcctcactgcactgttctcgcctgagtgagggaccagcaccctcagccattgcttcctccgtgcaccgagcttgctgtcatcaaactgctggatgatgggagaagcagcttcacctaacaggaccccgtctcgtggcaaaaacatacttaaaactgagttactgtaagatggggacaatggaagcatacaggagaacttgacaaatgaattgaggaagtctcccgggaggaggtgacattggagctgggccttgaaaagtaagcgggtgtcctcaaggaagagtggggcattcgaggcagaggacacagcaggagtaattacaatttccaggtatttcactcaattgtctctcaggacatggcaggcctgagagagtaaggattggtgtggctgggggagggagattcctgactccatggggcgtgcttctgaactgaggcttgatgggaactgcgagtgctccctgcagctgctcctggggccccgctctgccccacaggtgctcccacggctgagcgaggttcccagggctgttggcactcccacccactcccacccgctcaggcgggtggcatcccagaaggaaagaggcaggggaggaagcagataagaaagacagcttctgtttagacacaaatatcttggtaatcagcacagatgggatgagaaataccaaaaaaagtacatgacagtttagagagaatttggctaaatgttacgtatttttaacatacctgtgtagagtttttggaacaagcacctgagtccctcagaatctgattggagatgggggacatgcctcaatcaaatggtgtttttatttcagaaatgtttccttcccatccacaaaagtatccttgtgatttttttttctcccaccaaaataaggcgcaggatttgtctctgacgctgtgtctccctatttggacggcaagctgtgtaacatatttctccccagcgtgaagcttcttggcagactcttgaggccacgttttggtggcttcagagttatctttggatctgtcaaaagtgctaatgggctttctggccttctttaagctcctcatttctattttctttttacttccatcctctcctaaaagaaaaattcatgtaattcatcagcagttaagctttttactgaaatgctcagtgaagggcctcatatttttgtttgtgaggagagctgtgccatgtcaccgtcttcagagcaaaccccacccttacatcattagctctgtgttcctccgtccagtggaggaaccaagatacactggttgactccttccgactgcctttggtgtttgctgttttgtttttcactgagtttgttaagaggcaagttggtgtggtggttagggtatgagttttggattgaggagatctagttttgaaacatggctctcccctttctagctgggtgacctttagaagtctactgagacttcctgagcctccagtttttttttttttatttctcatctatataatggagatgataatgcctgtctcaagcttgttgggaagattggaaagaacacaggaaaagcacctgttgcctgccacatacagatcactccgtgaatggggtaacggtaatttttaacagaagcattttcctttctttaggcatacttgatcttgttgcgtttctttttccaaatatgagttttacctacaattttgtgtggaataaaaagagcatggatttagagacagacccactcaggactgaatcatgtcacatccacttactgcgtgacctttgtcaaattacacaacttctctgtgccactgttttctcatcttcgtagagggataataatacttagttcaaggaacagtttgaagattaagtgacatgtttaataatagatgtgaatctttcaaacaatagatgtgcataagagggacagtgttgtgtacgggaaagcgtataggccatggagtcagatctgactttgccagttgctgacctctcccagactttatattggaaagaataacgcctcactggatttttgtgaagactgcamaattacacatccacagtgtctggtacagtggctggcacttgataggtagttagtatatagagctgttaattcacttgctctgtatttataaaggttgatggttaacttggtacttcagtcaaacaataataaattataagataagtgcccatttttactcccagcccataatattgttgaaaagcactttgtgctattttgcatgtaaaatccacctggtttacttcaatttatgggttatagatctttaatcattataaactgcaacgcctggcaatagcattccttccctcccaaacccctttcattttcagaggattatattgtatggcattgaaaacctgtaacattgaagaaattagcatattcatgtgtattattaaagtcaggtgggtatagaaagcgttgtataaatgaaacacattccattttttttctgaaatctgaagagtaccaatctatagtactaattaaaagactgaagcccaggctacaggggtggaaaaaagctagttaaaacactgctttgtcacaacttgctgctgtttgtcttcaattttttttccccttttgagtgaaatacctggaaattgtaaatgttcgaaattgccttaattccagctgagccgttttagcaaatgtaaactgtgaaggaggggataccagcagtgatgacgggagaggagctcgcctggccttcgtgggtggcatctcctgcacagaaacaggctcagtgccagaagcattttggtccctgggtactttcttttgcttaggcgtatggcacagcacatcgggaaggttctaggatctggggcccaaagatttgagcagcagtcctgtcttcattgcttattagactgttccatcttggagaatctctytgagtcttggtttcctcatttgtaagatatgtagaattcctgttctgctcacctttaggaactgacctaagtgctggatgcgacctcatgttgtaatcaccacacaaagatgtaattgctcaggctccttcctctgtaaggtgtcttccaactttacccttcatgattttacacatgtggggatttggcctcccaggtagaaagaaaaggacagggaaagaacagagtatactttctgattattttatgtttcttatgctcttattagatacagttataataagaacaaagaaaatcagccacaaaccgtgccttcttctttctcctagagaaatctgacagaatattttgtggctgtggatgttaacaacatgttgcatctgtacgccagtatgctgtacgaacgccggatactcatcatttgcagcaaactcagcactgtgagtagacagtcttaagactggctttttaatgatctaattttaattgaaagatacaccagcaagatgaaagaaaattttagaaaaaggagtcagctacagtccccttatatggcagcatgtcattttcattaattgttcattttttttttttacagtgccaatgcacatttcatttattcctgtagtcgcacagtcaattataaatagctttccatttgattgtgtgttatgaacattttgcaggtttctacatgagcttcaattgtcattttttaatgtctacaccatatttcatgatacgggtgtgtcattatttactaaatccttctcttgatggccatttaggttgttcattatgatttaatccttttagtagataatactgcaatgaacatcttttggcttcttttgactgttacagttatattctaaggagtgggacactaggtcaaagggcttgataagcgctatgacttagggactgccaaattgctttgcaaacaggcggtgcttgtttacagtgaaggctgccagctgtagatgagtgcaccattttcaccgcagctttgccaggaaagagagagagtgtgtgtgtgcgcgcatgtgcgcacgtgtgtacgtgcatgtgctcaggtgttttaattctgctaagaaagtagatgtgctatggtatttcaggcttgctttaattttagaattacctctttggttagaggtaactgaatattttccatgggtttatttttttatttgtattttgttaatatcctttcacatttattttataggtgtcttgatttttttattaattataatgaactttctatataacttttgctgtgtgtataatataaatatttttatattccttttattttagtttttcacttgctaagtatgagttcacattttccccaatattttttatgaaaattcttaagccattatagaaagctgaaataattttacagtgaatgctgatatacttccatctaaattctactagtgacattgtatcagttgctttatcatgtatttattcaactatttatcatccatagcatccattaatccatctttttttttttttttttttttttttgagacagastcttactctgtcacccaggctggagttcagtggcactatctcggctcactgcaacctccacctcccaggtacaagtaattctcttgcttcagtcacccaagtagttggggttacaggcacataccacctcacccagctaatttttgtatttttagtagagatggggttttgccatgttgaccaggctggtctcgaactcttgacctcaagtgatccacccacctcagcctcccaaagtgctgggattacaggtgatccatcttattttttatgcatttcaaagtaaatcacaggcgtcactttactttcccctaaataattcaatatctgtttgctgagtttgttgttgtttttgtttgtagacaaaacttatatacagaaattgactgggagtagaatgcctaataggcatccctctgttagagagagtagaaaaatatttttataagtggagagttccctaatgaagggcctatggataaaatcaagttatgtgtttacttatgaataaaaggcacctaataatgaaaactctctgagactactagagttttccttacagtttttattataccttcattattttattatttctttggttattgattgctcatcaagaactcagttttttttaattgcctagtatgtgttaagaatagcctatagtagacctcttgctttgttttacattttattttacaccatacgtgcagttcataatttcagggcacaaacacccagactgagtttcagaatgagaatattgtcaaccacatctatcatcacctctttgaaagagtctagtccataaccagttactgttkctttagattattaaatttcagtcaacaaaaacatgacatcgtctcagtggaaatgaattccttatcatttaatcatgatgtttttgatcccttactgtgtgccatgcactgtcctaagcacttttcatgtatgaactcatttaatccttactacgacagccttagtgggttctgtaattacttccatcttatagataaggaagaatgaaccttctgtgtgattttgctctcataaatgtggtggattaaacacacaaaattatttctgcttcctcccaaaactaaaatgaaataaaggaataaatctacaaacacaaaaaacagatgcagcaggaatttttaaaatagtaagaaaatactgttagcaactttatgccagcatttgaaaactaaggcaaaatagaagaaaatagcttagcaaagttgactcccgaagaaatataaaaattaaataggttatttaacttacagaaattgaatcaatatctttacatatttttccagataaaacactcatcccagggggttttacaagtgtgttttatcaaacatctcaaggaaaagattatttcagtcttagacaaactccttaagagtctagaacaagaggaaatgaaacccaacttttcctgcgacacttgtataaccttgacattcaacacaaagactgcacaagaaagaaaaattagcagccagtgtcactcattaatgtaggggtaaaaatcctcaattaggaagcaaatgattgatgatactagaaaatctattaatataacttacatattgacatattaaatgggaaaacttttatggtcctcaatagagggatggaaagcactaccatgtttatgaataagaagacctgatatcttgaagatgttatttcatttcaaaatgatgtatagattgtatacaattatattcaaaacccccatagggttttacatagtacctgacgagctaattctaaaattaatatggaaaagccagagaaagagccacaacatacttgacaaaaaagaatgggttgcggaagcttgctttaccagatatcaaaactttctataaagctgtagtaattacgatgctagtaatgggatgaggatacacatatgggctgatggaacagaatagagagcccaaaaacagatcacatgtatatgggctctttattttataaaaggtggcattgtagcatctctggggaatcaataattggctgtccacataggaaaaaaaaggaagaccgtttctattgtacacacacaaaaataaattccaaatggatcaagaacttaaatgtgaaaggcaaaatttaaaaacatttagaagacaaaatagaataatacttgatgatctttggagtagagaaaggcttatttaaaggtggtccaaaatatacattgtataaaagaaaatattaaaatcgtgaacttttattcattaaaagatacttttctctgactgaaaagtcacaagctgagatttgccatataaaaaaactgacagaaaattagtatcggaaataagtacagaactatgacaattaaaaagaagacaagcctgtcaatggaaaaattggcaaaaggcatgaattagcatttcacagaagaaatacaaatggccaacatctgtatggaaagatactcaaccacattagtaataatcaaaaagcacattaaaactacagtgattatggctgggcacaatgacttacacctataatcccaacattttgggaggccaaagtgggaggattgcttaaggccaggagttcaagaacagcctgggcaacacagtgagagccctgtctctacaaagaaaattaaaaatgagcgtggtagaacgcgcctgtactcctagctactagggatgctgaggcgggaagatcacttgagcccaggatcatggctttgcagtaaggtatgatcataccacttcactccagcgtggacaacagagtgagaccttgtctctgaaaaaacaaacaaaaccagcagtgaaacactaggtttacaaaaaatttcgtggctgacaaagccaggtgttatattggaaatgtattagagaatgtcatttactactatttgaagggtatgtgctacaaaactatttacgtatgcccatcactcagcaattctactcctaggtggaattttgtgggtatacacacaccccttggtcatgtatggtaggatatatgtataaaaatgttcacagtggctttttttaggttttatttaaatcctggaaatagttctcatgactaccaacagagaactgataggccgtggtgtagtcacacagtagaatatcgatcggatcaatgaaaatgaactgcactatcaatatgattatgtctctaatgtagaagctgagtgaggaactgggttgcacaaggatatactgttcagtatgatttcattaatataaagttcaagctagaaaaactaaatggtatcttgtttagggattcacacaaactacaaaggtaaaaagaaataattaacacaaaatttaggtaatggtttcctcacagggagagaaaagactggtttgggaagagtcatacaagggacatcaaaagttttgctttctgtcttaagccaggtgaggaactaacacattttgctataaagggtcaaataataaatacgcctttgcaggtcatatggtccttgttgccactgctgggctccaaccttgtaatcgaacagaggtaaactaagtgtatgattgtgtgccaacaaagctttattgccaaatacaggcagcaggccaggcttagccttttcactgtggtttgctggcccctgagccaaggtggtaggtttggggttcttacattttttttttctttgaaagttgtttatatgacatacatacttaatataattcaaaattttttagaggcctaaaaagaaggtacaaagctcctttatcatgagattttagagtatcagggatagagacaaagcagttcttgtacaaagattaagaatcaacattgcctgagatttggcagtggcagttctggaaaccagaagacagtgaagcagtgtcttgaccttctaagggaaaatgatttctaacctagaattctatacccatctaatggaagccctcaggagagagtgccaagatcccacaccactttgctcagcttcctgggcctgtactcctggactctgcattccctttgtggatgaaccgtctgtcctctctgaggccagtcactctgcttgtccaacttacttcattctgcaatatttatcgtgacattgccataggcactggggattacggcagtgaacaaaacaggcaacaatccctgtcctcatgaagcttgcattctagtatcataggtcctcgataagtcagaggagttaaatatctcgtacggtaggaaatggaaagtactaaggagtaaaataaagccgaagagagcggatggggagtggagagtggcagggattgcagttttaggtagatggcctcagaatgccaacaggaaaggcgacactgtggtttccttcaaggaaattactccagcagtaagcaagctcttctctcctgcatctattattattttctcttctctcctggcacattcttatgagcatgccaacatgctatagaagctcccagacttcaaaacaaaactttcttgacccgtatcccctttatcccatttctagtctccctttcagaacagaattcctcaagagagttacctatttactaattcctctggtctcattctctcctcagtcttccattaggattcagtccccacctgtccactaaaacaggtggacttgttttagtgtctttttccagtcaccagtgacctcctttgaagtaaaattaaaatgagttaatacttgcatagctctcagaacacagcctggtacgtagcttttgcagacgtttataataaattaataaattctataatgggaaatcaaattttattgtccagtttattaagggcctaccctactggaatgtaaacgtcatgaagacagggattgttgcccgtttccttcactgctgtgcccccagtgcctgtggtaacaccacgataaatatttgtggaatgaagacaaccggataagcggggtgactggcctctgagaggataacagttcatttgcaaagggaaggcagaatccaagtcttaatgtggaaaatgtgaaaccaagaattcgtgatttagaaataaggagataaatcctgtgttgaatgtgattacttcgagtgaagggtgtaagaagaatggtgaagtggactgttccttttcatgataagccttgactactttttgttttgttttgaaatctatgaatatgtattactatgacttttaaaaggcttttcttaacaaagagttgattcttaactgggttcgaagtttcatggattgctggtagaagcttctctggaggaggtggggttctccttgtatgtcacgtgcagttggcagcatcctgagaggttctgcggagtttggggatgacgtagctgagcagacttctgttgtattcacacctttggacctcttcaaattcagaatttgaaagtttcccaattgttgccttttatttccttaagagtggctttttattatcttttagatgggggctggtgcggagggggatatgcaaaggccatctcagcctgagattttttgaggaacctctcttgacagatcctgatgtggcctgcaatacttgacaaaccacattcttctcaattgtgtttgataagatggaggcttaatgctcctcagagccaccaagcacatgaaagataaaagctgtctagcactcgagtgctgtcttctataaaaatggctgtgtcaatagagacaaactcaacaatatttagttcagaggcaggtaatatgcatttcggggtttctcggtcaataacattgtgatattctgtataagaaaaatgtaagtttttgttctctttgctcagttaatgtatattgattgttttcctttataaatgataaatagggaaggcttaactaaatcttgttctctaatgtaaatacttcagtgtgattccctgtagcacaaaggccccatttttcttccatattttcatatctgagcttaattcatactgctttttggaactctatggagagcaagtaggtcaaagatcttaatagagataatacaattccatcagcattcctagaagatagatattattcccattttacagaacagccagtccatttggaaaggcggaataacttgcccaaggtcatgtcctagtcaataggagaggtggccatgaatataggtcgttatgatgcagtgtcaggggaaggaggctttggcttctggaaagggagaaacatcaagggattacacacaaactaatcgtagccccttcgaagtgcatgcctgggaaccaggttatgtctattgggtgccattacttaacaccattttccagtcccttgtgcgggaactgtcacaggagccagaggcatgttgttaggaatagccaccccactaaaggaatttgaaaattcttgtaaagagccaaaaagataccctgagccaaatctggtggataaggtaactagtggagctaggtgctgttggtttgggtgaaaaataagacctgattgtatagtacttagaggtttttttttttttttttttttttttgtagcttgtaaagctccaagaccactaaagagcattcacagaataaatgtgtaagaatatccttaagtagattcgtcctcagtactttatatgggagccccgccgttctcccccacccttttaaagttcttttaagttaaccttttgagccatccatttcctatatgacaggcactatgctaatcatgtatgtgatcatttttttcattcgttcttgcagcaaccctaggagcttgtgggttttcttctccctttgcagatgggaatgttagcacccccgaaagttgatgtgccttgtctaagatgagcagcagagatggaattaaaaccaggccagcatccttgctgcctcatacttccttcttggtaactcttcattgtcatgaattccctgtgacacttgtacttagagaaatattcttagcatgaccctgttggccatggatctaaaataatataaagaacctctgcctggtcgtcgtcacctttgaacgcacacctaagctttttacttcagattcggcaagccctgtctgtgcgcctgacactactctaggcaccaggaaacaggaggcagatctgtgaattcccattgacacacccagtctgttagccacagctccatttccttaaacacttcagattccattccgtctgcccatgccttcttagacttggctgtctcccagcagctcctgcaccctattcctaccatgagtgcggccttggtggagccctggggcgtatcttctgtaactcactgtggtttcagggttcatatattgcagctatgtatctttgtcctatataataaagaataaagaaccttccagggttcatatgttgcagttccttcgagcagtgtatcttggtcctaatcaccccctttataatttagggatactgaaagaaatttggacaactaagaatatccagttaaataatgacaaaggcatatttactttcctgagaaacatctatttgttttacccagcggatgcttttcagaaggaaatattgtatggtggcaagaccacgacctaattagcctctacacccataaccgaaaaccattattacttttctgatggtatctcattgaaggaagacaaaaaaaataaactggcaccctctctctgtcagtttcttcctaactgcgtcaacaaaaattagtccccaggcatgtgggagctgggcaggaccgggtaccctgtggcctgaggagtggtgggtgatacttccatctccccaccagcacacagtctggtccttaggagatgtttcagtattcgagtggaacatggagacttttccagccttgccccagtcctgttccaccactcccaccgacagcatccattgtctgagtaccatctggtcttgagccctaagaaagggccagtttgtggactgggcagcttttcagatttggcttcgtttttgctactttcctgacgaacgccaccttgtcatgttgacgccagcctgtgtgatgagctgagcacctgaatgatgtgtgcaaagctttcctagctcttctggactagaaaacactaatcctgtttgcttatctgccgcccttgaagcagagatgagagtggcagttgaaggagctttgaaatcctggagcagagccaaggcctctttgcctgcacactccactctgcatgttccagccgtaggaacaaactgcattattttgtttcaaactgtgctcaagggaagccaagaccttgtaactggaaacttaccaaacagagaattctaagactaaatttagtgttctatttaaaaaataaaataaatcgaacattgtgtttatcttttatatgttaaaaaggagagagagtaacctagttcacactaacaacctgagaagagtattcaaagaagtgagaagaaaactaatccttttggtgaagagggaaatccttaagaaattataatgaagtggcatggaatagaggctttgcagccaaacttccaagcagcacagcctctctaatctccgttatatacaattttattgtggtccagagaatatttaaaactgttaaaaaataaaggaacttccatggacagaaagtaggagagaagattggtgggttttacttatacgggcattctctggctttaaaatgtatagataattaattgcttgttgaactatattcttcatttaattatgtgtgaattggttttctcttattcatgttaaactctaattggaatgaagaaccttgagataccatagagactctgtaatacagagtatcaacaggttcatttgtgacactttgatgtgacttcaaccagccatggtctctctgctagctcttaccttcctctcctgcctcttctcccattgcttcaacaaacatcaagcactttggatgaggcacaggattcagattgtcagtgattccccagttctgatccatggattagcattatgttagaaccacccagaaaacttgttaaaatgcaggttcttgggcaccatctccagacattctggttcacaaagtctagtatggaaccatggaatgtgtattttttgaggttccccggatgattgatacacagcctgatttggaaccagtgaatagacagttctctaagacaaaaacaatatttattctttggtggctgttattttgcatcgttagactcattttcatgttgagacgacataatagagactgatcaagttcatttagaagatgtttatgcgtaccgactggcacttaaaaagctctttgtttccatattctctttgggagagctttgaytggggccttggctagtctagaaaaggaccatagctgagtataatctgttcaggctctcagtaattttacggaataccagtgcagtccaccggtgtaatttggggtgcatgtgtgtaaacaggtgatgtttctttttttttttttttttttgccatttcattaaattcatccgatttctgccatggcagaaaattttattattttagtaatgcggtcaagtcatgaaataaattgtgtcttccttagattgcaggactgatagcttctcatatgactcttatgaatcagaattttaaagaatcagaattttaaaggataatatttaagtcattgacatcttaatctacttaaaaagccctgcacccactttggcagacatggctgtcataaaagaaattttgagcgcctactaggtgcttatgacactgggagcaaggactcataatttcctgtgttgtttctgcagactgaaagtgtggtcactttggtgaaccaaggtagtgtgatatgaggttagaccatgaaatcatcggtaagtgcagacacggagcacattcacatttgttcttttctgctaccttgatagcttcagagtctaccagctagatgtgtcagacagccctgctggaggtatcttttcccaagaaaaaagacagcaggagtggaggagagagtatcagactgcaagtcaggatggctttgttccacttctgcctccgccttgtacttaatccaccatgtgccactttctagccatatggccttgggcaagttacttgacctcttggagtccctctgtcctcttctgtgaaaatggggatagtattcacacctacctcaaggtggttaaaaagatccggtgaccatccagatatgaaagcacagagcccagcactgggcgcactattcactctgtaaatgttacctgaggctgaatctcatccttgcaggccataaaccccgatttgactctcagaaacaaggagagcgataaagatcctaggagacttctgaatattaggatcgtcgtaatagcagatagggagtgaatccaagcaaaacagaatagtcacggcaactcccaagaggttttgcgtacggaccacttctccctagtcatttagtcattgaataaatggtcatttctcattcaagtcctcacagagcttgagtggcctaagaagctgctgtgttctcttgacccacccttaccccctgactggcctgtagctgggaggaggactagcagcttctctgtcttcaaccttcagggctctgatgtctctgtctctgtgaagcaggcctgattcttgccccaggcagaattaatgattctttctttatatgctaacacacttgaacctctattatagcatctctttcataatgcttttgtgtggaagttgattgtttgcattttgatctttctctctctattttaaattgcttgagggcatggtgtgtgcacatagtggatactcagtaattgtgggattaatatagatcagagcacagaagcagtttcatgggggctaagagcacagaatccagagctcaacttccctaggttcatatcctagttctgccaatagctgtgaccttatacaggttcctcaacacccaggagcctcagtttcctcatctataaaatggggacaataatgctacctaccttatagggctgttgtgaaaattaagtgagttaaatatatgtgaagcactgttctcagtgattggcagatagtaatgtgaattcagtggtcatggtggtggctgttttttgtttttgtttttkttttttttttttttgagatggagtttcgttcttgttgcccaggctagagtgcagtggcgagatcttggctcaccacaacctctacctcccgggttcaagtgattcttctgcctcagcctcccgagtagccgagattacaggcatgtggcaccatgcctggctaattttgtatttttagtagagacggggtttttccatgttggtcaggctagtcttgaactcccaacctcaggtgatctgcccacctcagcctcccaaagtgctggggattacaggcgtgagtgtggctgttttatagcttgaatctttcttctgaggtttttttttttttttttttggtagggggttggggggatacggaggctcattctgttgcccaggctggagtatagtggggttatctttgctcactgcaacatctgcctctcgggttcaactgatactcgtgcctcagcctcccaagtagctgggactacaggcgcctgtcaccacacccagctaatttttgtattttttggtagagaaaaggtttcactctgttggccaggctggtctcgaactcctgacctgaagtgatccgcctgccttggcctccgtaagtgctggtattacaggcatgagctaccacctgcggcctacagtcactttctaaggttaaatttgccaaagaaaactacagggaacagtcctttttctttttctttttctttttttttctttctttctttttttttttttttttttttttttttactactcatgcaaatttagtaactcaccacctgaaggttccttagtttcttcatgtgtgggtacctgacagataggtactcacgattccatgttcagttatgctttctttttaaaagtatgattctttattaaagcaatagtatagatccattagctaaacataaattatgatttatattgtcaaagaaatagaaatatccacttagactagatttgaggtggcaaatcgatttcttcttgagtgcccactttgatccattgatcaaaggtgcatgtgaggctgggcatggtagctcacacctgtaatctcagcactgtgggaggctgaggtgacctcaagtgtgaggtcaggagatcgagaccagcctggccaacatggtgaaactccgtctctactaaaaacacaaaaattagctgggcgtggtggcattcacccagctactcgggaggctgaggcaggagaatcacttgaacccaggaggcagaggttgcagtgagccaagattgcaccactgcaacgccagcctgggtggcagaacgagattctgtataacaacaacaacaaaagtgcatgtgaggaaggattgtgggccacatcccgactctgtgatcagttagtaatgtctgtcacagatatggcttggaggagtggtggcacattggctgtccctgtattgaatacattgttatcagtcccccatgtaaccctgcctttttctttttcatcttaaagaggaaagaaagctctttcctcactcatggtgctgtgggcttatttacagtgtggtttaccacaccatggttttctgcttctgctttggtagctaaagcttttctctggcagttttagttgctttgatgttttaaagtgtcaaatcttggcatgaaagcttgttgccccggttaataacttactctaattactctagtagatagctttaaaaaaaaatggagagaagtgattaagcaggcggttgattgcctgtgtaagcttcctcctgactaggtgatattgctgttgggggaagacgctttccttcactccttgttgggtggtttttttggtgtgtgtgtgtgtgtgtgcrcgtgtgtgtgtgtgtgtgcgtgtgtgtgtgtgygtgtgtgtttattccttccctttcccaaaagataatggagaaggaaaaaagtaagatgagttccacccagctgaaaatgaaactactggaagaacgattgttgccrttaccccctgaaaagcagccctgcatttcagctgctaagaaaagcaagacactgtttgctctttccttctactcacatgtccggcatctgtctagagtagctgaaggttctttgatttctgagatgttctaagttgcctttctgctagagtatctttgatagtttcttgaaagcctattcatcccccactaaatacagtaactacaatttgaacatagctgaaccctttataattaaaggtttttctcacagccatggaagggttgaaataggttgacttcacagagtccctgcagattttgcttaaaacgttttgatgattttagagaggatttgtcatttaagaataaattataatcaaaacaaaaaccacagcagtgtttgaatcatggcaccatgatactacgaagatggtttataattaaataaaagaatcaagttctcaaactgagaaagggaacaacttcccaagacacacagcattttctacagctgctctaaataagatgatccctggtcaaaatgaacaaacttaagaatgacctccctttaaagtcagtaatctggtatcctttctgtatttatcattttattcatttctttgcgtttatgttcagaggggaaatccaaatgcctctaaccctgtgaagcaggtgttggtttgattatttaacattctgaattctaggatggaaagaatgactgtgaccatctgattgtcttcctctgccagcttttagagcttggaatcttaatactttttcaaaactgtacagcctctagttgtgatctattaggcaattgcaatttgttaaatgtctggggccgggcgcggtggctcacgcctataatccaggcacttttggaggcgggyggatcacatgaggtcaggagttcgagaccagcctgaccaacatggagaaaccccatctctattaaaaatacaaaattagctgggcatggtggcgcatgcctgtaatcccagcgactcgggaggctgaggcaggagagttgaacctggcaggcagaggttgtggtgagctgagattgcgccattgcactccagcctgggcaacaakagtgaaactctgtctcaaaaaaaaaaaaaaaaaaaagtctggtaatcttgcctattcttcctcatggtgtgaatctggaggcattctccattccccaaacatttactcagcaccgactctgtgtcaaacatagtaggaggtaagaagaggaatatttgggaggccgaggagggcggatcacctgagctcgggagttcgagaccagcctggccaatttggcgaaaccctgtctttgctaaaaatacaaacattaattgggcgtggtagcaggtgcctgtaatcccagctactcaggaggctgaggcaggagaatcacttgaacgtgggaggcagaggttgcagtgagccgaggtcccaccactgcactccagtctgggtgacagagcgagactccatctcaaaaaaaaaaaaagaggaatcagatgtggtcttggtccttgaacagctcaaatccatagccgtcgtgttcctggtcacctggggtcatctacatctgagttcttcagagtatcaggggccaagtaaggaagacagctgtgccctggtcaggtgatggagatggggtgacctaaaagtggtggttcctacatagctcatgaattccagctgggccctggagctgcagagctgagaaagcaagaccagcttaaagacagaccctgatttgcttcggcttagtacaggtgaagaaggtaaactggggtagaggaggagccttcttcacttcaaaggatagcaattcctctagaattgtgagttgtcaaagctggaaaggaacacagaaatcttgtagcctagtctcttattttacatacaggacaaattgagacctaggaaaggaagtggcttgcccaggtcaaaaagttagcagaagactcggagcaagtatgtgaaagggaacacgacaaaaagcaagactttccaacactttcaagccagcctgtcagatgtatgtactcaaaaaggaatgtaaacctttctctttgactaataataattacttcattgtctagaatttcctgtgggttaaagacactacaacaccttagttaaatgtaactaatccccaggaaatgatcagatctgtgtttgttttaaaaatgattattttctgtcattggtattttgtccgagacatttggacatctagcagcaaggcaaatgcatatctgtgtcatttaacaatgtcagcaggtattgttacctcatctatttcagagtcctccacactgtggaaggcacagggtatacactcgaatactttttgagtttattatgcattgtggaaacacagtggccattatattctgacagacctggatgtgagtcccagttctgtcacttactgtcgatgtggccttgggcaagttatttcacctctgaaactgtttcctwatctgtgaaatgtggtgatgagtgtatatgtgtatcaacacacacgcactctttcctttaaaacaatactttgcaagggtctaaaccccaacatggtacctacacatattgtggttttgtctttggagggggcattcttatttttatttcacgtcaagttgcagagctgctattaggattcagcrgaggcattggtatctaagattgtgacaatctgggctttatctctgagaaatgactgaaaaaaaaaatgtgtccttgtgatttttcccactccgtcattgatcactctccrttcatgtcctactcccactgccttctcctcgtctccctttgcctcagagaaaactaatggagccatagagaaagctctgagatataaatgaccttgtgcacctttaattgaggacagaatttgctaaagtgcatccaaaaatccaccagtggtttactgtacagtctgtgtcctggctagactggctgttggctgtataatttgtctagttttgtctggagtcttaggctattcagctgcttcagggcaaaatcttttggggtgtcattaaatgagattgataattggcttctgatgaatattcattgtgactaatgactttgggcaaattttacacatactatctttccattctctcactgagtgagattttgatagaatcatttccttcaacttgcacttcaattatatatttacaatatccctttgttgactacactccaaattacatactttcattacttttaaagtttgtattctgtaaggaatgaacataggcctttaggacttttatttttagaaacagagtttagagttattttaaaaataagtggcaagtgatactttatagaacagagtgcattatttctgattgagtatagatatatagtaagtcttgtaatcaactgactgtccttaagtaatgatgcacatagtttatgtyatttagtattttggaaaagagccaaataattccgttttgtttgtttgttttcktaatcaaatgagtaatgcattttaccccgattgcagaaatttggcccttagaaaacccactaatgaaatgagcaaacaccttaaaagcttgattttttgtttttttgtgaaggataagtaattttaaaatcttggcattgaggttggtgggtttgcttttgaggttaaaaagacatgaaaagaacattatctgaagatgagatctctgctactttatgtttaaataggcttttgacccaaaccagtttaacctaaaaagagtcacataatcaagttctgtcttaaccaggttcattctattaaatgactttttcaaagagaatcacaaattaattcatgtgatgatgttaccttcatttgtatgggaccttgtagattttgaagtgcttttatttatttatttatatgttgtggagttagagagtaggcatatgattgaatgaatgggcgaatggatgaatgaatgacttggttttccaaaagtgccatgcttgtgtgtctaagcttgctgtttttgttttagacattttttcctttctttcttttttggggggacagagtcttgctctgttgcctaggctggagtgtagtggtgtgatctcagcccactgcaacctctgcctcctgggttcaagcaattctcctgcctcagcctcccgagtagctgggactacaggcatgtgccaccatgcctggctatttttctgtatttttagtagagatggggttttgccatgttggccaggctggtcttgaactcctgatctcaagtgatccgcccacctcagcctcccaaagagctgggatcacaggcgtgagccaccgcacccaaactgttttagactttgagtcatgtaccttactctgtgagactcatgggaatgttgatacacttctgttaaaagccaagttactaaactgtctttgtactgtgagtatattctaagtaaaaatcatattttatttattcaggacacatcccattaactagtgcacgtgtgtgtgttgtgtgttctgggccactgagaacatggaggtgaggacaggatcttcctgtactttacagtcaggaaacaaacatgcagccagttatggtccagttaataatgggtgcctatgggctgggtgcagtggctcacgcctgtaatcccaagactttgggaggccgaggtgggtgggtcacttgaggtcaggagtttgagaccagcctggccaacatggcgaaaccccgtctctacaaaatatacaaaaattagccgggcatggtggcacacacctgtagtcacagctactcagaaggctgaggcaggagaattgcttgaacctgggaggcagacgttgtagtgagccgagatcgtgccactgcactccagcctgggtgacagagtgagaccctgtctcaataataataataatattattattattataataggtgcctatgcacagggaaccagggaagactttgaagaggaagtacttacacagagacctgagggaggagtttgctagaggcacaaatccaggccagtttgggggacgggtggaaagggatgggaggaaaaggagtacatgactctatctaagtgatgtattccaaggacagacttggagaagatggtacagagtgtggctacagatggctgctgtaaagctagaccgtgggctggtggagccatccgggccaggcttgtccccaaagacttctgagtaggaagtgatgggccggaacctgcacttgaggaggagcgctctggcagctagttaaagatgagcagaaagagctgagacccagggccagtggaaccctccagcctgacttcagggtggaatcaggtcagagttggttcattctccactcactcaacaccagcaaggacttttcatctctaagaagccctgaagggattagttttatatatgtgtatttttgtatgtgagatatatatatctatatcaccctcctttatatgggtacctatggaaatagaatgtgaagggatgggttaaacctgcgagccttgacggggtcactgggaactgttcttgggtgcctgctgaatcagttccagttcatggcatggacctggctcaagaacagggtctggaggaaagagtcagggcaggtgggggtggggagtagcagccctggctttaacacacagctctcacaactgtgaaacatcagcagaatatccaatttaaagctgttcatgttacactaacctctgggattcttttaactgggccttggcacgtcactctttcgccacgtaaatgttcttctgtcagcaaaggccagttaacagcttccaaaagaagcaaagtcctcatgggaacaggcttccctgaaaccaaagaaacattaaagaaaaaaagacagaaagaaatatgtgttgttggcttttgtcacttcatacctatatctccaaaagttgttttttttccctttcttttcactatattgaattttgtagcaattgtatccctttgtagtatctttgtttcctaaatttttaattgcatcaaatactgattgtatgatgtctctagctctcaagaaaaaaaaggaatacaaaataggggcaagtcaaaagactgtggagaggaaggattagtcagtaaacagtgccagagcaattgattacctatgtggaaaaaataaattctcacctcagtccttaaacctaaagtaattccagatggactgaagagttaaatgctaggggaaaatttggaggactttcttgggataaaagcagtagaaaccatcatggaagaaaatatttgtctacgtaattatttagaccttctctttgcccagaaattcaaagaaaattaaggataaattattttcaaaacattacaaaggctgggtattctttgcatttcatcagtgattgcttataaaccagtaaaaattactaatactcatttttaaagtgggctaagaatatgaatagaccatttgtctattatrtaaatatagtgaagaaacatatgacaaaatgttcaaccttagtcctgatcagaataaaaataaaagtaaaataggtacaattttaaagctactaacttgactacaaggagtagtgctggtgaggggcagggaggccagaatcgtggtgtatggctgggggtcgggggtgtaaagagcctccatccttcatctattcattatactaacatacttatgagatatgtatttattaagtgccttcaaatgtttataacctttgtctctgaattctacatttaggaactatagatacaaattattgacctgtatgatgatattacttaatggtagtagagtagctaaatatattaatagcatgggaaattcatcgagtatcattaaaagatattttttctaagaatatttaaagaatattctggatttgtgcctttaaagcatcattaagagatatctttttctaagaatatttaaaggaaaatggcatcaaataatgttcacttttaagaaacacagaagaatactgtatagtcatcctaattgtatttaaaaggggaatatatgtgcttgtgtgtgtaataacctacaatgttaaatcttctgatggtgtggcatttattttaatccctttcaccattttaaaaattttctatttcgtatattagctttatcatcagaaaaaaagattttttgaaaagaaagctcttactaaatttgaattagggtgattgagttaacttagaatgatttctccaggtttttcagcttatcatgtaaacatattgaagaattatagaattgtattgctgaaatcaaatggcggtgtctcctcccttggatttgttcattgatctctgctttgctctgttccagctgactgcctgcatccacgggtctgcggcgatgctctaccccatgtactggcagcacgtgtacatccccgtgctgccgccgcatctgctggactactgctggtaaggtggctggccctgtcctctgcttctcctttgccctgatctgactgggcgtgttaggtgtgtcacttgttaatgcagttggtgactctacattaaaaatattaacttcatccagcctggacaaaatagtgagaatccatctgtacaaaaaaaaaaaaaaaaaaaaaagccagtcatggtggcacatatctgtagtcccagctactcaggaggctgagttggtaggatcatttgagccagagaggwtgaggctatagtgagctataattgtgccactgcactccatcccgggcaacaragtgagactctgtctcaataataataataatagaaatactaacttctaagtggcatggatttaagaccacctgattgcacggccctttcatttccagttttcttatatgtcatgacactctgaagagtacaagagaataggtagtaacttttcacatttctcagtttgggggaagcaatgcaccaaaaggttgcgtgtttgtttgtttgttttttcctaagacaaattgtaaactggggacaaaaacaattgagatctccaaggtcttcaagtttcagccatgccctggcacattccttaagacttgtgctcactgtggtttgggagcacaagccaggcagcgctaaactgtctgaagttctttgaggagaatttcactgttcagtgaaacagactttagtagaaggaagaaacaaaggttttggcgacagccctaccatcttgggcaagtcacttggctttaagactttgtttactcatctgtaaaaggaagttgttcaatacataatcatacaaagatgaaacaagataacatatgaaaggaccccatgtagaaaagctggctcatggtagctcagaaaatgtttccgcagacacatcatcgtcctcactatctgtcttcaatagattaccaaaacagactgtctttgtgaccgatttggatcccttttcctcatgaataatttctttctctagtgtaatgcagttaaagacattgtctccaaacagttcaagtcaacagaagtccgtaagggagcatggtacacagacagggaaaggcactaactgcgtgccggatattgagagcttcaggagaagggaagccatttgagggtcatagccctgttgcttaaggacagatgacacgggacactgaccactggttcggagtgattgagtccaggtcagtcatacttttgctgggatctccattccattttgcaatcatctcactggaaaggtccacccaagtagccagattgtccaaggagcttgaaggcattccacagtcactcctaattggaacgtgctgggctcaccctcttcccaagaggccatggagataacaaggacataactcagggacatcatgtgaaaatcagtggccctctctcatgcatagcagtaagtgaatgggcctgattctctctttattatatgtctttcttatcaaggtgagttatcttatttgtgcctttctcccacctcttatgagattaaggggcaatatgttttctaccatgtggagtatagaatcctggctaattttgaatttcttcttgattcatcaatggctgaaccccacatttttttcactgtgtctcttcatactttggtttattttggaaactattttcagttaatggtgacgtccaggtactgctggtctagattttggtgttcatcccttcttgagtgggtaggagataaagtaatgtttgcagataggaaaggataaggatgtaaaccccttataacagattcaccatgtgacattaaatgtttgcgtttgctctgttcctcagggagtgttttcaaacccctgggcccattccagacccctcccctgtacccaggtctccagcctctctccttccattggagactctagggagtgctggactctgccctagtgaggctgctccttctgctcccagattgttagactcctgtccccgctgccatggtctggtgtgagctctaccctgtcatctggcttctagcacagcccctaggaaccttcctccctcccatgtcactgtcatctgcttgtctctgggatcttcatcacctgtttgttgagatgtccacatctccttcccatcttattccctgctgtcttcagtggcttcagaatccacactactggcctccccttattcccactgagctcacatttgcactgttttgccatctatagtgagattaatttactccctcagagaggccatggagtagcacacacaaggataggacggggctaagaggaggacgcctgagtccctgtctctgctccattactgcctggctgtgtagcttagagcaagtgcctttgcctctctgaatctcttctctgttgagggctgaaaatactgcaacctgttctttaaactgtttctaggatgaaataaaataacgtatgtgctaatgcactttatagaccgaaaagcactatcagccacccagcagggtgacacctgtgtcattaaccgtctgaagctcactcagccccctctggtttcctgctggcctccttgcttcaagtctttgtgagcttgctctctctctctctctcactcgctcgctctctctctctttttttttttttttttttgagacagagttttgctctgttgcccagcctggagtgcagtggcacaatctgggctcactgcaacctctgcctcccaggttcaagcgattctcctgcctcagcctcctgagtagctgggattacaggcgcgtaccatcacactcggctaattatttgtaattttagtagagacggagtttcccttgttagccaggatggtctcgatctcctgacctcatgatccacccacctcggcctcccgaagggctgcgattacagacgtgagccaccgtgcctgttgttgtgagctttttcagtagagcagatgtttcccgatgctggccatgtcttaggcactgcactaagtgctgggaagacagggatgagagtcaatttccagcagaaggaactcaaacaattgggtgtcgaagacacaggcccatagacaggccagaactgctcctgggtttttcaccagttccctgcaggctgttgcttccctggccttgccactgaccctgggcacccctaccattttcttatctgctccttgtctggaagatactgctggtgaaagtctgagagcctttgcagagaggacctgctagagagtggtgctgcctaaccttggcttgccctccttctctgcagtcacccctgagccctcactctccccaccatgcacaggctcagggatggggatgcattgtcacatctggcaagaagagggggacatagggtctgtgttcccacaactgccctccttctcacccaaggctggtgctggttaattgctgcctgtctgcctcttcctctcctgccattcctgagggaggaagagcagtctgtccaaagccattgacttcacctgggcctgggtgctgtctcctgagggttctctgggacccatctagaactctgttttcttgggtatcattaaacacccctttctgctgcctcccgcctctcctgcacatgtgcttaggtgccccattcctcagattcaacctttccttaaactccctgtgcttgagcttctgagccaactctcttggtttcttctcactgccatatatctccaaggaaaggaccaaaaggaccctgtttactatccagtagtgtttgttgttgttcaaatgaaagcttgagggctgggcagaggcagacactgacactcagagaggaggaaggagatgaggggaactagaggggaggacaaggaacaaaacacacacccaaggaagatggaagggagagagagagtgagaaaaagcaggagaagggagagagagagtgagaaaaagcaggagaaggtagaaaggagacacacatcacccgagacagagtcctggagtgacatccagcccccttagcatgtagaacctgctgccatcccctctccccccagacacacagtacgctcacaggaatagaccccacacagacgcgcccaccttcatagacataggtcctttccccatagacatgtctcagggtcttccacagggagagacaccccccgcccatacacaccacacgccagatgtgtgctctaaaaggtagcctcaggtcaaatgcggtagcttatgcctgtaatctcagcactttgggaggccaaggcaggaggatcacttgagcctaggagtttgagaccagcctgggcaaattgtgagatcgccatctccacagaaaaaaaaaaacaaaacccagccatagtggcacacaattgtagtcccagctacgcaggaggttgaggtgggaggattgcttgagcccaggaggtcaaggctacagtgagccgcaattgagccactgccctccagtctgggtgacagaatgagaccctgtcgcacggttccccctggaagagattcaccagtgggttttcatgccgtgcttcagggaggaatacccggggcttctgcagggattggtagagctggaaaaatcaatatagttcctctgccaagtggtagtataattttattttttaaatatttgtcttattttattttatgagacaaggtcttgctttgtcacccaggctggaatgcagtggcacgatcttggctcactgcaacctcagcctcctgggttcaagcgattctcctgcctctgcctgcctagtagctggaatcacaggtgcataccaccatgcctggctaatttttgtatttttagtagagacagggtttcgccatgttggccaggctggtctctaactcctgacttcaggtgatccacctgcctcagcctcccaaagtactgggattacaggcatgagctaccatgtgtggcccaacttcagctttctattatttgaaaagttttggttgctaaattgttagctagtttaaaacaggcagcttacattcctggaactgtggaggggaaaatgctctgtcagtaacataagtgatgaagatagctgccactgttgaacactggtccatctcctttacatctgtgatggcgttgaattcttccaacaaccctgcaaggcagatactattaaccccatttcgcagatgattggtagaccaaggccccaagagctttagtaacttttcctgatacagacgttatgtattatactctatgatcaaatttttattaagagaattatatggacacataatacacaaaaaatcggatgtatatatgtatacatatagagaggcagaaatctggaaagaaatacaccaaaatgtttaacagagacccgtgatggggaggcgggagaggatttctgcatgctttttattttccatattttccaatatttctacactgaaaaagtatggtttttataattaaaagctttattttcacaaatcagtgttttttctagccaattgttcttcccagctgccattcatttctcctttcatgttttcttggagatacattagatgttttattttcctgtgaaagctgatccaagatcattttttcaaccttctctaactctagcactctgaaaaactgttaccagcctgaccaagggcattgatgttggaaggtctaacttagaagagaagacttggcaaggaaggctgctaagtccttgtcatcctaaatttccactccagaaaattaaggttgagttttgtatttactggtgcctgagtgagttttgagaggaggcaccatcttggaagtttctgtttctgtaatagcagtctttctcctggtctcttgtttccgtgaaagaactttctgacatatgaccaaaggatgattacaggccggtggggattggtgtctgtttgttaactgtaagatgtaagaatgatgaaatgaaagactccaagagaaaaaacacagcttccataatgaagggttgatttgaccaccttcagccactaccactgctttggtcagatactacaaatgtcatgaaatttgagtcaatgctaataacttcattctattatgcccagtaactttcaccaccattgagtttaatccttggtggtaagagccagcagggataactagcattttaagtaaagtgctaggagcctgaaacatgtaaatttgaaggaggtttgctactctgcagatgatttaaatgttaagtatgtccccatgcaggggatacacaaaaaggaatctgaaaactattatctcctgtagaaatgaactctcaatttactcactgcacaggaagggcggtttctagtcattttcactgccagcaggtgccctttctatgcataatagacttcacaagtgtaattaacacatgaggaccactgctgccagtttttcttcaggtacatgctgctaggagttttcaggacaacagtgtaggccataagagctttttacatggcgcctgaagatgaagtcttcgttgacttctggacaaagacatgttaaatggagctgagcccagaccctgctgttggtatcacaggtcacagtcattgagtccagaaaccccagaagctgtattgcagctttctgtggaccagaggccatgacagcaaagctctagtttgcatgcagttaataaatgaaaagtaggatactgaaaaccctaccattatgtggaggaccaattgcgcattcacaaatacgacatacaatcatctgagttaactttaattagagctataatcacagattttaattatctggaaaaaatcagtttagtacaaatgggctgccctaaatatttctcaaattatttttttttgtgtcccttcctatttttggagtggacaatagtgtggaaagtgcctaggttttggattcaggcagacctggattcaaaycttagtcttatctcttattaactatgtaaccattaaaaatctgttttaactctgtgatctgcaatatctttctgtaaaatgggtataacttacctactttgaaaagtggctatagcaattagagttattagtcaagtggcacctaggggccattagtaaatgatgattgcttttttcaccattattataaacatgggacatggattttggtttccagaaggtttaactcacattaagcattattcttacttctgttgccttgagagctcaggggaaaactttataattcatcttctctttttatccctcagattgtttttattttgattttttttttatttaacttgagttattgtatggttgttttcatttgcagctgtggcataagaatgaaaagaaaagaaacaaaagcagatggcagagaaaacgaaaggagtaagacatttccaggccttatgaatatttaaaaacatgtgctgctggttcctttctactttagatctgtgccattcctttgactttgaaagtgaaaacgagaatgttccctaccttagctgatggtggccttgaccttggccagtgttgggaaagccttcctgtttctgggagaaaagcattaacttgctaatgagaatcagcattccctttcataataatcaccatctattgagtactgtgtgtgtgacaagctctttataaacattattgcaaatcttcaaaatcaagctgcaaggtaaatatagctccattgtatatattaggaaattgaagctcagagaggtttaataacttacctactgtcacacagccaagaaatagtggagcctgcacttgaaatccaaggccatctgatattaaagctttccttactaatatcctctgaagtgttagagaataaattgtgcccatcaccgagattttatgaaaaaattcttcatgtcagcttcttgatgacttgctaattgtagacgtatgttgtcattcattaattatgcatttattcagcaaatatttatagagcacttattatgtaccaggcactatgctaattaaattttgctaataaaaggtcccagtagaaaccatatggtatttcccatgtaaatttctttttcccccttcctccttcagaagtagtcctaaatagggaccacaaatcaattctcaacttgaattgtatatttggtttattctaggcacttattaacacacatttgtgataaaatattttcaaagcagatcaagacaagctcatgcttttcccccaaaggacagtcaggtcaaaagccaagttagtagctagctcctgatgctttttgagggcattgttgaactgagaagtcaaataggatatgtacagtgaaggtttcgattttacatttgactttgtaaaatgcctcatatttcttggcatttccagatgactctggaagccgttcttcctctcagagtggggatgctcagatctctctgagagatgctagtttcaggccctttgtgtgctgtatgtagggttctgaatcagcccccacatggtgcatcacatattccatgtaggattttcaacaaaagatgcacagtccacataggcgatggggcatcaatctggacacaattctgaagtaacatccagttaatcagatctgcgtcgattccaatcactgtcttcatcggtgccatgaaattttgcataggaaatagatcaatgctagattaagtggaattgttgatattcttgatggcagggacagaactcaaatgaaagtgtggtgcggcggaagcagaaatgtctggccctcacctggcttccccatttactagattggaggtcactgagccaatgttttcaggtggaggtgaatagtgattactactgacacaaagcaggtgctctgtaaatagtaaatactatctttgtgttattcatagctatatagctgtatatatagtcaatatatattaatgtatctctggtgctaagaatttcaactgaggccaggtatggtggctcacacctatatcccagcactttgggaggccaagggggtggatcacttggggccaagagttcaagaccagcctgggcaacatagtgaaaccccatctctactaaaaatagaaaaaattagctgggtgtggtggtacatgcctgtaatcccagctactcaggaggctgaagcacgagaattgcttgaacctggggggtgatggttacagtgagccaagatcgtgccactgcactccagcctgggcagtagagcaagaccctgtcttggaaaaaaaaaaaaaaaaagaatttcaactgaattttttttttgcatcaactaaatatatagacttaacacacagaatggaagtggattagatggatagttgtggccaaaattctcttatgtatgccaaactctgggctttctagcttttgttaaagattgggttccagtaagtaagcaaaagttgtatgtcattgccattttgcagcaagtgcttatgaatacttactatattcctggcagtgggcataggaagataggtggacatagatggttctggatctgaggaaacactacttcaccaacgaactcaagcatccagtcaagatatggagaatagagatatttttttttaagctaagaagcagcaagacgccaagagtggaatggtgccactgtgacagagctcatctgggaggggtgggaggggataaggaccaggaatttagtttcagacagaagaggaagggaagctgggctgtggtgggactgatgattaggaaatgcacacacacatacacaaatgtgtgttgatttaatgatcagaaatcatagattactagttaggtaattcctcaactgagatttggctaaacttgaccctgaggcttgaacagagaggccaagtgagagaaaacagttcagatttggaagtcaaagtcttgggtccaaatcctagactctggtcctactaaagatgtgactttgagtgagtcacatctcctgcctgagcctcagtgtcttttgctaagtcattgccagggagatagctaaaaacattgctgtacatgaggagcctggcaccaagtaggcagctggaaaaatgttttgaggtgataacagtcactgagccctacactgagatgcaccttcatttccttgagcagcacccaagactgaatgtgccaagagccttgtagggaagctttggatgatttcttttttcctttttttctttttcttttctttttttttttttttttttttttttgagatggagtcttactctctcacccaggctggagtgcagtggtgcgatctcagctcactgcaaccttcgcctcctgggttcaagcaattcttctgcctcagcctcccargtagctgagattacagatatgcgccaccacacccagctaattttttgtatttttagtagagaaggggtttcactatgttggtcaggctggtctcaaactcctgacctcaaatgatccgcccaccttggcctcccaaagtgctgtgattacaggtgtaagccaccatgcccagactggacaatttcaatgtgaactgttttccaggtggaaaaattaggtaaagaagagactgggccctttgtattatctatgttacagattctgtgctgatctctatactgaagactctataggaaaactgtcttttcaatttctctgctacattttttaagttgaaatttaatccacataccacaaaattcacccttttaaaagtatacagttctggcccgaactgcagtggctcacacctgtaatgccagcactttgggaggtgggcagattgcttgagcctaggagttcgagaccaatcctgggcaacatggcaaaatcatgtccctgtaaaacaaatacaaaaattagccaggtgtgatggtgtgtacccgtagtcccagctctctgtgaggctgaagtagaagaatcacctgaacgtggagagttgaggctgcaacgagctgtgatcacgccattgcactccaacctggtcaaggagagtgagactctgtctcaatcaatcaatcaatcaatcagtcaatcratgtatgtatacagatcagtggtttgtagtctattccaactatctaatccactatccatctaatagatatatcaccaccactaattccagacacattagatttttaatacagtctatattgttagtaaagtaatacattcttattataaaaaacttttttaggctgggtgcggtggctcatgcctgtaatcccagcgctttgggaggcccaggtgggtggatcacctgagatcaggagttcaagaccagcttggctaacatggtgagaccccgtctctactaaaaatgcaaaaattagctgggcgtggtggcgtgtgcctgtaatcccagctactctgaggctgaggcaggagaatcacttgaacctgagaggtggaggttgcagtgagctgagatcgcgtcactgcactccagcctgggtgacagaacgagactctgtctcaaaaataataataagaagaaataaaaaacttttttagccttttaaagtacatatagcaaaaagcgaaaggtctataaaaatgggttagtctgtgtagatggttgccattcagcctttagccctgtccctctagaggcaccccggaaggcaccgatgtcaggagtatagcgggacagctctcactggcctcagcagtgtcactcccagcgttactgagactttcagggttaaagaagacaaggtgtccctttaacacaggagtgaccttcccasataggggaatggtgcttgttggctcagccacccaccctttggggagctgtctggaccacagcctaaccacctcctggctactgtatctgcctctgagcctctggacctgccctgccgctcccaccttccccagccccctccttctgcctaatgtcgggaggggcaacagcccgcctcccctgccctagtttctgctggcctccatgcaacgttgctggccccgactcctgcctacctgcctgagcattggcctggttttccatttctcatgacacattctgtacgtgagtgacacattcctcattcctccctgatttggagcctggcttgaacccaacacttagaaaactctggacattctggggcacagtatagggggctctatagcaacgacactctagatatgttcctgggagccatagttcacccataaggcagaggccacagaccaagtaacatcagggtcacaggaagtttcagcagtgcagcaagtgacctcatggcagggcttctggagatagtgtgcctgcctttttcaggtgctggcaccagggacagtatgtgcagcaccagcatagtgataggctctgagtgacctctcagcaagtgcgggttcgtcttccctttaaaacgtgatgaatggaaaggcgaggctgcaaaggtaattggatgctatgcatcttggcacatgggatgagtcctggaaaaacagcaagagaaaatctccttttattatcagttgcgctatttttttatcctttttttctgttactttctcttcatttatttctccataagcctctttctctttttctcttatttattttgtggctcattcattcatgtgtttccacaggctctcatgggctgcttgtggctcacaacttgagacttcctttccgtgtctggctttagctattacggttctcattgaattctctgtggcagcagagagccctgtctcctgacctttgctctgtgattaacttctcctgccgcagtggtcttagccacggagcccttcctgatgttttccgagtctgtcgccttccggtaggccaaggaggctcaaaagggcgggctaccccaggctttgatgttgacctctccagaattttgtccaggtgttatctttgtaactcatgtgttcatttctgttgggtccagtggcttggggctctagaaggcatctccaccacccccacctgcataggttaccccaggaagccacaaagccacactcagaagggcattgtcctccctttcccagtcactgatcagctccagtgatacacgtgtcttgcattagcaaaccatctccagtgcccactggacatcagtgcacgctgagctcacctctgctgtggcagggccccgtgctcttgctgtcgaaaccacaaatggaaactaggccatctctgccttctcccctaatcyagaattattcctggtctcctcatggatcgtcatcctctgttgttgctcataaatcggagagggctgggttggaaaccaggaaagacattaaatactttttcccctaaaaagaaaaaagcttgcctacctcatggcagttaccccatactttctacttctcaccagctgtgacctttgtcgagtcacttaacctctttgagccatgggttcctctgtgaattatggggacccacctttcaagattgctgcagagatgaaatgaggtcatctcaggcccttccgttgtgtacccgacaacaccctgtgcgtctccttgtagcggtttgcgcatatgcaataatgcgcttatttgatctgccattaactgtgagcttcacatggggaccagatctattctatcctcttgccccaggccagcatggtgcctgatattagtgatacctgttgactgactgactaaccggcctgtggaaaacacttttccctccccaggagccttttgaaaattcaagctcctgggtggctggtttatttttctcctgtggacaccacaaaacacctcacagtcttgtttcccttttgggttggtggccagagtgctcagagccaaacctgtgaccatcccagcaggtgtcccagcatgaaatagaaacactaaccttgccacagcttcctttttttttccccttagctcctatttcttttcatacttttgttgctatgttgcaaatattcatataaattgccttaaatcccgcttagaacagaaaagagtatcagtcaattccagctagtaaggcaaatatagttttattctgactatgaacccactagctattttacttttttagctataattatccagtaaccattttttgtcgacagtagcataatggttaagagaagtcactagcaagtaagagtagcgtaagagacttggaagtagaaggatttgggctgggatcaccattaactgggtgatcccataggcacgtttttgagaatacctttttaagtctataaaatggccaggcacagtggctcacgcccataatcccagtactttggaaggccgaggcaggtggatcacctgaggtcaggagttcgagaccaagctgggcaacatggtgaaaccctgtctccactaaaaatacaaaaaccagccaggcgtggtagtacgcacctgtaatcctagcaactcgagggactgaggcaggagaatcacttgaacccaggagacagaggttgcagtgggccaagatcgcaccactgcactctagcctgggcaacagagcaagactctgtctcaaaaaaaagctataaaatggatggtgtaaattggattatttgaggattaaatgagataaggtggctggagcctcccatgcagcccttgaaatgtggtgtgtgctcagtaaatagctcgactgttttacccttcctgctctgcacatggcaccatgggaggctctgggaaacaggattctgtgcttttgtgactgacaatctagagtcacccttcaaatcagcacatgctttatgccaaatgggtaacccggacaaaagcccctaccaagagaggtgttagccaccactgggcaatctgagaggcaggcagcatggcttcagtaggacttgaagaaatagtgaagctgaggcctgtggggccaccatgtgactgagatgagctcagaggcacttcagggaccagaagcttcctgtgatggaaaaggtagcaggggaggaggagctcagacagaatgtagaagctcctaggtcttgtcacagctgcaggccagcccttagggagcaggttagagaaaaccacctaacctccttcctctgcaggctgtgggaatgctggtctccaggaaataagaagcttgcttgatccccgtatcatgggcttgggttctagtcccagttctgccacttactagctgtgtgacgtcagatgaatgatttagcttttccaatcttagtttttccatctgtgaaatggtagttctgatagcaccctccttatgctgctatggtgagaatctaatgaggaaaatgccttagcctatgctggctcttggcaaatttgcagtcagtggtggctgctcttactggcttcctctcctacactggcagttacattagcctgaagagcagctgtctcatcgctctcactaagcccaaaaccatgatcattcgcattctccagcaagatatgttctctggtgtctgttctttttctttttcccgttctcttgtcctttaacctctctaataaagccaggctcattatttcgagcagaatttaaaaccacaagacaatctgtgtttacacgtttgtgtcttttacaaaaaaagaaagaaaagctcacataagacctccttcagagtttttctttctgactgtgggatcccctttgcctgatcagggtatttaattaagaaggtggtggccctctgagaggtaaggtgacactgtgatgtgtatattgtaacgtggatacctatgtgtaaacagtgatctttccaaatccctgggctgccctaagctgtgttccttcatgatagcagaggtgttgcccacctggaggtggagggaccgcctctcccttgtttcctctcccctcccactttgtcttgggaagctgtattttttttttttttaagcagccagtgttcctttatttcactggactcatttccaattagtagctgctcacctcaggggaacatgattaacagagccctggttatctgggggaaaggaattaaacaaattgtgaaagtgcggtaataatgaacaaggactacaggatcgttagtaagtctgcagtttccatattcttgcttcttccttgctgggaataagctcatgccataggacttacctgtcagagaagcgctcagcatcacaggcctggaaccaagaggactggcgaatagcccttttggtaccccagcgctcttttcctttcagcttaagtactgagtatgtgctgtgtgacctcatgtgcagagcttgggctgtctgttcagcagccttgcgtctgaagtacggcttcaccactgaccagctgtgcgatcttggcaaattttatctttctgagcgtgtttcctaacctgaaaatatggatgatcgcaccaccttgcagagttcccttgagcattatgtgtgtaatgcataaaggtgactgaattatagtagctcaataaaagttccttttcctcttaagaggattcaaactaaagatatcttccaggtaaaggttattctgttgtgtctgcctcaacaccagcaacagagcccttttccttttcaggggagaaggaaaaaagagtcacttttactctcacgtttgtaactgatgaaatcagatagtgcagtaattcccagagaacaaaagcttcatacagatataccccattctgctattccaggatgtacaatagcatcctacaatcactgtcagtcatacagcagttgtgacatggttgtcatgacctgcctatgcataagtttggttataactgttaatattatcaccactttaatttaattatgtgcattgttggttctgcacatgttgtttaattgccgtttaaaatgtcttcaaaattgcactatgattcaatattgaaaggtaaagtcactgtgaatgctaaaaggctctggagaagagaagcagagtatatacatttgctattactgaagcagatatttccattcatgttttctagaacagcaacaaataagttctttcttgaacctaaacaggaagatcacttctagtagatggattttggtttggttttgtaactgagatacccttggaaaaacatggacgtttatgcctctgaattagaaaaggattcagatgtgttggattctgaatatgaagaagttttttttttttaaatagcttacccaatttattttgctgttttatttttaatgtatgctcaagagtgataagaggtttttaaaaatgtgtccaagtgatcagaaagtcatgaaccattgtttcattgatagtttttccgttattggtggtacattagaaaggaaaggcaccctcctgacgagagtgatgagcaaccctcctgaactcagtggagtatccgggagacaagagtgtgcttgggagtcagaaatccatgtgtagagatggtgtgtgcctgtcaagcacctcccattcctcatggcatcttgaccattcttaccagcagtttaccaggtatcctagagcgggtatgctacagaaccagggctggaacaagaaaccattctgtgggtaataggagagtgggtccaatggtgccagccatgccaggggctcagagaaaaccctaccatgtgctgctgctgtgccaggtacgtcagaggttgtctctaatctctacaacaatcctgaaagatttctactaggccaggtactgccttattggagaatgctttgctaggatataacaaaagataagaaacagccctgtcctttaatttttagtaattcggtgtctaggaattcatgcaacatgaaggtgttcatttttatcacagtgatacttatagaaaattggaagcaacttaatgtctactctagggatagcattcgataaattatgatacatccatatttggtggaatattatgcagtctttaataatcacaaaaattatagaacaatctgggaaatgttcatgtagccaatgagaaaataaaacaatgtatgcactttataatttcaaagatataaagctgttaatgtgagccagtattagaaaggaatgcaaaagaaaaagtaattgtgttaggataatataatcatgggtaggtgtttttctccccaaacatttcttttaaaaataaaaagacaaagaagaggttccaagaaactgagtcagtagctacaataattattgagatacagtgagaatagaaattgttttcagactgtacctagaattacccaattggataagtaccacattgagatgttcaggaaattctgggtttctttttcttccctctccctctcaccacttggaattcgtaattatatatttgcagagcaaacatgcagtagattcagggaagtatctgaggcttgatacgtaaatgatgacaatgtaaaaggtatttgtccaaatttgcattcatacaaaacatggagctgctatgatttcagaataaatgtgttttaaatattttctaaatacagagctgttgcagttctaacaatacttggctaagaaaactacatttctgcgataggccataattactctttggataattattgggctttaaaaaatgcctatctaaagatacttgaagaatgagttccattttgccctttcttgcctcttcagtctcttccatgaggtccctttttcctttcagggtatcattgatttttattgtaggacaaaagggtgtagcattaaagtctacatacataagatcctatggttaagttatacagaggggttttgctatacatatttattttcaaccgtttgaatgtctttttctgtatattaactcatttgttggaatttcagttctacaattctggttaaaacccatggtcactggtcaattgcatgattaaatgtaggagatgggaagggtgataagatttagttaaatattatggatttgtgctttctcccttctatgtgttaggctgtgcttctggtcacattaataagtggccatttttctggaatttgtactcttcctgcttcctttcattacattaggcaaggttccactagatgagacatttgcagtcttaagacttcctgccagggttcagactttgtatttttgacattgaagctgtcgtgttcctgaagctacttaattagaaacacattcatttcagtgtacactggaaaaagcttggacagcagagccaggcacactgggaagtttgagcatttgtgtagctggcagctaaactaatggtttacagtttaaggggaaaaaaaatatcacagggcatttccttgcccctagaagcaaagagaagctgaatacacacagcagatacctaaaaaaaagaagaagaagaagaagaaaagacaactccactttcactgcaattgtgtgtatagttctttctttagctattatcaaatacaaaagtcttctagaatagttagcaaactgagctgctaatattcaagtctgttttacatgtkcccaagacatattatattactgctgagatctgtagtaaggaggacattttatattctggggaaagaaaggatttttgcttgaattttatttgttgaatggtaatgagggaattgtgtcctttcttatttttaaatgtttgagcaatttaaaaatatacatgtgatgtttagaaacctcccttgcctatccattgctttcaggataaagcctaaactccttagtattcagttggaagcaaacctctcctgtctcattacttaccactccttgtttctccaactttgtccccaaagagccattcttgtccatccacctctactctaccagctgccccagaagaaaagtacctgttcaccccagtctgagtcaggtgtcttttctctaggttcacaaaataccatctgcacatttcatagactatatcccatactacagagacagatggaaaagttgccaatcacacccttcctcgctatcccttgacctccttcccctaacccaaaggaaagcattgcatggggagtgagcttggggatttcaggttctatattacaaagtcagtgtggcacaaaggaagaaatgcatacttgggaatcaaatccsaggtctaccactgactttgttttgtggtattaggtaagtgatttaactaacctctttaggcctagtcccttctctgtaaaatgggtattgtatctatgggtattgcaaagttgttatgtggattagaatagatgaatttaaagttcctcatataatgtctagcacatttgttattggtaggtaacataaatgataatgtatacacacacacacatacacaccgacccctgaaatcaacggcaggaccggtgtatccaaaatgcccaggttttaaacccattggagtttagttctcatgcctttgctcagtcactgacttaggcaacccgtggctccgtgaatgaagcagttggcagaggctttctgaattatagtgtcatgggatggcatgtgtgcaactggggaggagatgcttgctggcagctctccaagtactttgtccaatcagaatggacagttagatcacatctcttgatgacagaggaagcagcaaatacaaaatattcttctttgaaacacattatgcccttcatccaaccttaactgctttttctgttgtaatcatggcaataatcgttcccatctgtattagaactctgctgatcatttaacgtatattttctttgattctagtaacaacgtgctggctggaatccaggattccattttaaagataaggcaactgaggctgtgcagttgcagagccgctctttaggggctaatatcaaggttgatgctcttcctgctacccatgctgttyccaatgctgcccacgttttgaaattcttctgaagtttctaggcttgggaacaaaatgtcatattaggatttttgttgtgaaaggaaatgtaactatgcatacgtttattaaaacagtttttctccaaatagtgaaccatctgtaattttctgtcagaagcaacagacattaaagcagctgtgtgtctctgtttctcttcacagtgctcccatgccctacctcataggaatccatttaagtttaatggaggtaagttggcttctttcctccccagatggctctacctggggctttgtttcattgtgtggcggtggagagacccagtctcagcagtcacagctctgcacgtgggagcatgctgaagcagcacctcccagcgtacagagctgagcgttcggtttggacgccgtgcactgggctctgttttcagggttttcccactttgccgagagactgtggattttcatgggttgagggaatgagagtcaaggaggcaggaggaaagggttctttaagggtttgaacgagggaagggaaatgatttgcttttcaaaatgtttgttctaatcgctatagcaatattgcattcttcattgtagtaaatgtgatataaaatgtatatagaatcatgaagaaggaaattaaaattatgcacaatgccattattccagattgaaccattgttagcattttactaatctccctcttggtctttagtctctaaatatatgttttgtataaatatgtataattgatatactttataattttgtgtctttattttaattaacatggcttgggaatctctacatgtttttatctactctcagtaataatttttaatttgccacctatcattcccactatttggatataccacaacgtaactgttttcctactgttggacactgaggttgtttataatttttcactattataaatagcatttcagtgaacatctttatgcataaggctttatctgcattttgcctcatttccctagcatagaacccctaaagtagaaatgcttggtcaaagctatgcatcggatgccagattgctttctgtatggctgtaccaattagatagcaattcttttaaaggacttttctgtgcttttgtaagtgtcattagtttgtagacatgtaccctaagccctttcctcctcaggagagagttttaatttgtactagagcaaaatgaggcgtggggagggtgcttgcctgtgttgcacaggagataagctctcagagggaaaatctacagccatgtccgtctgcggtggtgctttgcatgtcttgaaggaagtgctacttctcttcttctgttcccttcatttcacgtcgacgaggaccacctgcttcactaactgttgcacactgtgctattgtgcttacgaaaatgaaagaagttggttatcgaaaaacctgtttgtttgacattgagaatcttgatcaaaatagaccacagaaatctgctcaaatttctaatttgacaggccggccatgtggctcctacattctgttaacagttcctccttgtcatcacccagccctaagcacatacagtacacagtttatggactatctgggatgatgtatttagatcagattgaagagatttcttctgtgttttacctttgtttgtcaagtttgggggtctattcaaagctcccgtatgaaaaattgaaattcaaagtaaatacttaccaatggaccgttagtgccaattgctgtagagtttgaaacactaatataacgactatttggtctatcggagtccacagttccctcccgcttgcctctcctcctgccttccagactgctccagcacaggctttttcagattcctttttatgtcccagcgcctcagcattctccaagtttctagttttgtctttctcttcttttctatgtgccctctagtcaccttgtttaaggcctcttgcttcagctaccaggtcaatgtcaatgactcagctggggttctaatgctggtctgcctctctctgagcttcaggtccaaagtttaaagtgccagttggatttcacctggatgtactacggatgtctcccccagtcttccccaaacaatttattgtctgcacacacacacacacacacacacacacacacactctctctctctctctctctctctctctgtgtgtrtgtgtgtgtgtgtgtgtgtgtgtgtctctctctctgtgtctctctctctctctctaagccactccactccccttccactgttcctggtccctgtgaatggcactactgccttcaatggcacctaagtggaacacactgatcatggctgaatgctcttcttcctcatcctctctaaatactcacaaagctccaaaacgtctctcgccctgttctttcctcactgccttcattgacactttgctttcttggattcttgcaaaagccttattcatttgataaacaacatgagggtctcttatgttccaagcattttgctaggtcctggaggtatggagatgaatataaagttcagtgcatagtcacaacattgcatgggttgccctccagctggtcacttgataaccatgggctacataatacttgaggaggagccttccagcctcccctacacagtccctgggttctgcacagtctctccactactgtcaagccttctggctggtcactgacccatgttagcttgtgctcctgctgatccctaaacatatccacattcccaaccctctgcatgcatcagccctgcccttctccacctcttccaagaagtcctcctgctctgttttcttctttcacttatggtgcctcttgctctgaataatagctgtttgcttccttgttcctctccatcatcccctggagcatgacttctttgggaacaaggactgttcccattcactgtggtgtcctcagcacctaacaggatgccacacaggtgatattctctgagcaaatgctttgtgaaaagaagcgttgagtgaatgcttggaaagctgtaattgggagcacatttagaagccctctaataggcatcactgttttcaggcaacccaatgccataattttacttacaggtgcgggaagtgaattttttactttttatataattgtaagtaatttaaaataaggccttttgtagtaaaacatgcagtgtaaaatatgcgtacattttgcagctgaaacttgagacagagttttgcacttacatgaatgggtgcaggtctcttctgctcagcctttgaagggcgttaagggagaaggcttaggaagcactggcccagatagatcttagccctgctgattgacggaggctggggaggagtttgctgtgctgaactcctgtgtagtcagcacaaaaataaaaacaaaaatgggagttgtcccactcttgaaaccagccaagacactttatgaacaaagaagtgtttcctgagtgtgtagggcagccgtgaactactgaatcttagaattcagtctcctgacctcctccctggaatttcagctcagattccgagtgctctagttgtgctttctgwtggggcttatctagttcgattgtacccttcaggtgaaagggatactccttctgcggtttcttgcaggaacctgtagctcagacctggggccaaaggaaagccgtttacggaaggtgctcaggaaggcccatctcctctcgctacactagttttcttactggcaattcagcaaaaggcttatttttgactgtcttgttattttttcttgaaagctataggcaccttattatgcctttgcatatgtgccagaattttttaaacttcaaatgaatgtggcagatgttcataaaagtttagaaaaagctaccataggaagactttttaaccatttttatgacactcaaatttgttgcacaaaaagaaatataaattacaaacttgcattgttatttttaaaaaggttattttggggaaagacctaattctggttcatgctcttacaggatgccattaaatgataacctagtcaccttacagagtccgccttcctcccaaagtgacaagtgtatacctgatcgccattcttctctctccttctgcctgtttatagtttctctctcatttaagcaatctgaggctagtggcatgttagcagaatagccaagggtattggcatagacctagtttcttcttggagagaatgatcatgctagctggcagctaggaaatcccaaaacacggccagattccacagtgactgtcctttcattcaagcgatctcaatttagctcaagagacatttatgcagcccctcttctgtgccatctctggtagcaggtgccaggtcatgtctggtcgatggtgcttctcctgtttgataaatgaagaccttcctcctcaagcctcacaaacaatgctttgtgtacagacctcagagtgacatgagggatgcatccagaaggtattttctatccttcttggtggtgggatggtcaggaaggagaagggaaaggtgacagcaatgacagttccagacagaggatcmggtggcttgtaaatgaagttccacccatacacaggggcagtgaagtagagcagttagaatgtgacacctctacttcctgcttacttgatcgtgggcaaggtaattgacctctgagtctctattttctcacctgtaaactgaggataatggctgtgtctcccttatgggatcactgggaggatccagtgagataatgcctatcagatgcccagcacagttcctgcacataaagagctcaacaaaggtcagcaatccttgctggttttacttctttagtggccttcaagccgtttccattgttaagctgatggctttgaaactgtgttttaggagctcttgggttcccaggatcatcatcctcatgtcctagggaaagacagtttcaacacaattggtttgtgcctgcctcgttttctcctggtctgcaatgcagaggcacggtaccaggcttgggagtgacacttctgtagaatttgacaaatgtacttccaaacccctgcttgaccacttccctgctgtgctaactccagccatgatactacatstttctgtatcttgctttcttcctaagagctgagtcctgtatatggacagcatatcccagtgtctggcatgtggtggggacacaatatacattcctttctgcaacagagttttgagagctttctgtgtacggggcaccatgtttatactaggggctctgtataaaaatggcaaatgtgatataatatccaccttcacaggattgtgtgtagaccagatgcagaaaaatataaagtaattgtagtgaatttgggatgctgtaggctctgggaggagagatgctgaccctagccttgagaataatgcttctcagaggaagagaatgcccacactgaaacctagtagataaatakaagaattagataaaccagggagcagagagcagcatctgcaaagacttaggtgtaggcaaagggggctttccaggagatatgagtagttcagcctccgataggagcatgagctgaggtaagcaggccaggcccagcccatccagggccttggaggctgcagtaaagagtttgaactttatagggcaatggagagccattgaagggtgtaaatagaggagggacatggtcaggccttctccttctgggccattagaaacacagtccttccgtataaaatgcttggaaaccacttaaccatgttaataaagtaaattgatatttgcaaagatcaaggtaattctttaggaaattacacatcaaaaacatgtacataaaattcagatgggtcagtgtcccaaacctgagcttctttgctaccaagctgtgacagaggtgtttgtagtgatggctttcttcgaagtattagcaccacttttactagattgtgtcttttcttctatgttttcaagtactttttatgaattagttactttttctacacctcagtttaagggtatgaatgtattttatgtactatgtggtagttcaaggcagtaggtgcagggggagtgagacccagggaccagttggggggcccccagctgcttctcccctctaatgcagtttcaagaggcgtgtgatgggtgcatggggagctcctggcattctgctgctttcaccatcttttacctaggaatgcttagccatgggtccctagaagcctggtttttcaaacatacaagtgcttaaaacagcactgagccgccattcagaggacagcatccaggtgccaaatcaaagctcatcttggtctcgggatccagaggccacatttgtctatgtctacaacaaggttcccaatttaactatggagcttttacacaaaataatataggattcatttatttacaggcaaggggaaagtaatgggattttttttcctttgcatttcaaagaactggaatttctgtcaattgagttggcactattttaactagttttttcttttcatttttcccctggcatagaaagtctttcatgctttgttcctttctctttttttgatatttattttttaacagagtaaagaagagtgtttcttgtttaccattgtaccattttgcttctttgtatgactccacatgtagacagaagtaagatgtagttcacatttgttaatgctgcaattgatgcaaaattctgagccatagttacatccaggtataaatggtgacttgtatatgtgtcctcacaagaacagagatgttccatgtgacatttattagtgccaagtgatcctattcttgctttattaaaaaacagcctgggcaacacagtgagacctcatctctacgtaaaattaaaaacaacaacaacaacaaaactagccaggtgtggtgacacacagctatagttccagctactcagaaggctgaggcaagaggatcactcaagccaagcccaggagttcgaggctgcagtgagccataattgtgccaccgcactccagcctgggtgacaaagaccctgtctcaaaataaaatgaaataaaaagtgatatttgcatgaaaaatctcacctgatagtttcattcataggctcatggcaagaaagggaaagggttggaggagactttaacatcttttgagtacttgccaaccactgtgctgaggacttgacctgttttcatgtttgagcgttcctcagacactctctgcgaagtaggagatattcacacttgcagatagggaagctgaggctctgagaggtaacatacaattggcgctctgcatccacaggttccatgtccacagattcatccaaccacagatcaaaaatatttggaaaaaaatatatgaaagaatataaattaaaaagccaatatggtattggctatttttgtataatatttgtataattgttgtataatagttgttatatacagtatcacaactatttaacatttacattgtattaggtattgtaagtaatctagagacaatttaaagcatacaggagtatgtgcattggttatatgcaaacattataccctttggtatcagagacttgagcatctgcagatgttggtattcacaggggccctggaaccaatccccctcagatactgagagacgactgtaatttgtacccaggccttcagctgcaaggggtttatcagagcctctgatctgcgtaccctcccatcaggccatgtggattatgcctgtgccatcccagtcctgggcagagtccccacctgtcctgggctcttccttctcagtgctgtgtgctggggattgtggtgaggaggggaaaggagggcttacagctggtggccccatattcctccagagacaagctctgagtatactttgactgggacctggttaacttatctggtccactcttacctggtccactcttatctgtaaaattaaattgatattatccacataaaagacttgtgagaattaactgatatagtttattcaattaaatcaaatatgaagagctttttaaaaatactatgccaaacattcattttcctagttagtagtataaaaataagaggcaaagtttatatcagtgaaaccctgggtggagattgctttattttgtaaagaaaaaggtaattgaacggtggcttggtcctggaatttccttagcatgctatgtgttctcatgcacagtcatcacttatgagtctcgtaccatccagwagcttcctactgcaaacgcagcaggctctgctcaccttaggcctcgaggaaggccctggattgagtggatagatttcccttagaagctgtctcctcttcacagtaagcatttgcttttaaaatgaatatgaatctcaaatgccacttatcctaatgttggaattagttaatataaaacaatttaaagctctagcagtaatttatgtaatcaaagggaacaagtacttctggctgagttaagtatctcttgcagtcagtacgttttcagtctaactagtcatgatggaaatattctcacgtgagatggaatagccctctgttacagatgagaaaaactcagtaatgatgaggagaatcccagtaaaaaaatgtgaaaccatcattgatgcttttgttttcgtattttcctatcatcatttatgtcattatatataggttgcatttagcaatgttaaaactggcttcagagaaaacttaaaagtttataaattgttaccaagagaagcctgaatgagtcaaattcctgccagattgaggtaaggagcagtgggcagtgagcagggggactgtgtaacagagagctcgtgggcactggagtcatatggacctgagttcatattctagtttcaccactactagatcactttaaacaagcaccttttttttttttatgatggagtcttgctttgttgcccaggctagagtgcagtggtgccatctcagctcactgcatcctccgcctcctgggttcaagcgattctcctgcctcagcgtcccaagtagctgggactacaggtgtgcaccaccacacccggcctaagcaaactcctttgtttaaatcagaaatcagtttctcagaggaaaagggtatggttactacatcacacagtttgaccactttgcacaaaactattcttttgctatcctcttaaaagattcctgctggaaatacctatacataataatcttgaccattgaatgagggtctactaatgtgcatgccactttggccgtgtaatttctaattgccaccactctgagagaggtgcccctgttttgcagatgggtacgttaaggtgcctctttgagccccagactcctcactggtaaaataggtagttgccccatttcataggagttttcaatgaggagtaaataagaaggtacatgaaaacactcagattggtgtctgacacatggtgagtgccaaataaatggaagtgattatcaatattatttaggtgtagaattgatatccttcccttacaaagaaactaaaagacttatctacctaagattgactctgccctcctttttcaacctgtttttatttttctaatgagtgactttttctaaactgacattaacttaaacttactttttaactgagcccggccacgtgagactgttgacttcataaactccttgcaagtgattaggggcggggccattgtgggagctcagagaccagcagtgtgatgattgaagagccgtacccttggcctagacaaatcccacttgaaatctgggcgcatgtggttttgtttaacaccatgctcagccgactcatggtatgggtttgtgaccatcaggcatttgttgttgatatgtgaggtcaccacagtaggggtgtttgtcaaccaaattaaacttcctcttaatgacctaaaataattgatttggaaggccgttaaatgggccagggcaatgtgtaagcaagccgaaatccggcattttctgcacaaattaatgcatgttcttgttctgtttgttcgtgttttgcttttgttggggaaaatgtggctggaccatgggctttttgagcagtcagtgaacctgagtttgaatcccagctctgccatttatctatctgtaatttgggcaagtcgctgagcttctgtgggtgtgtgccttaatatccccatcagcaaaatgaggacacctgccataaagtgatgacaattagaaataatatgaccgaagtgccatgaacattactaggccatcaccctctggtagctattattatgaataaaatatttccaataggcatctctagaagatagctcaacagtcgttttgtacaaagaggtcaaactgtgatgtagtaaccatgccttttttcccccctgctaaactaatttctccacacactactctctgtactaaagttaaacatccagagagaaaagtgtgtttaaaaatggagtctatagatctctctttacatattgtttgattctcagctgatttcaagatgaaattaaagttggacacttaagagatatgccgtttaggctacaaaagaagtaggttttttctttggctattggattcaaacatttatgatctaagttcaggcctttgcaggtaaagcttgggaccaccattctatgtttgtttagaaacaaaggcattgactgggggcttttctgaagtatgatgaacagtggcactgargttttgttttgtggttggaagttatcaacatccctgagagtggtttatgtgtcttgcctaaaatccttccctccataaacccaaatattgacaaaagctaaaaggtgcagattggagctgtgcctagactcctggacacttccttagccaaatataatgtctgctaaaccttggtgcctaggagtccgttgtttccaaagatccagtggtaataaatttatatcctccctcttcagcatttaactgcaaatattttgtactgaccgaatgggttaaattatgaagcttgataagtacatatgcacactacccatccctagctttagaagaagggggaaaaaaaagaaagaaaaagatagctatgatttttggatgtcatcccaatttttaaaaataagagaatttggacattttggcatatggggttttttaaatgaaatttcatggaactgaaaacagtcaattttaggtttccaaaaattgtttagattttcgctggtataaatttgctgcacatggttttggggaagttctgagagatgcatttgggactttggggttggtttttttttttttttttttttgagatttgtgattgagttttaaaaggtgattttcccccctcccccaacctcaaagtgtaaatcaggggagatcagagttccattttctaaggacacttttgggtaatgacatcattatgcactgctgcacaactggacttggggctgagttattgagccttgtttcagcaccatttggacactgcacagtatattccccttccctgcctcggagtgattttggccgtgccattagcagcagctgctggtgataagcaccgggagagtcacctgtgtagggtcaggcttattgcacatcaaggtttggcagtgtcagaagagagggaagatgcccaggagggggctccaggccacctgccgagtgaagatcaaagggttgaaaggtcagagggctcagctcccttaacyrtatctgtctgtgcaatagctatttcagattgtaaatcttggcgatttcattaagtcctcctggctgctactggggcattgaaataataaaattttatatctattgcctttcctgcctctggcagccaggctgatacgttgtctgcaagatggggtcgtctttatgaaaaccttccctggaatgatctgagtagcattaatgaagcctcagattgggaagttggggttcataggacgtcatcctcagcaggagggagggggtttataaataaagaagacccacacaaaccatttagcagccttttagatttgtgtagcacctctcttctgaaaagcaggtcagcaaaatattacctattgctaaatgtttaatcttaggaggaggggtgcactttctcactgctgctgcttattaaatagcccctgttctaatgaccctagggcccatccttttgaataaccccaagagcagctatacaggtctcacttctcactctgcagaccttttgggtgcttttagagacatgtctcctgaatatgattttccaagtatttttcctagatcttaaagttgttaaggactgtgagggctcctaggctcgtgggtaggacaaatcaaagtaatagctgcccctttactgcccatatgtttaagaccccctgtagtttgtttgaaaagttaagagattttcacagtgaaggtgccatttctgaaatttaaagtgttccttttcaccgcaagataagttcactctgattaagtccgtaattctcactaagccatgtttatgggggcaataaacaatgtttcagcgtgcttgttaaattgggtttccaacctctccactctttaaaaattgacatttcaaataaaaggcaggtggagatgggagtcgggctttgcagtgcttagtgatgaatgaatgatggcaagtggcagttgtgtgggaggaatgaggtcctattttatgatagggtgaccccaaaccatttggggactagggaatcaacatcccccacactcccagtgaaactcttaaattcaagttctattgtttcactttggatggatgctattttgaactactgccagacacgttatgctcattatttaattttcataatgcatctgtgctctggtagtggggcccctattttacagatgatgaaatataggcacagagaggttaagtaacttgtccaaagtcacacacataattaggaggagcaggattcaaacacagttatttcattgcatgaagcagtttagtgtgtacaaaagaaaactattatactggccctacttttagggcttgcttgccactgtgtttcagcactctggtaagtctatacatggaggtcacaagagacgtgtggaagtggccactgtcctcagtatttgcttagcaccagctctgtgcctggaaagtggaggaggctgcacagcgaggagaaaggcaccaggctttggggtcaaatcccaagctcaaatcttaactctgatactctatgatctggggcaaattactgtacctcttggagcttcaggttgttcttctgtaaaatgtgaataataaagctcatttcaagaggttgctttgaggatattttaaaataatacattctaaaatataggtaaatataaaatatggtatgttcaaaaattcaacactgctttacaggtaccagtggtaaacattaccacagtgtatgtgaatagcgtaaggtttaaagcagttattttaaggggaaagtgatagcgcacaggaaacatcactaaacaagttttaactgcaggccaaagaatctgttgttcactgtgcttggcatggggtttagagatgacaacctgaggcggggataggagtagtcaggagggttttctagaagagcaggatctgctgggtggcagtaacgtggcgagctatctctgggccatgcttctcatcttatggagtgctctgccatatcatcgcatgtttgtgctttgcagctgtggggaaaggtgttgacacctttcttgtcctctttttacacatgaggaaactgagtctgcagcagtggsaagcctgcttcagtttgagacaaaacaccagcagagtcagagtgtgagtaggctccccactccgttctggatggcagagtggaggccaggctggatggaggttctgtgttggggtggatttctagagtggattgctaggaggactggcagaacccagctcccagaggggggccagctggcactgaccgagcgtctgcttgatggtggactctgtatgaaacatgtgttcccagtgtctcccccaatcttttcaacaaccctgaaggtaaggagcatgacctcggctcacagcaagggaaactggtgctagagaaggctgagtgccttgcctgaagctgcctagctggtaagtgaaaaggccaggaccccagcctggagactttctggccctgggcccaggaccatgtcggggagagaatggggctggtgggtgagtgggaatggtccactggtctgctgcatactactgtgccctttctcagatctacccacagcccatccacaaggagaggcggggagccccttgagttcagagatcatggtttaatcgtctctgtgtccctaagacctagcgtaaagttgacatgaatgacggctccatacgtgatgtaccaaatgagtgagtgaatgaacacccagtggatcgatggccaggaaaggggccattagaggaagagcccctttgctgacctggcttgagaatccctggacttgttaatgagagtcagtgcctgttaccttgtgaggggtggatttggcctgacctgggaggtgcttacaccacttccctcctctgccaagcttctgtttctgtttaaagcacactgggaaattccagcggtgttttcagggctcctctgaactgtcaggcttagatttttaattttgtggagcaggaaggagcaaatcagcgactcttggctccaaagaaaagccactgcgttcatcaactgcttggcagcttggtgacctttggggcctgaggaagggaaggaaaatgtcactcttccctctttgtgtatctgagatttcaggaggaaataaagagtttagaatacctgaatgtttgcctttcctttcctgtcctatccactttccctcttatttctctttcctttcctcctaggaggccaccagcttcccatgctgttctttgttatgtactcatatatatgcacatgcatttgggcacattttgtgcatgctgtgtagtggaaggaacactggctcatggaacccagattcaaatcctttctctgatgcatccagttgtaagaacacgggcaaattatttaatctctagcattgtttcctcatccatcaaatgggtatgattctgtaggaaagtctcccctccctgggaattttagtggagtctgggtcaggcatcaaaatacttaagggcttgattaatctggtatgcctaacaaaggtccgttatattagttgctcagtatgtttgttgattgaaacaatgtgtcagagcaaataatgccatgccttgggtagaataaaggtattgctgttcatctcaatgcctacagccagtgtttcttagccatgtgatttccgacgagttattttacctctctgaccctcagtttccatctctctccacagggacttcatgggaattacattaaatgatacttgtaaggagttgggctgtgggagaaacacaacagctagtggctgtaattttgttgttgtgtgtgtcagtaagatgatggatgcagagcatgtcacacagttcctgatacacacaggcctctgtaacattggctgtggcttggactgatacgtagccataggagtgcagttggagaagagaggcatgtattagtccattctcacacgactataaagaactacttgagactgggcaatttataaagaggtttaattggctcagggttctgcaggctgtacaggaagcatggctggggaggccccaggaaacttgcaatcatggtagaaggcgatgggggaagctggcacatcccacatggccagcaggagaaagagagagagaggggaatgctacacactttcaaacaaccagatcttgggagaactcactcaccatcacaagaacagcaagggggaaattagcccccacgatccagtcacctcccaccaggcccctcctccaacactgggaattacaagagggcgtgagatctgggtgggaacacagagccacactgtatcaaggcacctgcttggaacccagcaacagtcatttagaataaaattttgattaacaagctactaagatgtaatttttggtttaattttagccatattctctccctttaaaaaaaagaaaaagaaaagctcccaagaagtcatacttacaggggacatatagtataatgtcaggagccacatcaagtgtgcccctctcacagagggatcaacttagacttagtttgaacaaatgcaaagcatgttgtgggcatgataataacacatgacactgtgccctctcagagcaaagtgtctttgcaggaagccagcctagacccttcccctttgcttggaggtcccattactgctctcagaggtgctgccttgggtgctgtcttggccatgagagtagatgatgcttactggctttrggcgtcacccagaagagaattttttacttaatcctctcacaaccctatgtaacaagttgttatagacccattttatggataaagaaattgaggttcagctaggattaaatcatttacccttggtcctgtaactaggaattgaggaagataaaatcccaagcccaatctacctgactcctgctcctcctcaggactgcaaagacgtctcagaaggaccccaacaatgttgcagctttgcccttccctggagggaggcagtgcagactgagaagcagtgtgtgtcctggagctgtctgccttcacaaacacattttctaacagtgaaatagaatctcaattgagtcacttctattatagaattattgctatcttgattttttataataataactaatacctagtgcttctgatacaccagacactatcctaggtattacacatatattaactcatttaattgccaaaataacctggtgaagtccgtatttttttgtgtgtgtggtaaacattttcttgaagtgtgagggaaagatgcacccatcctaaatgtacagttaaagctgggcacagtggcatgcacctggagtgccagctgctcaggaggctgaggcgggaggatcacttgagcccaggagttcaagtccagcctggacaacacagcaagacctcatctctcaaaataaaataaaataaatccaaaccaacacagaaacccactaaatgtacagctagctgagtttttacaaggtggacatatacatgtaaccaccacccagatattgaaacaaaatattaccagccccccagaaactcctcttgtaccctattctagtcagtttccccccagcccaaggatgaccactgtcctggatgtcagtgctgtttttatctcattatacagatagggaaactgaggcacaggaagtctaaataatttgcccaaggtagcacagttttaattggcagagttaggattcagactcaggcagtctggctccagagaatgcacttttatatgagacatagccaagaaaagaacaatcgcttggtggtagtttaatttttaatagcatgagagtataataatagagacttattcgcattttcctttgttctgaaaatcagctgtttaattccttagtcttagaactctaatccattttattgacataacttgcaaattgcaaggatagaaacttgcctttaatagccccacatttattgatcactaattgcaatcagacattgtgttaaaatcttcatacctagtatctcactaaatcctcgcaacacagctgtgcagtattatccctattttattgataagaacactgaggctcagaagtaaagaacttgctgatgtttacacagtacagaagcagggcttgaatctggctgtcttgttccagacccacagtcttaatcgctgtgttaactcctatctggctttctgtgtccactgtgaattaattctacactaattaatcatgctaattttacatgattgttatcattgccatcgttattattattattcccattgcacttccttgagcaaactccgatttgctttcgttgagctgacattgtccattcgggcttacattgacatctgctgccaggcagacctcccagtagagtggatctagccacagtcgtttctcattccccagttaatgagcacttgccttgtgtcaggcactgtgctggacactggagacaaataagacacagctctgccctggagatggtcctggtctgaggacagcagaaaagattcactcagtgctggcctgtttactctatgcatgtcacctccctgaaccacacaacctccatcctagagagggtgtcctgtcttgctgcacagctgttggacgagcagaggcagaactgagcccctgctcctcaatgtccagccccacgctcccaacccggctgagtgctgcatgctcctggccactcttcagatcccccggctgacattgccagtgcacacccttgcctttcatcttgtggcttgcttttaagtactaccttttgtcactagctgcccaattccctccttggacaggtaggacactcccccgcaccaatctgtgtgggcagctggtgtggttttaattagtgtagctgatattattttatattttagggaggaaatcccattgttttcatacaaccaactctagaaagtaaggctcaataccatcttggctacagaaaagacaccaaagatagagtgtttatcaaacagaccccctcctttgtatagggaagtctatcagaatctctagggacattggctttttatatttatcctaagagggcttgaattgaaaaagttaaaaatcctggactagatgaaaaagttaggggacagggagccaaacacagccacagatcagaatgtacactgggtggtggccctggggagagtcaccttgtagcgtggcattcattcaccattgttcgcacactcttaccttgtatggttggctatgattttattctgtgttctggagagagtgctaatatgtttatcaacttcattgaggtataactgatcacaacccatccacttaaagtatatggttcaatgaataccttcattggggtatatttatcacaacccatccatttaaagtatatggttcaatgcattttgacagttttatacgatcatgaaaccaccacaataaagatacagaatattttcatcacccacaaaagatcatttgtttttatttaacaaacacttatcttgcacttcccatgtgccaggcactactccaagtactttaaaatattaacccattgaatcctcacaaatctgtgaggtaggtacggttatcatcccccatttatcaaggaggaaactgaggcacagaaagattaagtgacatacccaagttggcacagctggtggatggtagagattaattagaacccagactggctttggatctatgttcttcacctctgggctctgctgcctctcattcattcattcacgaattgtctgctcttgggcaaatattggagtaggagctgagagtagagaaatctgattcccaacccccaaaagccygtagactagggaaggaatcagatacctacctaagtaagtcacagtcaacgtgttattctaattgtgcagataaaccttaggggagcacaggtcatgggaggcttgccgctgcctcagtctctctagccaggcatggctgaggtctaggaaccatccaaggagaggggacgggcaggcaagagaactgatgagtgcctgttagggctattctgggaattatgctgaatcttttacatacattagcttatcaaagcctcacacaactctgtgagataggtggtgttatgatctccattctacagatgaaaacctggaggatttatgcagtcaagccagttgcctacagtaagccccctggtcggggacaagccagaggtgaaatactagagctggtgtcctctcagctgcccctgaccactccccatactacgggttttcccttccctggcctgaaaggcaggggtcaagttcagactgtctgtgacaaagcagaaagaggaagacattcttcattaacaatatatatgggaaagtgccattttgtgtgtgtgtttctctatgtaagaaatgccatttggaaagccagtgtgcatgtcagttttttttttttttttttttttttttcattctgagaaaaagcctatagagtctggtggggggaagggtttgcagctggcaggagctttggcatatgctgtaactaaaaagagagggaatgtgttggtgggacaagctaccggagagctgtctcggtgtgccgcagtactagtaagtgttttaattgggtagggtttttggaggactattttgacatctgctcatgtctttgctgatttttcttcacttatagtaggaaacacaagctgtggataaaatgactttaaaataattggaagtaaagatatctctctcaaagtcgaatttgagagggacactttttaagaagtggaaactaaattccacttctaggaatgcatcctaaagcacaaagctttatgcctacagatttcatgacgatattatatacagtaatttcttcaaaactggaaataacatsccacaaaaggggcttggttgagtttgtttccatgtagtagggcactctgtcgcagttagtaatgatccacgcaaagttcttaattaagtggatcactgcttatatcagaatcagtgagaaaatcagaagtgttaagaattatttcaactggccaaacgcagtggctcacacctgtcatccgagcactttgggaggccgaggtgggtggatcacgagatcaggagatcaagaccactttggccaacatggtgaaaccccatctctagtaaaaataaaaaaattagctgggtatggtggcatgcgcctgtaatcccagctactcaggaggcggaggcataagaacagcttgaacccaggaggcagaggttgcagtgagccaagatcatgccactgcactccagcctggcaacagagcgagactcccatctcaaaaaaaaaaaacaaaatagaattatttcaactttgctttaacacgtaggaagggagaatatggaaggaaatagaccaaaacattgtctccaaatggagggactgggataactgtaattttcttctttaaacttttctcttccccccccccctttttttttttttgagatggagtttcactcttgtcacctaggctggagtgcaatggtgcaatctcagctctctgcaacctccgcctcccaggtccaagcaattctccttcctcagcctcccaagtagctgggattacaggcacccgccaccacacccggctaattttttgtatttttagtagagacagggtttcgccatgttgtccaggctggtcttgaactcctgacctcaggtgatccacccgcctcagcctcccaaagtgctgagattacaagcgtgagccatcgtgcccagcctttcccattttttaatagtaggcatctataattttttttttttttttttttttgagacagagtttcactcttattgtccaagctggagtgctggagtgcaatggctgaatctcggctcactgcaacctccacctcccaggttcaagtaattctcctacctcagcctcccgagtagctgggattacaggcatgtaccaccatgcctggctaattttgtatttttagtagagatggggtttctccattggtcaggctggtctcgaactcctgacctctggtgatctgctcacttcggcctcccaaagtgctgggattacaggtgtgagccaccatgcccatcctattttttatgataaaaaggaaagtagtattttatgtaagagaaagcagtctctgagcatgttgatataactgtgtgtcctgaacagttaggtactcattctgatgtctgagcgatcggattaggggtatcttcagaagaaagtcagctttggggtcagactgtttagggagaccccctgaaactattgctacagaataaaagatgaaatgctcctgattattgtaaatacaaaattgcatgcaggattgtgtaaagacaatgccaggttggactgccaaaatgagccaacagtgtgtgatgtgcttccccatgcagagaacctatgaatggacgtgcagtcagggaggtttcacatcaccaagatgttcatagctctgggaatggaatacgacccttgtggagagcctataaacggacgcatggggggacgcctgtccatatggataagatagggctataaatgccctcatcttgccacggctcttctaggcctctttagggttagggcatactcccttctgagaatttctggtctaactggttgtctagcttcacgtcctgtttccatggattgtttgtaaccagcttttgttgcaattgttactgctgattaatagcttgctaatcataggttacggaaagattgtgtttctgttttaaggctctgttagaaattactgacgcacacactatattgtaaattcttatctctgtgtactctatatactgagccactcagttatgctctgtacttctacatacaaatgctatgttaaagaattacttcatccccatgtgaccatctcaccgcataatcaaatgaccctaaatccctcactaacctacccccgccttcactaaacttaataataaatgctggtatatccagtgcattgttggcaccgcaggaccagaagctggtgacccccctggacccagctttcactatctcgtgtgtgtctattatttctcaacctgccgatccacctgggaacaaagagagagccccgttgcattgcgggctgctggccagatcccgcaataagactgtgttcaaaagttgactgctgcttcctagctctgactttgggcagcttgtttgacctctctgcgcccccacttggttcccatgcagagatgctagtgtccctgactgatggcatggttaagatgagaggcaccggcacctggcgacggtctggctttcttctcatccgcgcttcctgtccccacccccagtttgagtttttcttgcctttcttcattcccctagttgccttgatcctttgggggaccgggcactgtccagcgagctgggctccaattctttccttgggaacagtgagcttcaggaaggcccttgagtccacgccagcccttttggaagaggccttgccaccaggagggcagcattgtccttcaagaggaaactgtgccgtcccagctcctgcctggagcctggtrctcggggcattttggttactaaggggaccctggcctgctaagttagaaaaaggggccaggttttttcctattcttcagcctgctgccattgttgaaaaagtaaacactccacagagcttaaccggcaagtcctccagccaggagtgggaagaaatcaaaagcctattccagcccagccgtggagagcctacaagggctggtctgtgccaytggggcccaatgggagcacagaaacaaggcctgattctggtccagaatcaacatcccattcatggggccattcagccctggaggcttctctccaatggccatcatctcctgctcccttctgtttgggactatttggaaggtcagatgaggcaaagtagttgattctggggtgcacggtcctctgttgtgtcctggaggcatcacgtcctccaggatgttgtgagtccttctctgattctgtttcctgtgactgactgtgcatagcctttgaagtgagagaccaagcaagaaggggccccaaggatttttgccctcgggccattgccactacagccttccagactggctgtggctattgtgtgtattaaaaagtagtaataatagccacgatttattacatcctactgtgtggccagcattgtgggtgtgtttgctctcatcacagcagccctagggggagtgagagaagcagggtggccacagttagcattttaattttacagacgcagccatttaatagacacataaccttgggcaagctacttcttggagcctcagttactcatctctgaaatggggataatggtatctcacctccagccccattgatggaatgaaggcatctgtgtggcagtgctgtgtgagcctgaagtgtgacatcagtgaaaaagagggccattgatgctgtttttgtaccttcctgctagcacactgctgggcatttaacctgttgggttgcagagtgagccagctagagagtcctggacaatcccctgtgaatctcagcattctcatgtgtaaaatggagattgtgcttcatataacaaaagcgctgtaaaatatgaactcgttttttgtatcattaggttggtgcaaaagtacattctttgccattactttggtaaaaactgcaattacttttgcactaacctaatacaatcaaagttgtccattcgctgatatctttttaccctataaataaggcagcaggtaataatgggtgttggggtttggaggaaagaataaactcctacatcggcaattgtgtccctcctctgtggttctcagcccatagtaagcacttagtaaactatgtttaggaattgatggataggtttatggacaagccccagaggcgtggagaagttagtggatagcagaaggagttggaggctctgatggtgttaagtggaaaggttccgggattctgctgcctgggagtgttttttcaatcctasygaggcttgtgaccagtgtggctccaccctcctgctgggaagaatcttgaaatatttacttaggtaccatgttctgccctagaggctgtggtttaagagagtgaatgtcaaccagtattagtgtacacttaccgggtgccagtcatgttgtcagggactggttgttttgcagtggtgagccacagatgagcccctgaaggagcccacaccccagcaggggaggcaggcaggcagagaggtgctggggctcagagtgacaagggctgtgcggaggtcagtctccctgcgggtgtctgacgatgaggaggtggatggtgcagtacacagagcatggcctggggaggcagccaggcctgtggttgcctctgcctcttacctcagcactctgaacctcatcttcctcaagtttcaaacattgagggcaataacatccacttcacaggggttgataagaattaaatgaaataaggtgagtaaagcacagagcaagagctaggaagcttctagtatatgctacttgtccatttccagggcattggaaactggagcttgagcagccattggatgtctgcctctgttgccagcctacaccatgctctggggtgaattaggaaaaggcatctgcccccattccccgactggtgccactcggcaggcacgtgagttggcagatttcagtcctagcttaggtggttggcatctgaggaatgcatacctgcgcagccacatgcagcatgctcagaggttgaccagtaatggaattgatcctttatatgcagtgaccacaggtcccatcgtgtgcctgttgccctggtgtaagatgaggtctttcacatccaaatgtatcccagtttagacagcaaatgataggctctttctacgcaaaataaaataaagacaatagttctaatgcctctgactcaaaaggaatacgcttgatacgtgatggggaaggaggattgaatgggacctggagtggagagtaggcaggagaaacacaaagatggatcttagtagcggataaatagtgtgattaaaaatttaaaactcaggctacaccctgtcttggactcacataggctatggggaattgctgccagattgggggcaggattctttttttctccatattgtccgttcatcccttctcctgtcaccaagcatgaaaaccttgtaggcatgagtttccctcatcttttctattactgtgccagtagaataatggcttatggccagagcttctgagccattactaactggatatctgtggaaaatggaaccaaattgaaagtgtgaccttcctacttggcgtttaagggaagtgttaacagtaggccacacacaatattccatacccaagaatgacaggatccaaaagagagatgggcaagtagcctttgttaaattagggggctggattgaatggggatatcataagaacacagccgtatatcagcattcctggggmcagagcttttgacctcagcgtctgttaaatatataggggaaaaatgatgatggggtgtaatgattcctcttactttctggctatgtgacctggggcatgttactgagcctctgtgaacccttttcactcctgggacttggggatagtcatgcaagctcacagagattttatgagagttcagtgagctaacaaatgtgaacctcctaccattgggcctgctgcagagtaagactttgtcaaatgtcactttccttctctatgcctcttccccagagaaggcaggggaagtgtgtcttgatggcacctcaatgaccttctcttgtggatttttttctccttgcagaaagtcagaaacatggccctggatgatgtcgtgatcctgaatgtggacaccaacaccctggaaacccccttcgatgacctccagagcctcccaaacgacgtggtaggtaatgagcttgcgaggatctcacttctgtgagctcctgcaaaggaaatgaacgtgactttggggaatggggaaggaggggaaatagcgagggttttcctgtgacctgagaactgcagtttgtttctgcattgaaacctttgtctcagtgtagaaagttggaaggtggccaggcatggtggctcacacctgtaatcccagcactttgggaggccgaggcgggtggatcacctgaggtcaggagttcgagaccagcctgggcaacatggtgaaaccctgtttctactaaaaatacaaaaattagccaggcatggtggtgcatgcgtgtaatcccagctactcgggagctgaggcaggagaatcacttgaacccgggaggtggaggttgcattgagctgagattgcgccactgcactccagcctgggtgacagagcgagactccatctcaaaaaaataaaaaagaaatggccgggcacagtggctcacacctgtaatcccagcactttgggaggccaaggcgggcagatcatgaggtcaggaaagtgagaccatcctggctaacatggtgaaacacagtctctactaaaaatacaaaaaattaactgagcatggtggcatgtgcctgtagtcccagctactcaggaggctgaggcaggagaattgcttgaacccaggaggcagaggttgcagtgagctgagatcgtgccactgcactccagtctgggcgacagagcaagactccatctcaaaaaaaaaaaaaagaaagttagaagaaggtttatttcttgagtctattttgacttgaactttcatcagaaagactgtgaagtgaccttagtgtccagacctctcctcttcctgtgggagtctgagagtctcgccagctctccccagcacgctgccacctctagagatcagggcagctccctccaagtaacagcacagaaggcagctggcggggttttcagtgtgaacaatttggggtacttcaaacctacatttttttcctagaccatctagaacatggtagagtatcgggtggcagtgctgtcagtgtagctgtgcaccctccgcattgcactttgttgcctcaggtctacacagaatgtgggttctattgagcaaaaagtagctggctgccacatttgccatgctaacatctgcctatacacctgtcttctgttgctacttggagctgccctgtaggcagctgtgtgaggtagacccattctccccttgtccatgccagtgaggattgggcctcaccggcaagtgtggttttgctgtttctgctttggcctccgtagctctgcctgcaagaagatctatagagttatcctgacttccagagtgaaacgggttgttgttcctggccatgtggtgctcatatgtgtcctggtcggggaagtgttttacctggtgggcattggtgcaccatcactgccagaaggcccagtggcaccctgtgggtagctgttctgaaaggattgctattagttgatgaagtcttgcaggagaatttctttctttttttttttttgaaacagtgtctggctctgtcacccaggctggagtgcagtggcactatcttagctcactgcagcctctgcctcctgggctcaactgatcctcctacctcagcctcccaagtagctgggaccgtaggcacatgccaccacacccagctacgttttgtagagatggagtcttgctgtgttgcccagactggtctcatactcctgggctcaagcaatctgcccatctcagcctccctaagtgctgggattacaagcatgagccactgtgcccagccgtaacaggatttcaaacttctctccacctaactcactgtgagattttgggggagtcatttgtgccctacagcagtgctccacttataattcaacaatggctgccattcactggctcactgcactgagctcccatcattgacctctcatttactcttcatgccactctgaggatggtcttttccttactcccgcttgacccacagagctagagagaggaggagccaaggcatgaactcaaccccgtgggtctgcagagcccacatggcccctctgccctactaggtgtcttctgcgtttaggatgtcattcatcctgaatgacagttagtgttgtagccctttggaacaggtgatctctcctttctacagagaggagagaacctcagagagcacgtgccttgcctgaaatcctgtaggtgattaggggcacagctgagattggacccccagtctgtgctgcttctactctatgtatcccgcctccctctgaggcagcaagagatgacagaacttaggaaaatttaaagtgtcagacaggaatgaggacctgtgaggtgtgagaatcatgtcaggacagggtagtacatggttggtaccttagggcctactagctataatttgagttcttttggtccaaggaatctgaggctcccatccctgtttcctttcagtggacaagcacctcttgaagccatggatatctcaggcatggaccaggcaaatgcctagtgaatgtgggaagtgaacctgaggtctgttaggtgcaggaaatggccaagggccctggggcagcatgagatgagtgactggcagctcagaaaccatggagtggactgactggtcccacctgcactgctctgaccctgtgctggcactgagcagcaaagagaaagcagatcttcaaagattgtatgtcagtaaaggaaacagatatgtcaattacatatctattacagtatagcataatagagaccacagggaaataggagtcgggcacagaagggcccaggagagagagtaacaaaattttggggaggataatggagtctttctgaagatggcaaattccaagatgccttttaaatgacaaaatgaggtagcctcagggaaccaaagtaacttgggtgagttattttccctctttgagcctcagttttccacattaaaagaggagtaccaggcttgctctgaggattattatggcaaacagctatggtaatgattatcaaatgcttggcacagtgcttgcatgttgtcagcattcaagaaatggtacctgcatttgtttttaataaaattgttgctgataattataggcaagattggaggacagttaataacctctatgtcctgacagtctcagcgtgcacaaatgggacctcctatatgcaagctggtttgtaacagggttgagaatgttctacagcagtggtttccagcttgggcctctatactcattaaggattctgaagattgtaatggggggagatgtggtctgtaaggtatttattgtatttcaatggaattcacagctttgattctgtgatgctacatgagctatcaagaggagaaatcgtgccctgcctgtctttgtgtcccctgcatttggcataggacctggtaattttagtgtatcagcctatccatcgttgaccttaaaatctcccctttggccaaagttgtgtgtttactctgacagattctgcttcttaaacatttggtaaatccacatcctcttcctcatccctcctaaacaccacctaatctaagcttttattttccccctgcattattaccagcagactcaagactggctcatctgactccagcctcatccctccaatctttccgcctcatgccccagagtgacctttctaaaaacataaastccatttcccacctaactaaaactattccatcagtgaatgtaatttttcaaaaaaacatttaaggacaaaaaaattctcctataacttcccattacctagagattcaaggcaacttccctttgttggctttgaaatcaaacagacctgttttcacatcctggcttcctcacttcatgtccgtgtgatcttgggcaaaattacttaagctctctaagacttaatttccacataaggttgtttgagaattaaatgtaatatatataatatatttaaaacatatatcctatcagcacaatcgacagtagctgatgatgatgaattatggatgtgaattatgatccgcagggcattcagccctccttcatgatacccccctgtttttgtttctccatagctgtagttctctctcctccctgctttaaactctgtactgtaggtttttagaactgttaatggttgtcccaaatttacatgttgtttcataacttcatactttgtatgcagcatttcttttgtcccagtgtcttacctcatctattaatctctcactcattcttcaagacctgctctcaagtatttaatcacacacacacacaaacacatgcacacacacacacacaaacacacactgaatcttttctgaccttcacgtagatttgaccatatctttctctatgtccccacagccccttgtgtaccttgtgtaattgtactgatttattgcccatttcccttttacttgtcagttttttggagtagcagtaattgagttttattcatctttgttttccaagaatctagcagccactgaatagatagatggaaggatggaaggcacatatggattgggttattatggtagatgaaatcttgtaaaacatggcatctacgctggaaactttattaaaagaggcttggggccagacatggtggctcatgcctataatcccagcattttgggagtctgaggcagaagaattgcttgaggccaagaattcaagtttgcagtgagctgtgattgcgccactgctctccagccatgatagaataattggaactggattaatcctcccacaatttaaaactctggacaaatatgaaaacagctgttttcacatgttggacaacagacaagacaagattgttatccctgagtgaaaggaagccagtgaggtgaggcctactatcccactggctttctgccttgaggcattttctggatattggtactagaaggggaatccccagcaaagcacaacagtcttggggagctgaaagattaaagaacagtttgaaggggagatggtttacatttgcaagtgagagtatcagacaggagggagctactcagctgaagagctccagaaacctgaattgacaaacctgctgaagactaatctgcccatatgtagggtaaaactcctgacaggaaactataagatgaacagttctcagagctcacacaagtctaggaatcctgcaggttctgaccaaccagagtcagagatcttgttggtcattcaggacaatgataagagacaccagtagggcatgacttgatagtacatctaaattagctataaagatcattttagccctgccctgaaagagcttaaaattaagctttgagaggcacaagagagggctttaggggtcctaaaatgtgctggattttaatctgagtgccagttacatgggggtgaattcgtcaagctgagcaccaatggtgtgtgcatttttatgtgtgtatgttaaacttcgatgaaaagttttaaacaaacctatttctttttaaagaagtctttaaaagatcaatctgatgtgcaagaaatctaaccttgtgtcaaaataaacttcaaccctctttaaaagaaggcaacacaatccaatattcgataacataacattcacagtatctaacatcttattttaaaagtgcaagacatgttgagaatgaggaaaatgtcacccctaacaagaggaaaattagtcaatagaaacagactcagaagtgacagatatgatagaactagcagataaagactttaaagtagattttatgaagactataaatatgttcatgaatttaaaggaagacctgattaaatgaagggagaaatggaagatatttaaaaatgaaagggaacatctataagcaacaaatacacctagaatgaaaaaaaaatcacttatgggattaagaggatatgagataccactgaataaaacatcagtgaatttgaagatatagcaataaaaactcctcaatatgaagccaagaaagaaaaaagactggaaaaagttaacaaaactcagtgatcctatagcataatatcaagagggctaacatacttgcaactggagtcccagaaggtaaggaaggtgaggaaagacagaaaaaatattttaacagattatagctgatttttttttcaattttgatgaaattatactcagagctccaagaagctcaataaacctgaaacacaatggacccaaacaaaaccacacaaagatacattttgattaattgctcaaaaccaagaaaagcttaaattagccagagagaaaaaggtatgagaagtaattctagcagacttattgccagagaccatttaaggcagaagacaatggaatgacatttttaaagtaatgaaagataatttttatcaacccagaattctatatccagtgaaaatatccttcaaaaatgaaagcactgaggcaggtggatcacctgaggtcaggagttcaagaccagcctggccaacatggtgaaaccccgtctctacaaaaattagccagtcatgatggcgggtgcctgtaatcccagctactcaggaggctgaggtggcagaatcgcttgaacccaggaggcagagatttcagtgagccgaggctgccccactgcactccagcctgggaaacagagctagaatccatctcaaaaaaaaaggcaaaactaggactttttaaaacagatacaaaattggagaaatcattgtcagcagacctgcactacaaaagaagttcttcagcggggaaaaatgatattatagggaaatctgaattgtaaggaagtgaagagaaccacagatagtaaatatatggatacatgtaagaaatttactttctcatttgtaatttctaaaaaagttaattgagtatttcaagtaaaaataataccagtggaggtattctgctggtaataataccagtagggggtggagaatagaagtattctgtttaaaggttgttaygttacctgtatacaaaaactggcataatattatttgaaggtagactgtattaagttagagatttatgttgtaaaccttacaagggccactaagggaggaaaaaataagacagagatatatagctaataagccagtattgaaggtccaaaacattttgtggggaaagagtaaacatgacaacagatggaacaaatagaaaagttagcaagatgatagatttattcaactatgttggtttttacattaaacatacattgtctagacactccaatttacagaggttattatataaaaaagcaagacccaattgtataatttctgtaagaattctactttaaatatgaagagtcaaatagatgaaaagtaaaaggataaaaaagatataccagccaaatgctgatcaaaagagagttggggggcagagaaacaaatcatccttatacaagtataccaaataatatttgtaaagactgtcctgtccagaaggggcttaatcgccccttgcccctacttgggtgtgggctagaatgtatttattcctaaaaaactgtgtgtgtaaagagaaaaagagtaactttagtggagaaactggcagacactaccttaaccaaacgatcaattttaacatcaccagtgatgtcatgtggatatcatataaccactgatgtgatgtaatgaggatatttcacttctgtggtattctttccaaaaatccactctaatcatgcagagacttctgagaaattcaaatttgggaacattctgcaacaggggtctccaaccccygggctgtggattggtgccagttcatggcctgttcggaacccagccatacagtaggaggtgagcagcgagtgagcatgaccacctgagcactctacctcctgtcagatcagcagcggcattagattctcaaaggaccatgaaccctgttgtgaactttgtatgcaagggatgtaggttgtgtgctccttatgagaatctaatgcctgatgatctgaggtggaagagtttcatcccaaaaccatcctcccttgcacctctccaccacccccagcagtccatgaaaagattgtcttccatgaaactggtccctggtgccaaaaaggtcgtgggactgctgttctacaaaatatctgaccagcatttctcacaactgtcaaggtcataacaaaggaaagacaaactgttctaaaccagaggagactaaggagacatgacaactaaatgcaatgtaggatcctggattggatcttgggatagaaaaatggcatgaatggaaaactgatgaaatcacaataaagtctggagtttagttaatactaatgtgctrttgttagtttcttagttttgacaaatgtgtggtggtaatctaagatatgcaagcttgtccaacccaccccactttgttgttgtggctgttctgttttgttttaggcttttagcagcccaaagccatagcttttagtttctctctctagtgataagtggaaaagagggatgaggaagaggctttgccggcccaaccagaaacaaactaagaacccatgactgcattctctccctttaacacccctgtttaggggaaactgaaactgggtaaggagaatatgggtcctctttgtactatctttgtaacttttctgtaaatctaaaaatatttcaaaatgaaagttcattttagaaaaagaagggagtattatgaataactttacaattttgacaaattaggtaaaatgaacaaattccttgaattacagaaagtgactcaagaagaaatagaaaaatggcactatttctattaaagaattttawatctgtaaaactttcccacaaagaaaaccctaggcccagagagcctccctggtgaattctatcatatatttaagaagaactaacacaatcttatcaccaactttttcaaaaaacagaagtaaaaggaagatgtctcatcttattttatgaggtcagctttaccccaacttgaaaaccagataaataatttacaaacaaaaaaaaaaaaaaaaaaggcaactacagaccaatatagatgcaaaaatctttaacaatatattatcaaattgaatccagcaatatataaaaaaggataataaccttttttaaaagatgtgaatacaggttggctaaatatttgaaaaaccatgtaatctattatatcagtaaactgaaaaggaaaataataacaagatatatgaaaaaaaaaatttaggaaaaattcggcaatattcatgataagaactcctagaaaatgaagtattctcactgtgatagasagcatctagaaaagacctacagctcacatcatacttaatggtgaaagactgatttctttcccccgagaatgaaagaaaggtatctgctcttcttatttctattcaacattgtactggaggttcccaccagttcactaagacagggaaaagaggtaaagccttaatgattagaaagaagtgaaattctctttattcagacaacttgatcgtgtatatggaaaattctaaggagtctcataaatgaatttagtaagggtgcaggataaagtcagtatacaaaaatcaaatgtatttctatatactagtaacaagcaattgaaaatgagattttttaaagtaccatttaaaatagcatacaaaacacaaaatacttaggaataaatttaagaaaatatgttgaaaatttgtatcctgaaagctatgaaacatttctgaaaaaaaatttaaaagacctaaataaatggagagctattccatgttttggattggaagactcaatatttttttactcaatatttttaagatgttaattttccctaaattgatctatagattcaatataatcccaacccaaattccagatggctttctttttggtaaacttcacaagctgattctaaaatgtatatgaatatgcaaaagatctagaatagccaaaacaatgttgaargagaagaacaaagttgtaggacttatattacctgtttgcaagactcactataaagttacrgtaatcaagacagtgtagaaacacatataaatcaatagaacaaaattaagagtccagaattagacctacacataagtggtcaattgatttttcaacaaatatgccaaagtaattcaaaagggaaagaagagggatcttttwttccaacaaacgtgctggaacaactggatatctatatggaaaaaaaagaagccttgacttttacctcatgcaaatattagctcaaaatagactatagacctaaaaatagaagcaaaaacaatcaaatgactagaaaaaaaatatgagagggaatcctcatgaattgggggtaggcaaaaatttcttaggacataaaaagcacacatcataaataaaaaagtgataaattggatgtcatgaaaggtaaaaacttatgctccccaaaagcatcatttaaaaaatgaagaggcaagccacagacaaaatgagataaaatattcttaacacttatacctaaaaaaggacttttatccaaaatatatttaaaaattccaaaactcaatagcaagaagatagctcaattaaaatgggtaaaatatttgaagaaacacatcacaacatgcacatgaaaagatactccgcatcgttagtcatgagggtacaaattaatgtcacaacaaggttctactgcatacccactggtacggctaaaataaaaaggctgaatttcttatagatgtatattttaaacatatgtttactgtatgaccaggcgatcccacacctaggtatttgcccaagaaaaggaaaacgtatgtatgtgtatgtttttagcaacccaaaccagaaacaatacagacgtcccccaactggttaatataaaaacaatcagtggtatacccataaaatagaaggctactccacaatcaagaagaagaaactaactactgatctattccacaaaatggatgaatctcaaatacattagaagtgacagaatccatttattttgtattctggaacaggcaaaactataaagctagaaacagctgagtggttgccaggactaaaagtggaacaagggaaatttgggggatgatggaccgtctgtatcttgattgtggtgatagatatatgactgcatgtatctttcaaaattcttagaactattcactaaagatggtgaatcttaaggtatgtaaatcatacctcaataaacctgactttaaaattatttaaacactggcaacaccaagtattgtcaaagatgtggaagcatttatgtggagctttcatcacggctgatgggagtacaatacggtacaaccactttggaaaacagtttgtcaatatctcatgaagttaaacttacgcctaccatacaacccaacaatcccacacctggctattcacccaagagaaatgaaactatatccaaacaggcttgtacatgaatgtttatggcagctgtattcatagagaacaataactgaaagtaaccgaaatgtctatcaaatggtagatggataaataaacaatgtattatatcccttatgtttatgtatttactcagtattctgtagtaacaaacgtttgatacaccaagcaacatgaatgaatcttaattcacactgagcaaaagaaaccagacacacagcactgtaggatttcatgtatgtaaaaatagaagagagaaagctagtctatagtggctgaaagcagatcagtggttgccttgggctgggatggaggaggcagggcctgactgccaaggggcaccaaccaaccttctgtggtgaaggaactgttctgtttcttgattgtggaggtggttacacacgtgtagacattggtcaaaactcactggactgtgctttttaagtgtatgcattctattatatatcagttatgacttagttaatttttaaaagtagcagccttggaaattaattttaaaggtggagttccaatattaagtagctttcagaacaactctgctgatttttagatgatttatgtacatgagcaaagggttactttggaggcaggatggctcggctttgtgctagatgcctagacaatttagtctcaaatgtataatcttgtctgagttagctttgttttaccctaaaaaaaaaaatgaggttggcaaggttaatgccttataccttgctatgttccatgaaagttgccaaagtagtgttttcactgacaatattgcattgttccctagctatggattttggaggaaaaatatggcaagaatactccttcttttagatctaaaggcgtgtttacagacttcatgtttatctcaagccctggccttctccacgccatatttctttaaaggcccagaaccctcagactctcgagatattctacagggcttgtaggaactggtgtgtgatctttccctgtgagtcaacaatgcatttgattccagaagcgagggactaggcctttttatggacttgatacttctaccctgttaatgcatttttgttagtattttctgatagagtgtttattcattcagcaggcatttcctgagcacctactatgtgctaggctttatattgggtataatgagtatggaggtgattaagacataacctttattctcagtgaggtcccaggctggttagtagaaaagctaatgcaggctggactgccagtcttgcccccacttctccagtccccatccatcctccaggctataaacaaaggtgtattacagagcatggagaccactccccaactgaaaacctttagtggtgcctcatttttctcttggtgaaattcaggctccataatatgggcctttgtaatccactttctgcccatctctcctacctcatctcttgccattgctcttctacccatttatactttttactgacagctttgcttccatacacaggagactctggatgtttctagttcagagtcttccagatgggcagatctatagccacttcaggtatggagattatttgttcattattcatttagccaaagttttttgggtgtatgctcagtgtattgagccatggggacatggaaacacttgagaaacagtcatccttcctggaaaggagcgatgagcacactgggggatgagaactgaatgcatggaggttggaggtgtgaaccaggaattaacagtttattacggctagaacatagggtgtgtggttgggagggacaaaagatgagacccaaatagacaggagggaccagattgggaatggtcacaaaaacaartttggacttcaagtttggggcagtggggcatctactaaggtgattaagccagggaatgatgtgataaaattcatgctaccaggagtcccagactaagggtcgagtgttggatcccacctcttgctgctttgctggttgctagaatctgaccaaagctttcccccaccccacgtctactgatattggacttggggtcaggggacagtgtgctagagagaattyttagtagcacctgtgaccagcatccagtcattcatcccttgtgcttttcaggagttgtttgtccatccctgttctgtcttgggccacttggcgacactgtccatgctgtgacttgtaaatttcattcattcaggaagagagcatcgtgatccagtgagccttgccctaagcgtgtgtgtatgatttgtcaacgatcgaggattttatgggagtttatgggacttcattaaagatgctggagcaggagcactgtgggacatcagaagagacctcagcaataaaccacaattccaagctttggaatgcagtaaatgtttaagagacttccttcctttcattactgaattttactttactttcataccagtaaagagttgtgttttattggttgaaatttcttgattctgtttttcccaggtctgtttaaaagctacattttatctttgaggatgtttggctcgtggtggaggaagtgctgccagcgaattcaattaactggcagagctcacagatattgtacacggatttctttttttcttctttttcacaactgctacataaacacagctgggtttaatatttgtcgtaacaaagatttaacttgaatcattttaccccgggtaattaatgcttggaatcttggctactttttcgttcgtttgtaatcctctgcatttctttactctagctatctagataatgaagtgtgctcctctaggtctttgccctgccttaaaactgcttaatatttggccgttcccactagagagcagatgcttttctttgcaagaattgaatttctgtcagctcttttatgcatcatgtgtttggaactgtaagtggatcaagttgttcatcacagcggggacactgtgaaacacatctattatacacacttcccaccccccttcctgttttgtttttttttcctcccctgaggaggtggagatgcccggatccccttgggagatatctcgctctgtgtggatgtatccatgtgatccaccatgaatccggcctggccacatccctaagcagggaaatctgtatccattcagcccaggattgtggctgagacaaaccccacttttatctttgtaaacaccaagctcttcattaactcccaaatacacaccaagtttgggtcactaagtaaatccactaggctcagcataatgagtgacatttcagtaattgatgccctagaatatgttmattgtgaacccatgattcttttcgatgctaaaataaaggcttgggtagttttggctttggagttgagctagcgcagaagaatagtcaccatcgattaggcccctacagtgtgccaggcactgtgctaggggatttgaaaatcttgacatttaatctacataagaatcctgcaaaaaaaagaaggggagggtactttatcccctttttatagatgaagaaaaggggccaagtaacttgcctagaggcatccagataattgccaggaggagagccagaatttgaactcaggtcgggctgagcccagagtaaatccatgtactgtaaagtgtggtcccctcatgcctagaggtcactagaatatattcatccattgatcaatcaagacattgatttattatgcatgtttatgacatgctgccattgctccatctgagttgtctcattccatgtcaggtctgaagtttggttggcatttgtgaacacctttgtactcatctaaatctgaactcctggtggtgactggaatagttttagttttgcttttctctcaaagctcagtgcaaatacaacccaagtgccccaagcaacctactgttttcttagagttttgtgaatttcaatttctagctgtgaactgatggttaaaatttctacacctctatggtttagtttgttaacacggctttagggaagcaggcatcttggtggcattcctgctgtgatatgctcatcttttgggcctcagatagtggctctgagggcagaagtgcattttggttcatttttaatatatgtcattcaatttgccagagtcattgtgagacattcacatgtctgactgagatactgctgatctgtagaattaattatagttaaatggaaaggtggcttttgctcatgaagaaagtcgttagtctcttgataaacatttttaattatgattaactttagtcttcctccaaatactttccattagaaaaggcattaatgttctggttcattagaaatagagcaatccttttatttttggtttgcagtccattttgttcttgaaagatattggtccacttttttaaaaaaaaattggtggatgttgtgttgtaaaaaacatataagtttccttttgcaagtgcatatcagttttttcaaaggtaacttacactttaattttgtgtgttgtgtttgcaagagaatgcttcttggtttattcatgttgacaactgaaaagccttagacctaattaaaagaatttccatgagcacctttactgaaccatttcattacgcggcactgcacagattgcattgtgaaacatggtgatagtttaaatctgacctttaaacctgaactgccagaagtatggggggaaaacccttctttgaaaacactccccggataaatatatgtgtgtgtatgtgtatgcatacatgcatgcacatatttggttagaagcaatctttttatggaatgaccacctaataatataaatacacatttactttgagctcagatcttgtagtctcctgtagcttgggtaggattttctagctacattaattgtgtgtgtgtgtttgtgtgtgtgtgtgtgtgtgtgtgtgtggtgtgttaaagctaaattgttgtataaggaaaacaaagataatttcacttactctgggccaacaaaaaaaagtatttggaggaaggtaaggtttacaaatagaaaaacacaaaagtcttcactactgtgtgtttcagtttcaaatggtgagatactcagattaatctcatggggagagggctggagtgtatatgtgtgggcaagactcctcctgagctttatttggcagatagtggaaacaggccttttttggttttgttttaaaattgcacttttttactccaaggatgtcattctaaggatttgatagcttattcctgggatgctcagcagagccactatagcacataacgaagtagccattcacataatgataattgatgcttttgtctgacaaaaagctgcctggaattctaactcttgccactaactttctgacatatacacagcccacaagttgtcaggggagagggagggagcagagacccgggctcgtagggtcatagccagctccagcatggaactccacataaatagcacagccctcactcccccatggagaaccaggatctttgaggggagaatgggatgcagaagaagcaattaaagccaactgaggtcaaggtacaaccatgttctcaagaaagaagcaggaaagcaaggaatgagaggaaacaataatggagatatattaaatcagggaaaaaataaaccagtatcatggacatatctaatttggtggtctaagaaaccctggcagcagtgagaatcaatggactagcacagactctggagtaagacagacttggacttgactttggcttccacccttgccttactgtcagtgtgatgtggaactgggtcttactttcctcatctgtgtagtggggatagctgtgcctacctaggccatttgttctgaaattttaatacaatactggatatgaaaatacttgtcattgtcatttgggaactagtagggtgcttgataaatactggtttctgttcctttctcctgataaatttcttgttcttacagaaactattcctgggaaagagactagggtgttattgctttgacatattaagactttttgttttgaatttgaggcaagaactaaggaaggcataggtagatatgcttatgtaatggaagtgacagtttgccatttctcattgccagtgtgaaagtggcagagggagccaatgtttttgtgcccctgaggatgggaaaacaagtcactaatcctttctcccctctccagacgcacacattccctatgggactttagaaaaaagccttgatgcctactttatccaggtaaggaagaattaatcaacttgccttagtccttaaaggggggaggaaaatgtgactctgttgcccctccacacctgctgctgtgtgtctaatttgtaataataataataaaaaatctttcaactccaactgtgacacccagcagttaatgcaactcccaggaaagagaagcagtacctgcacagactaacttgagccgggcttttagaactgtacctctcaatgaggtgcgccagcactgagggtggacatggttcctcccttcctagactggtcagtctaatagaagagacagacattaggccgggtgcggtggctcacgcctgtaatcccagcactttgggaggccaatgggggtggatcacttcaggtcaggagtttgagaccagcctggccaacatggtgaaactccatctccactaaaaatacaaaaattagctgggcgtggtggcacatgcctgtaatcccagctactcaggaggctgaggcaggagaattgcttgaacccaggargcggaggttgcagtgagccaagatggtgccactgcactccagcctgggcaacagagtaagtgagactccatctgaaaaaaaaaaaaaaaaaaaaaaaargaagggacagacattaattggattcttgcagaatgcatcattatacattgttgtgtgtccctaaatgaaagacacagtgagaatgtataataggggaaccttcgtctagcctcagcagttcaacagaggaagtgatatttgaactgagacctgaaggatgagtagtagtcaacctagggccctgtgttgtccaatatggtagccactattcacatatggctatttaaatttaaatggattgaaatgaaatagaataaaagtttcagcttctcagtcacaccagccacatttcaagtgctcagtagtagctagcatattggatggcattggatagaagacagattatttccatcactgcagaaagttctgttggacratgcagaattctaggcaggggggcaatggtgggtgagagcactccacaccggaaataacctatgcaaaggtcctggggtaagggggaggccagtgggactggagcccagtgtgggtggctaaagccacaaaggaggatgcaagagcctctcatctcagagactggccaaatcaaacggggccttccaggccaggctagggctttagtctttttctccagagcagtggagaagagctgagaaatcttaaggtgccagcattgatggaaagagatagataggattgtcttagaggtgaacactcaatagtmtgccatccactcccaggccccagaagttgcaaccaagtgataaaggaaaaacactctacttgttgagcactaatgtgtattaaaagggtattttcattctcctggggagaaagacatgtaaactgctggtatataaagggctaaagaataggatgatggtttatacaacatgagaaccccttctgaagtagcagtaagctaacttgtagccgatttgtaggggctaaactggaagtccttgggagacaggccctccctcctctgcagttccgtttccagcacatctccagcatgggacctgcaaagattaggaatcaacaaaggaataggccatcatgccctgagaaagagctatttgttctgacagaaagttggaggcttgtattttttaataaaaagtttgttagagaatacgataaagaatatcccaggtttgcgaatgggttttgaggcctttgaaatcaagtagaagacaaaggtgcaaatggagcttgagccaagcccataacaggccttaaatattgtgctaaggaatttagactttattatattcacagtagggagccactaaaaattttagagggaatgacatgatataacctcttgttttaggaaggtaattcaatgcgaaggatgaattagactaggaagagaatagaggaagagatacgagctcaaagactgttgtaatagtactggtaaaagatgaatctaaactaaaaaaagccaggcactctactacatccattcttcattttatatccattatattttactcctcacaatgtatacatgttgtacatacttcattttacagccaaagaactaaagctcagaaaggttaagaaagtagggaagccaggtccagcgaagccaatcttagacctaggcttctgtgattcaaactctatgttttactgcctgaggagtgcagtggggacagaggagtagatgaagccaggggacctgagaggttgagaacagtgaccagtgaaaggaggaacaggggtacacggtcgggtgaaggcagggccggggcaatactgtgtgtgttactggatgtggtaagtttgtggttgtataagaccagtctccttgttccctctgactcattcagcatgcagatagatgttcatttctcctgccattgtggttgtgtcttagcaatggcattctacagaagaggaatgaatatcactttctcttcccatcctttccaacagagaccagtttcttctaatgatccgtcactaaagaatgtgatcctagactttcctccaagcagagaggctcagccactgaaaatgcctttcacaatgtcaagcacttgctcattcgttctttcatttggcagaaagtactgcatgagtacactgagtcaagaactgtgctggctgctggccctgcggggaactcagtccatcaggaaaggaggtagaaactgcagctcaccatggaaccacctgctcagtccaaggaggcccagacttagtggtcagggcaggcttcacagatggggggacatctggattccctctttcccttaacccaaggcaatgggtaatttgactattaaagaaaaatacctcattttaattctttattataaaagtaacatatgcttttttataaaggataatcaaaacaatcaagtgtgtaaaatagaaagtgaaagcatccttgcatggttaaagtttggtaatgtagcattttagatttttactgcatatatatttatatataatttttaaatggttcatgctgtacatgttactctgcaacctgcatgtttttcctcactcgacagtatttgacagacatctttttgtgtcagttcatagagtaccgccatgtcctttttggcagctatgtgatatttcctggtgaggatgcgggataatgtatttcagaggcccccattgatggagacttggatggtctttcagaggctgaatagatgttcacaagcaggacaggaagggacaagagacagccaggactgagctagtgacatggaaatgggctgaagagtagcctgtgcttctggacatccaagtttaacattaagtggggcaggtggaagtgaggctgatggaggacagcctgcacagtctgctcgtggaagtttggatgtttttctgaaggtgatgatggtgaagggcgggggcaccgaagggttttgatggaggatcaaagtgattggatttggatttttccaagattactaggacagatatgggtgaatggcattgaggagaaactgaaggcagaagaaggcccactgaggaamccgctccactagtctgggccagagagggtgatggagctgaatttgcagggccaatgtcatgggcactgagaggagaggatggattcagggcatatctgggttggtgttgaggagatgtggagaatgtttgtgggaaggagggagaagtagggaatctgacatctgacgcctggcccaggagactggccggatgatgctgcggtaaccaagatggcacacagaggggaaagggcgtcttagacagaagctggcaagttcagttttgccccctctttcctttgccttgtcttcctcctataacacccgattaaaggaggaagccatcctcaccagcacttacaacacacccaaattacccctgatgaatcccgatgttaatgatttgaccagcacccctcggggtactgagggcaagttcagctttagatatatgactctgtgttgtttaaacctgaaattgtcttcccttacttttatttaaaggacaaatgctactccccagcgatcagatgcacagatacttgcagtttcaaagtttgaggtgctggcaggtcaagacaaaagcttctccatgtttcagggtgacaagaggtcttcagaagtcctggcctaagtggtcacaggggcatcaggagcccaggaccacttggctagtttcagaccagctggggcaggcaggaaggracacactcgtatttgctcagttacaatcaacgactccttctttgtgtaaaatggtaatgaggccattaggagaggctcacctgaagtgcagcgttgtgaatccaaggtaattaaacacctcccgaatgaaagagaaaggccagggaaggttaagtgaggaataatctgcggcacaggtggcccaaggcccttgaggagccagaaggagagcgacagtggcttgcaccatttcaaaggatggaaatgtcactgtagtccctgggaggggaaggatttttatttttattttgggggcaggggcagggagtgggtagtatttttagcatgttaatagagcatgctgctttttcatacttctctttgtaggtggaagtccatggcagagtcagcctgggtgctgagtggcctgcattgctcctcaggggctctcatcactgtggggctggggcttatgtgtccttgataaggggaggtcataataaatcagttatagatacccggatgttgaggtagacttcaaactgcttccaaaggaattgttttccatggtcccctcttggagtagaggtgggataactaccccctcagtgtatgttcccagggctttttacttttcctttttttttttttttgagacagggtctcactctgtcacccaggctggagtgccacggtgcaatcatagctcattgcaacctcaaactcctgggctcaagcagtcctcccacctcagccttctaagtagctgagactacaggcaggtgccaccatggctggctaaatctttttatattttttatagagatgggatctcactgtgttgcccaggctggttttgaactcctggcctcaaacgatcctcctgccttggcttcccaaagcgctgggcacgtccccatggcttctaacttatcagaggagggtatcagtcccatcttcactcagtttagtgtccaaacatgaggcacgccctttatcaacagcaaaggattgttttcctgtacacagttcacatttatgaatggcttcctaggcactgagcactgtgcttggtgacttcatgtatccttccagyttgtcttcattgcataaggtctggcagaggatttttgcttttcagattgtcacctcaaaatttccattgtctccacacaaaagcttgcacatgaatcttcgtagcagcattattcataacagccaagaagtagaaacagcccaaatgtccatctgcagatgaacagatcgataaaatgtggtctatccatacagtggaatattatttagccataaaaagtatgaagtcttgacacaatgctacaacatggacgaaccttgttcataaaagcactgtgctaagggaaataatctgatggcaaaagactacctattgttaattccatttatatgaaatgtccagagtaggccaacctgtagagacagaaggaaggtgagtggttgcttgggtctggtgtgggggaaaaattgataggtaatggggagtgacagctaatgagtatgaggtttctttcgggggtaataaaaatgttctggagttagtagtgatggttgtacagtcttgtgactacactaaaaaccaccgaactgtgtactttaaatgaatgaattttatatgtgaaatatgtctcaataagctattaaaagtttttcttatcagaagcttgggtacaagacctaatgtgcgtggatcatttctaaagtatgatctagtccttcccaggtcggatttttttttccccagacttctcagcaagtgattcttaatatttctagggtcacaggcacctttaggaatctgaggaaagctgtggatcctgcgcccagaaaaataatcttcactcattcatactaaaaatctgtaaaggattcatggaccacctaaatctaattttctattttatcctaagttttgtctttaaatgatgtcataccagtagctggtctcttacagaattagtttctgtgaaacgtgctcttgatatgttacctgcatgcttaaaaccaatcattagttttctgtttctctctcaagatgaaggaaaaaaatcccttcaggcccctgcctttctctccagcctcatttcaagccatattcccctcattttcgccaccgaagccagggttctttctgttccctgaactcttcttcgctgcagggcctttgcacaccactccccgtacttagcacgcggtgctcacccctctttgctgagttaaccaccctcacccatccttcagatcttagtgcaagcttgttgccctccaggaagccttccttgaccttcttgacaagctctgttacaggctcgtcacagtagcaatggcacatgcattcctgtttttctcactagaatgtcagctgaatgagggcaagacccacgtgtggtttcattgtatcccttgcattctcaacacctaacatagtcctcggtacataggaaataataaatatttgctgagtgaatggataactcgaggtcaccacgtcgcacaattcctcttatggggaacgcagcgtgaaaggtgtgctctgaagcgtggcatcttgagatgaatgaagggcatgttagaaatagtccgggaagcttgatgttgagggcaacagccaccatgtcacacagtctttcctacattgttttttatgtctcacttttcaggaaaatctttattccatttggccaacgggtttgtttgtagtacgtggacctgtggagtctcacaaccttcatctttccctccttgctttggctactaggaggcttttaagtcaaatttaagctcatttctagccaccatgtaagacctggtggcttacatttatataccaaatgtattacgtgcttctttgcccattaccatcacttccgagttttttgttttaacctcttgagtacatgtctattagtataagctgccacacttcctttagagtatgatgtgtgagaaatataaataagcctttattctaacatttgtaagtagctttaagaggggatagaatgggaactgaaagtctgagtttgggcccagactacmagactttgattggaatgtggcccatgtcttgagtttgttgctaggtatgtagcctaacctccctgaggctgttttacccttgtaagatgggaacattaatcccttcctcaccggattgttaaaataactaaattgtaaaatgtatgcaaaagtgcttacctggcatggagtaagtcattaaaaattgtttttgtttttattagacatgttctaataggaacaacattcatttaaatttcaaaaacatgccctaattctgaacacttttttttttttgagactgagtttctctctgtcgcccaggctggagtgcaatggcgcaatctcggctcactgtagcctctgcctcccgggttccagtgattctcgtgcctcagcttcccaagtagctgggactacaggtgtgtgccactgcacccagcctgaacacgtttttgtcctcccagtaactgaggtatcaaatggatcctgccatccgtaggatcttccagggctccatatgtagtgggcttagtcagccaccctactttgaccctgtcctcaacctgtgttttccttctctccatcaccagatctcttccctgaagaacaggctgaaaaaggtctccacaaccactggggatggtgtggccagagcgttcctcaaggcccaggctgctttcttcggtagctaccgaaacgctctgaaaatcgagccggtgagtagccttggcatgtcacagagcctgtgtttggtcagggctgagaagcatacctcaggggccacaagaaatgccatgattcttctggtttccagattcatctagaagagcttgtgtgtgtttgtggtgggggacagtgtactccccttgccatacctctcaacacaaggaggctgtgctatcatgtgtgagaccctcactgctctgggggctgttatgccctgtgcaccaccctagacagtaagccccaaccgcgtgtcagatgcagcgccaggcccctcacactcacctgctctccctggggcttcacagtgcacctgtgcagtagcggtgatcagctccactttacaaatgaggaaaccaagactcagggaagagaaacaacttagcccggaaaagccagatggccccggagcccctgctttcccactgggcctcgccacccctgttctttcacgggaccgctcctccacgcttgagaaagcagagcctcctgggtctcacgcctcatggctcctgagagtggttttggtgtaagtgaccacaatgaagaccgggaagtgaccttgcccacctctggcccttccccctttctgggcctcgttgacttatctatgtcccctgcctgcctcaggaagtgactcgtgattgcaaggatgtgaagacagcaggtcttctctgaaaccaagggcagtagcagtcctcttagcttcagagagaagttcttctttgctgtttctctcctcggcctactcttggctttctggttgaggagaatgcaggaactggcctagggacctgggtcaccctgcagaggggagaatgttggagggaaaccttgccgacaggcctgttctcccaggagcacagggctgccttcgtcttgaacgggtgagtgacgctgtcacacccagcctagtcggagtcagaatcagagttgggtgtaagggaccagcactggcttcactgcctataggccggggctgtttgtttctatttttactttaacctatagcatttaattagatcaaatcacaaaagatgaggggatgtgagacaatgcattctttatagaaattctgattgtgagcaggggtcacgcttccttgtaagccgcaattatacattggtaagtatctttactgctctgactccgtcgtgtattcaagtaaaacacaaagagtaacagcaaacaccttgtttccccatcacccaggacctgctctctgtgaagtggccggggcagtgggtgctcagggagcagcgtcctaaccccaccctcctactcctttttatccatctagcacttaggccttactctctaggctgcctgagctttgggcagtgccatcgtcactgtgtgctcacatagcagaagggatacactctctttttgcttcctgagacatatttcccttaggtttctcgaaagcccttcagcttaaagccagttcttgatagtgtcctgctagtctcaaagtgacatggctctgattacttgtcacgatcttgggtccagccaaaccaatcaggttcaaagcagtgacagctggcacaattcaaggaaaatacagttgtcttcccccctttaaaatgggaatgaataggacaactggcccaatcctttgcttgggttgctgggaatggacagacttgaagtattttcactcttgcagtgatctcattgttggcctgtgtgcatctggaatccaaaggcagctgaagttcgggacatattgctgctgcaggatctgggcacaggctcctccacgggaggagtttatcgttgtacttgcacaaggtgctggaaggcactggatttaaggacagaagccctggagtttcaagcctggctctgcacttcttagctgtctaaaagttgagcaagccatttaatccatttaaacttcagtttcttcatctgtgaaatgaggataagcctgcctgtccttcctgaggatcaattgagccataacacatttcatcaggaaggtgaaacttgaactgggtctgatgagtaaggtttgggaaaagaaagaagggagcatcccttcctasagtgagggtggaggtaactgaggaagcaaaggcttggagacagggcccctcatagccagtgagtgcgccattttctttggagcaattgggtggggagatggggctgcaggagaggatagagccaaatttggcggagccttggatgctacgctaagagagtgaactttaccctgtgaggagtgtaagtttttgagcagaaatgtgacatgactgaagttgcctttgagcagtagtacagtgatggactaaaaggagagctggaggcagagaaaccagttagaggagtgttatgggaactcagaagagagccccgggtggctccaccaggaacagggaccatgaaggaggaagtagcaagactccgcaatagatcaaatatgggagatgaacagcaagaagtgtcaaaatgtctcccaagatttggagcctaggagaggatgaagacacccctagttgcaaaaggaaatgcttaatgccaaggtgttcacagtagcagcatttctaatggtaaaacactggagtatactgagtatccatgttaggtaactggtgaaataaattaaagtctgtcttatgatagttttaatggctatgtaatattctatcagcttagagataacatgatggatttagatggagacatggcacttgtccttgaatgtaagatgctgttcagtcataagatgtactattagtttatgtaccattaagaaagggaaaagagtggtgccaattataatcgaaggatgccaccaattataagacacatccagatttcagaaatgttacaatgggaagtaattttcatcttagaatcaatgaaatatggcagacctgtcagcctttcaatcctgttcatctgaaccacaatggctttcttccataaggtggagaaggaaaccagaaggcctggaattttccaaccaagcttcaagtcgtggtcatcaccatgtcacctagatggtttttaaactatagatttaattttggcaaattcycctcttctaaaatatgatgtaacaacattccccatgtaagattgcttggggcagccaggcatggtggcacatttaagaccagcctgggcaacatagygagaccccatctctacaaaaaataaattagctggatgtagtatcacatgcctgtggtcccagctacttgggaggctgacaggaggaccacttcagcccaggagtttgaggctgcagtaggccaagatggtgccactgcattccagcctgggcaacagggtgagaccctgtcttttaaaaatrttgagcggattagtttaaaataatgactgcaaagtacatatgagcccaagaaatagggaggaggcgttggctgcatcggggggaggatggtgccttgagtgagcctgccagggtgtgctgaggccctccccaaggccacttgtctttttgttgtttytctggttataaaaatagcacctgctcttcattggctcacgcctataatcccagcactttgggaagccgagagaggtggatcacaaggtcaagagattgagaccatcctggccaacgtggtgacatcctgtctctactaaaaatacaaaaattagttgggcgtggtggcacgcacctgtagtcccagctactcaggaggctgaggcaggagaatcacttgaacccaggaggcagaggttgcagtgagccaagattgtgccactgtactccagcctggtgacagagcaagactaactcttaaaaaaaaaggtttgaagtaacaggactagaaatgagaaagcaccacccataatcctatcgtcgcaaggtgagatacagtggtggcaggtttccatccagcttctaggatttttcgtttcttttgtttttacatttttgggttttggttttttaacttccttctaggcagatgagatatgcctgagaaagcaatccagtatcctagttattaatattttttttgccttttagtttgtgtaagcattttccacaccacataaaaactcttcttagacatcattgacagtggctgagcagagcctatcaggtgacccttgtggttcccaaccctggccgcggatcagaatcacggagggatgaggagcggggggggggsggcttttaaaaaggcaaatgtccaggcccccytcagagatttctgtcaagttcctgtgatctgaaatcagagccaaggcccaccatcttttcctagtgctggtctttaaaaaaaaattattttactattgtattattattattattttgagacggggtctcgctctattgcctaggctggagtggcatgatcatggctcatggcagcctcaacctcctaggctgaagtgatcctcccacatcagcctcccagctagctgggactacaggtgcatgccactgaactcagctaatttatttttaatttttgtagagataaggtcttgctatgttgcccagctggtttcaactcctgggctcgagtgatccttcagccccagactcccaaatctcgtgctgagattacaggcatgagccaccgtgcccggcatgctggtctttttgattgtcagtaatgtttcatgataccacactgtgctaaacatctttatataaatctttatgcatggtttgaattattttcttaggcggattccttgacatggatttactgggtaaacggatgtgagtccatttaaggcctttggcacataaggtgtgagagaaagctggtgagcagacacagggggatgtctgcagggaatggcccctgaggcgggtgccagggcagggcctgagaacagtaggtcactgggggcagaatgagcctgcagggtagaaggccaggtatgtgaacgccacgcagggcagcccagctgcagtgctaccagccctctggctcacctgtgctccctgcttcacagtgcctccacaacagtgcccaccatgcagggtcctggggtactgcccatacaggtgggggaggtggaggtggggtcatggctgtcaggttactgcagtcacagtgctgtgttttgttggaaacagaaacatgagggacctaagcgggctcctgtctgctctgcttctgcctccctggaccctgagcagttattcacctctccaatcctcagttccccttccataaggtggatgtgtaatcccctccttgcaggagtgtagtgaggcttaaataagcccagcacggtgcctgtcctgacggccctgggaagatgggcagaaccctgccctcgcccacctcctccctctgaggaggaccctgccagtctggagcccgttgggggacagctccagtccgtggcctgcctggctctgtaaggaggggtcgagctctggcctgagaagcagaggtgggcatctcctcctctgcagtcacgtctgaagaacttttccctggctcagagctcccttgagatttttaccaccttggcctctctctctctctctctctctctctctctgtctctctctctctctctctcgctctcgctctctctcgctctctctcgctctctctctctttcctaatgaaaaaattcagaatgcagctggctgggggactcctgagctttgttttctttaccagatccagaaggaagaaggaaggggaccgcttgctgaggcccagccctgtgccaggagctaggcttctcctccccatctgtgctttctgcgggtttgttggggaggctgggtgcccggctcagggcggggagggccagtgttggctccctggtgatgtgtgtcttcagggccgggtgaattattccaaaggactctctcagggtcagaaactgagatgccaggggtgtccagtcactgccaagttcacctcagtggcctcccacagggtcagcactcagttcaactccgagttgcttcccatccgtgctctcagtaattctccatcccagcccctcactagccctttacacacaggggatggagcgaaggctgcagtgattcctaggaagcagcagagccagcagacagcctccaaacccaggttccctccaacacatcctcccgcctgtctttgttctagtttccacatgttccgtgttagtaactctctgcatttccaataccaggcacaggtcgtggcaccgtgtgtaggtatcagtgaatatattttggaataatagacgggagaatgggtgaaggaaattagggaatagggaagcatttgaggcagaggggctccacttggcctctggtgcatacacattgcatcctgtcctatctatgggcttcagaggttgctgcttcctgatagaggggaaggtgtctgcaaatcacaagggcatgtggcccatttttcggtcacctggagaaaatcagatgcaaagcccaagatatttaacaatatcagtcaaaccaacttgtccttctcgacttaaatgacagagctaccagcagccaggcagccccatccagagaaaccccctttatccatgtcaagcggcagcccaggctccagctcatttatttaggcctttcttgctctctgacacgcctcctagcagttgccaggcaactctgggagtagcagtgtgtgttagggattaactagttagggctggggtcctttttggcaagaaggggataaaagacaaatgagtttaattgctaggccgagggtcctttctctgcatggtagaagattgcaacttttggaggatatgtgtagcagtatggttctaaaatttgccttgaatattcctccttcctagagagaacgaaagaattttttaaacaatcttttacctcactcctttgtttaaaattatatcatcatgaaatctgaataaggctaatacacccccctcgaaacacatttcacacacgctggtctcagttttaaagaacttttgcagatagatttgtgtgctttcaattcatccccttttctgcttagagtttcttatttcataacccatgctgcatgacggtgcatgtgagggttcctctccccatgtctggcccaccgcaggtccttggtatatgttaggttaaagagcaaaacccatgggtattggtgtttgaagacgcgtcctcttctgtgccagtgtctgtggaaagrccagtgtagatggagcactatgggagctgtttattcagctagcttgtgtggccctctctgggccaacctgctagctgggcttccctaagataaagggaacagagctactgcccacaggagcgaatgctgggtgggggcagtaagcaaactgtttaaacaggcagcagccagctcactctggtcccacttgcttagttcatcccaagaggccagcttccagattcagctgtgggtacactggtatcatccaccttatagcccatgattttgcatgtgattctgctgagtcatatttatccacctaaaacccctggaggacgcagaagttgagataaaagcagattgatagcctggctttcaaggatgaatgcacgaggttgtgttggagcaggttggaaaaacaccacatatatctgtgtcctgattgagtaaccctgttgatctcaagttgtttatgaaaaaacaataaaaactgttttcggatttgtttttggtgtagtggaaagcagaaaaatatttttaaagtagtaaaatcaaaacagcaccatagtcccactgatttttactacatatgccttttgtatttactctttattttttcattatgcaaagggtttacataggtacaagcaaatctcagttaaaagttagttccccgcccccatttaacaagatttcatatgcattttkacataactgcagaatattccatcaagtataactaccataatttccataaccaccctcccttgttggacatttaggttatttccagtcttttgatattataagtaatactccactaaacatctttgtgaataaagctttgaaatgctgtatttcaaagccttctgagtggaagaactgagtctgtgagcaggagcctgactgtgggggccaacttgtcacagcatcgcaagaaagcagatttcggttgactcagcctcgcggtggctcaagatggaaaaagaatcaagaacccttgatgggtgggagggtgcgcactccctgccctccacacagacaagcagaggattcccagaacacacataagggatgtgactaatttgtctgtgcccccatcttgtgctgaaaataggtttgaggaaccttaagacactatgtacagtacagcaagatgagagataargaagcaaggaaaccgggagaaagaggaaactgcatgacgcctggaagggactgatgtgtgtgtgcagctgtgtgtctgtgtgaggctctgtgaccctccacacaggttgggagtggtggagctgggactcaccccatcacacccaggtctgtctaaagagcccatgctttaaggaaaaaaaatgtaaaaaatacatataacataagatgtgctattttaaccattgttaagtatacagttcattggcatgaatggcattcacaatgtgcaaccatcactactgtctatttgcaacatttttcatcactcccaacagaacctctgtatccagtgagcaagaacttctcatttccctttcccccagcccttagtaacctctagtctactttctgtctctatgaatttgcctattctagatagttcatagaagcggaatcattcaatatttgtccctttgcctggcttattttggtagcatcatgttcaccaggttcatccgtgttatagcatgcatcagaacttcagccctctttaagactgaataatattccactatctgtatataccatattttgtttatccactcacttgttaatggacacctgggttgtttctatgttttggctgttatgagtagtgctgctgtgaatgtgtgtgtataattaatagttgaacacctgcttgcaagtcatttggctatatacctaaaagcgcagttgtgggtcatctggtaattctacgtttaactttttgaggaacctccaaaatgtttttcacagagtccgtgcttttgttaagtgggtagcagtgtctgtgggaagcacgaatatggacccaagaatatctgtaggaaaagttcatgaaacatttgttttattttccggtatattttaggcaagtggataaggaattatagccaaaacctacaggccggagctaagcagattcattgatgggggagtgtaaaggggactgcagaaggggctggtaacttgctaattaacattttttcccattttagtggtcatctgaagtcaagatcatgtcctgggaatgaagcaaggataaggggaggtgcttctgccccaggacttcagggaccatcactatagctctgtggctctaagtggctaaggaggccaccgaatgtgatggaaggagtatggcctttggaatcacctgggttttaattctagttctgtcatctactagaagatgactctggaagttacttcaccatcctgagactcacttttctcatgtgtaagatgtaaataatgcctagctagcaggactcttgagaaaaatagcaataatatgcaccaaacaccagcatagtgccttgctgatagtagatgttaactaaatgatagtgaccatccctgggtgacaaagtaaaggaggaagggaaagatgagactgcgacattctagaatagtggtgtccatacttgttcaacaagtgcccaagaacctggagccatgcaaaacaccctgaaattattctggcccatttaattctttcttttgaactaattgtgaaagtatggcttttatctcaaatgatacataaaggatttgaaataaatcacatatttaattatttcctttaatatttatttatttatttattcattttattgcccaccagcaattatggacaaataggggtggaaggtaccaagagttgaaaatcagagtcatttaaaaaattacagtcaggttttgtttttgttttgagacagagcttcactcttgttgcccaggctggagtgcaatggcgacatctcagctcaccacaacctccgcctccyaagttcaagtgattctcctgcctcagcctcctgagtagctgagattacaggcatgcgccaccatgcccagctaattttgtatttttagtagaaacagggtttctccctgttgatcaggctggtcccaaactcccaacctcaggtgatctgcctgccttggcctcccaaagtgctgggattacaggcgtgagccaccacacccggccctacagtcagttttttaaatgcatatgagaaaatataattgaggcttaattcatcaaaacatttgttgcctattgagaaaaaatgaccattgttcaatattggcaccaaatctccactgcccacgtcacagggacactgatgttgttcagaacccagtttgagagtcttgttaccttggagtcacacaataaatgatcaatgaactgggaaccattgttctagaagtagactgcccaagtaaaaagtagctctctaagtgagagaagatgggaactagcaggaaatccacttaaacactatgatcaatctcaactgaatgatttcaaagagcataactgaatatgatcaaaatgaaatttcccatatgttcaaatgaaattcatatgaaatacttgaaaaataaaacatagctagtatatcttgcaccatcctggaggaattctaggctttaacttgatctcatttaataatcctggctcctttcttactttgctcctttaaagcatggggccatgttttatacacattgatgtccctcacatagtctggtattagtaggtgctcattaaatgttgactgactggatgaacaaatgaatgactgatacctgtttccccatgctatacatcagaaaggctggtggtcatatttcagtgttgcacaatagagatacttagttgttgttttttttttttgagatggagtctcgctctgtcacccaggctggagtgcagtggtgcgatctaggctcactgcaagctccgcctcccaggttcacaccattctcctgcctcagcctcccaagtagctgggactacaggcgcctaccaccacgcccggctacttttttttttgtatttttagtagagacggggtttcactgtgttagccaggatggtcttgatctcctgacctggtgatctgcccaccttggcctcccaaagtgctgggattacaggcgtgagccacctcgcccggccaatacttagttttaaaacgtatcagctgcagcttcatcttagaacctgagaggaataagccacacaaacaccacatcacgaatgtgtaaatgtaaagcgaaggcacagcccagcagctgcatggtggctaaccacaggcatttagagttagggaggatcatctcctgcagaattgtcatgaccagtaaatattctcttctagttagaaatacacaagagaggactatagtcatggattaagctgaagccaccacggcagttttaaatactctatctttgtggaagcagtggcaaagagaaacggttgctgctactggtgttttaaaatcagatgttctcactttagggtctctcactttttcagtgagactctgaaaaggaaatctttctgatccattttcaagcaatgataacatttgacaatttgcagcctgaaatggtgctaagtgacttcatatgcatagctagactatgaacttcttaagaacaggagatcttgggaatgggcgtggtgtctcacacctgtaatcccagcactttgggaggctgaggtgggcggatcatgaggtcaggagatcaagaccatcctggctaacacagtgaaaccccgtctctactaaaaatacaaaaaaattagccaggtgtggtggcgggcgcctrtagtcccagctactcaggaggctgaggcaggagaatggtgtgaacccgggaggcggagcttgcagtgagctgagatcgtgccactgcactccagcctgggcgacagagcgagactctgtctcaaaaaaaaaaagaacaggagacaggagatcttattcctatgcccccagcacacagttgatggagggatggtggatttgttctgtataggacattatgatatctgtgatgattagaggatacagttgtgttgatttcatccccaccctcagttcttggatatatatcttcactgattttctgtggggtgcggttgcattctctgaaatatatgactacatgacattcaggcttaggctacccttccacaagaaaattgaagccttctccagaagacagtggaatgtcatgtttactcatgtatccttggcacagaacctgatacatagaaggtgctcagtaggatgtgaatgaatgaagttgtcatagttctttttttttttctttttgagacggagtcttgctctgtcgcccaggctggagtacagtggcgcgatctcagctcactgcaagctccacctcccgggttcacgccattctcctgcctcagcctcccaagtagctaggactacaggygcccgccaccacgaccggctaattttttgtgtttttagtagagacggggtttcaccgtgttagccaggatggtcttgatctcctgacctggtgatccgcccaccttggcttcccaaagtgctgggattacaggcgtgagccaccacgcctggcacatagttcttatttataatgtccttagttgtttggaagctataaaacagcttcgttaaataaatcattaagacctgaagtcttaaggaaaagaaaagaacagcatttgttatatgctaggctctttatatatattcccctttttacagcccccctgtggagagcatgcacagccccattttactgatgagaaactgaggctaggaaagattgtcactttttaagaagtggcagagacaggattggcccctccatctgcctggttctggtgaccatgctcttttctctgactgcactccacaatggtgattaccatgtggttcatattacatgtgatttgagggcatttcagaagaaaactgagttggttccctcttaggagtcaatttctctaatctatacaagtgtttcttgacaaatacaggttaaactaacaacctttataaactattttgcaaggggtaatgtcaaaattttatatatcttttttaaaacattcctttaatagataattttaattggctaatattttgttgtttaaatatttgatatttgtagtgataattggatgaaaacttaaaacgctgggaagtgtagcccttcctcctcttttcctgggctgacacctagtggctagctttctcacagcagtgttaatccatatttcttgttggttgtttttcagttgatgttaggattttacaaaagcaaattattgacaatcatgataaaagccacattcatataaggtttatttattagggattgtattaacaatggaattttgatttatagtgaatttgaagtctattatagtcaagccttgttagcacaacatggaacaagcatttgaaatcttacaatagtggtccccaccgcagacctgaccagggcactgacttgcacacacactgacaaataagacctggtcactgttaaagacagtgagaggcagagaaggaaaggaagcagagagttgcagtaaggggtgggaactgctatagtagaatgtgcaasctgggagacatttcagcacagggctaatcactgcagattgggtgctgcggggaagcttcccagggacggatgtgtctggaataaggccttaccggaggaataggagctccccaggagcagggggcaggaagtagcacatgcagaggcaagcggccttgacagcatgtggcacggtcgggtactgtgagtgcccctgtggctggagcagggacagaaggagcgtggctgaggacgaagcagaggagtggtcagtttccaggccataagagactgtgttggcctctacaggattcagcactaatgtcataagccagcatttccagaaccctgttccttgaactattagacccaaagatattgatatattttctgatcccatagaatttggaattgttacactttacatctactgtaactttttaaatacattaacaatgtacactactgaagcccagctgtagagaaatctggatcactttgtttaacccagcatttttcagaccttttccacaaaatacatatcagcattccatgcatctagtactcctcacagcagtttacgaagcactgctagagctaatggctgatggttaatttttcttgctctgagaccatggaattaggataccagctgggttcatttttacccgttccatgactgggaatctcaaaaacaggaaagcacattgtttttccaaagcatttcttgtctggccagacagaggtttggggccaacaggtggtcctgagacgcagagctgagccgccattcggctttcccagctcaggacggcaggctgctctacttggtcctctaggtccagcagcttaatcagtgtgtcagtcaggatctaaggacaacagagactactttcattgtttacaacagaggggaaataatgcaaggaagtggttacacaagtgatggaggagctgaaattcaaaagaagacagggaggcaatccagagattagtaacagcagaggtggtgttcgtgaggccagaggccagggtcacttgaccacagctggtccctgcgggtctgtgcagtgggtgcttgagtcagggaggaggtgaaccrttgctagacagcccacccaagcagagagagcgtgaagagatactcaaacttttcccttccactttcctcctcctaatctctcgctggtgccttgcatgggccaaaccaagcggaaaccagctgatctgggagcccagggaactcagtgtgcaaaggtcaccctcctgtctgtagagagcagagcagaaaagtggggtgagtctgaggtcaagcaggctgagaaccagcactgcsagatcccagagaataaggctatttggtgatcgctccccctcatcccttccccaggcaaatgaatagcatmatgaagtgaaagaccccttgacttgaagttagacttgatgctaacctggactctgccttttctaagctgtgtgactctacacaagttactatacctttctgaaccctattacctcaactgtacaataggtaagggaatctcgacttaaacgataccttcatagagcttccttgacatgtgtctggctggtttctattttataatgaaataagaatgaggtatttaaaactttatgggcttagcctggagctaacaggaatgtcaaaaattcacatatgttgattgactaccccccaaacttcagtgaatttgctgacgttttattagctaccaattactatctaacagatgtctaatttcttaatgtattctctttctggaggcacacrggtagaggaaagcttgcaaagtgttcgatggaatatttgagtgttggagaggcactgtgtgtgcactgtagtttggtactggctaargaaggttgagattccaggagagctactttttcagagctatgaaactttgggaagccctccctcctccctgaaccgcaggtttttcatttgttaagtggggataaaaatgccaccctcgtaaaattgttttcagaattaaatgcgatggcagatgggaagtactcgtcctctgtgcatctttcctgccctccacagcaaactttttatccagtgaatgcccaattcaccagcagtcacattccatggaggcgtggcaggatttttggaaaccctttaactggagattatttatgtttggcttgctggtccctgttagtgatgtgacctggcaggtctccactcaaccctgtttccatcagtcacagctcactggcattattcataagctagttgcttgggacttttctttgctcatattcctactgcgaggaatgttcactctcgtcttcacaataaaatggtctggaggttttgaggttgtcttgagcaagtcagctgccagcttaaaaggtcattatctgttctctgaagggaaacttttatcccgggttgattagttttatcctgggttgataagtgtttatgcaaaagaagtaggggtrggaaaaacctggtactcactgaactcctacttcttgccctttatgtatattttcttggttaaatgtacacagtattatccccaacttgctaaataagaaacataaagcagagagaattgaaattacttaatgcaacaactttgctcaaacatttaccaagaccctactaaaccaggggactattctagatgcttggaattgcagcagtgaacaaaatgaagtcctagtcctcaaatctcttctacyttaggaagacacagagagtaaacaaagatgaaaatcaacatataatatgtctgatggtaataagtgttatgcagaaaaagaaagctaaggaagaagatagagaaagctcctgggtgaggtgaggtaggtgccaagaagaaagagtcggactagagccaggtctgtctgcctctagaactcacggtttttccactggtcccatgctgcttccgatcctctttggtgatggtttccagcatctagggaggaaacatgaactcctctagcatcttgcttcttagtctaaagctgataattcaatgtgtcagggtggtgactttgcattcctggggtacagaaaacatttttgccgtactccctgctgtcagcagcatgtagctgtttctttcgtctctctggtttcacagacacatttagtcttgatgcagaaagcatcttgccagcttggactcgagccctagtgctgaggagaccagtctgtcctaaaggagggtctctgtgactgctgggctcaaaggaactcatcacttcttttttctcttcttccaaaaagtgatgctccagggagtggcttatgtcatcttaatacctgtttcctgatctttaggactcaccaagacagtctaattctatttttaaaaatgctgccacctcctctgtaccaggcccagtggcaggcactgaagaaaagagatggaacctacttaacaggagtcagccagacctgggttccaagtaccacttttctatttctgtaattttgggcatgctacttaactccttagcttcagttttgtcatctgtaaaatgggaagaataaatgtaatctgcctcacaggattggtgtgaagattaagttagataatacagcatggtacctggctcttcgtaagagcttaatattagtttttaaaatataccacagtaaccatttaatttatagctgagtttacattttgtcctatgaggaaacagttgggtagatacaagattttctttctcaaagtgtatgtattttagtggaaaatacagtaataatcctcatcatgctgacactgtttacaaagaagtgttggcattcaatctttatagtgtatttcccactaggtaggtaccgctatacctttaaaaatctatttattataaaataaaacataaaactgccttaatcaagtggatgatgtaatgaatttttttttttttttttttgagacggagtctcactttttcacccaggctggagtgcagtggcgcgatctcggctcactgcaagctctgcctcccgggttcacgccgttctcctgcctcagcctcctgagtagctgggactacaggcgcccgccaccgtgcccggctaattttttgtatttttagtggagatggggtttcaccgtgttagccaggatggtctcgctctcctgacctcatgatccacctgcctcggcctcccaaagtgcatgaatttttataagaccaacactttccaaaacaagaaacagaactttcctgcccaccctagaatcccctttcatcccaactctttccttttctccataagtaaccactatcttgatttcatgccactatcttgatttcatggtaatcacttccttgcattaaaaaaaaatagttttattacccaaatgtttatgcctggaaactataggtgactttttctgttttaaaaatatatgacttttaattctctttcaacttataggttcctcctccacccctttcatttacttacaatttatttgtgtatgaactcaagcctgtggtgatttcccactgtgtgagttttgctgatggcataccatgttcctctgtcccctgtatttcctgctaattgacagttgatccagagattggatagactgaggttcagtcccttttgcaagactgtaggaggcataccaggtcttgttttgtctgttttagtgatcttagtagccaatgtgtttaatatctatatctgtttattcactgggagttgaaaaatggtgatattctaagcttataatttgtttttcatttattggttggaatatttttataaagagacagtttccctcatttaatatttactcagtgttagcgttcatacaagccaaagcaaaataaatgtttgactctttctctttatttaccactttttaatataatgaattgttggttccctatcatcctccaaaggtgacaattgatacatacataaatatgtatgaattcatatatatatatatatatatatatatatatatatatatatatatatatatgtatgagttgtcacctttggattcatacacacacacacacacacacacacacacacacactcacacacataattgcctggtggatttcaacatatttgatggattttggttcattgcgattgtcattttttatttaattacttttaatttttaattattaaaataattattttattaaactcaaaccctcccatctttggtcagtgagaaatacttcaggttgacacctgagtactttttttctacatgaacctagtagtctttgatagctctcttgctatctgatattacaagaggttccaggcttatcttgtacatcctacccccaaacctggaatcagacatttcttcaggaagcactggtttctttttagtgagaaattatatctcaagaccaaaacctggcttaggatactcattgctactgagttggccattgtttctaggccttttcattgaacagagctaggaaacatatgcttatgtacgtaaatctcttgtcgttcatattgatacttccaattaaaattcaagactacagagcttttacttaacctcttctctattacatttgtatttcctctctcccatatgaaaattctgattctcaagggcagaaggaataataaaatactccagaattactaatttagtttcataatctccaaaaataatacacatactaccatgagcataattacagaaaaccttttaactattttttggtatgttctttcctcccatttttgactagttccgctgtatttacattgctagagcatgcagccattacgcaagacactgtctccctctcagtcttcaggggactctgtctgttactgccagtcctaatggtgatgcctctgcagtcattttttattgcctgacacttgctccctggtaaatcccctaggaaagttcctgggaacaatattctgtccgttgttaaaagttgataatcacttttctatgtcctttaaacatgtaagtcagttttgctggatggaagatccttggctcatacattctattttgagtatcttgaatgtgttacttcattttcttctcgcaaagtgttgctgtcaaagttaatgataatctcaattttattttgttaataagtcacttttttttttttaactacatgcccaagagttttttctttgtttttttgtttttaagttcagcaattttattagattgactttggtagttgttctggttctgtagaccaggaatacaatttcatacatcctttttttttaatttcaggaaacttttcttgaattaactttggttctgattattactttttcttcttcaggcactccagttagccgtatattcaatcttctttgcctattttcaatatttttcaccttctttaaaatctcttttatctctttatttctttttaaatatattattgagatgttattccttttgctgtatttttgaattttgaagttttctggttttcttttgtttttattaaggcattgtctgttgagttgatttgttcttatattcctttattctgaatataataatctagttctttttttcttatatagttcttatttctgaaaagagttttcatttctaatattttcctgagttctatcccctcatttttaggtttttgtaattcagatttatgttggtttttcatgctttatgccattttcttagtgtctttagctcattttgacacagtaggttgtagttttaatctgttttgtgggcatacctctcaggcatgctgtcattgtgtacaaggctgttattctgtctctttttatttttcttataataaccttatgtgggatttgatctcagtgttttgttgttgttgttcatttttatgtgaaattaggtttcctgactttagaatgagaagaagttccagaaagcttttctaacttcactgagttaacagctcttctgttgtttttggtggtggtcaataatgtgacagctgctttctggtgttttgtgggttcccttcccctactttgatctagacctccatttcctgtcctctctctctctcgtatctgtcctgctcaatcttggttccattcccagcagtttctccccattgtggacccctgtcctggaaggaggtcctcatgcattttctcgggagttcctaggaactcctagcatttgcggaggctggacggctcggtctccttcagtccttcttaccatgggcccctcacactgacctgctgttgcagaggccaaaacacttccacttgtagaagctgttctcagattgactcactgagctttctgcaagtcgctgacagcttttctttttcttttttttttttttttggagacagagttttgttcttgttgcccaggctggagtgatataatcttagctcactgcaacttctgcctcccgggttcaagcaattctcctgcctcagcctcccgaatagctgggactacaggcatgtgccaccacgcccggctaatttttgtatttttagtagagacgaggtttcacaatgttggccaggctggtcttgaactcctgacctcaagtgagccacctgcctcggcctcccaaagtgccgggatgtgagctactatgcctgtccaatgttttgaggtctacttgtgctgaggtctgtcagtgcaaataccaacatgaagccagtttggtggtggtttgtacttgcctgcttgcatttgggggttcattgttcacctggttttgttgtaactattgcacatatttgaggttttgctatatagtcagtttgccttttttatgtggaggtttgaagaggttgaacaattatactaccactgctgctaccactgccagattcccagaatcccccttttctgttttcccaatttttccttagaaatcctaggaaaggtaaaatatctttcatgagtgtagtaagtgccctcttggaatttacattctagtggaggaagacagagaataaacatgaacaaaaaataaaagaagatgagttcagatagtgatgcgtgccatgaagaaaaaccactgtaaaggggtagcaaagccaggggaggtgtttttctggtactgttctccaaagaggtggtatctgagctgaaacctgagtgatgagaagtcaccggcattcaaatagctgggatctgagcattctaggcagaacagacagcaagtacagaaacctgaggtagacacaagtttggcctgtttcagagatggaaaacaaggcagcatggctaaagcagagtgaacacagagagaaacataggagacagaggccgagagaggcaggggccagattgtgaagggtcttgtgggctggggaagagagtttcaatcgttgggggcttttttagagacagggtttcttgtgtcacccaggctggagtgcagtggcacgatcatagctcaccacagcctcaaactcctggactcaagcgatcctcccaccctggcctcctgagtacctgggactacagatgcacaccaccatgcccagctgtgagagtctggattttaatctaagtaccgtggaaaccattggagtgactttaagcagaagggtagaatgatccagcttaagttttacgacacttattttggctgttgtgtgggaaaagggctgtagggacaacagagtgaacgtcaggtaatagtcaagggtctagggagagaccactgtggtcagtggaaatggtgagaagtggtcagatttggggtgttatttgggtagaggtgacaggatttgctgatgtgttcgatgagggaaagagaagaattaaggatgtcttctgggttcttggtctgcctccaactttttgtccttttgaatcttaagagaaggccaggtagcaccttggtcctaaatagtcactataaagcaagtgaagggggggaaaaaagccacagacaggaagataatacttgcaactttagctgacaaaaaaggcttggcgtccaagatcatgtaaagtatttctataaatcaatgaagactaaaacaggggaaagatatgatcagacgtttcacaggagagttaacatgaatggtttataaacttaggaaaatacactcaactgataatcaaggaaacaagaccaagacagtgttttgttttgcacacattcaattagcaaaaatcgggaaggcagatacttatattgctgaggtaggtgtgtggagcaacaagaactctcattttgctgacagcagtgtaaattggtaccagaattttggaaaacaatttggcattatcttataaagttgaaactcttgcacatttaggctaggaaacatacacaaaaaatgttcttatcagcaaaaaactggaagcaattcaaatatatgttgaaagatagtagatgaataatatttacgtgatgaaatattatacagccatgaaaactagttactttaagctataaacaacaacatgaatgtatcttagaagcatacagcatgatactgatttttaaggcccaacagtaagcaaaactaaacattatttgagctacatacatgtgtggtaaaactttgaaattctcagaaacagaattgagaaaaagtcttaktagggtcagcaggaagaggcaagaggaggcagtggaaaaactcttaagacaatgtgaggaagacgaaaatgtctgtttctttaggagggtaggttcgcagatgctcattgtgttatgctatgttgcttaatataagttccatatagtctttcacatataaattgtgtgataaatgacattcaatggaattacaaaatagatgaagtattaataatttccaaatcttgtctttcataatatcatgtttaaaatccagctcaaaaattctgaggtccagacccctctagtgtaacacatttcaaactttccaaggatcttgaaatatgacttgaccccatatattgaggttctgggtttccacagtggccgtggaggagagggagtggttcagcttgaatgtacgtaaacattctttcccacatttttagtaactaaacacaggaaatcccactcacagcccttaccctttactgacctttctagaaagaattcagaaactctattggacaagtaaattccttcctgcagctttgaacagagcatctccaatgggtccccctctgtagtggcagcatccagcactctccacctacctgactggttggaagactctctccctccagttcgcagtgcttgagacattgtacaagtacacagacaccagacaccaacctccaaaatccaagaggtctgtctttctgcagtccatggatgtgcagcaaatggcaggtgagctytgggctctgagaaagccaggcttgagtgcagtaccatttcttcctctcctgttctaaaactcagaatgcccaaagatattggaatagtcccatggattccatagccatgtttttcttgtgctaaagagagtgggcgaatgaatttgtgcctttttatttttaatcaagataaaaatccaggtgggagaaagaagcccaccatgaaaatagagtaaaagcattctcaaaatgtgtaccgaaacatatcttgagcaccttctatgtgcttggcacagagctaggcactctctgaccacgtggctagtaagtggtagaattaggattcagagataggacttgattctgtagaaaatgtgagtttccttttgcaggagaattcaacagcagagatagagaaagccagaatgagatctttctttctcattttgatatacattaagctgtaaccctgcatttcctacataaaatgtcmtatgtgtacttgtgtgcatgattgttgtttgtgagtgccaactcctggtgaagctaccatctgcattatttatccaggtttaagatgcagcttctttgattcatgctgagctctggcctgcagccttattagtttctttttgttgattaatacacattgcagctcttagaagatatagtgagacctctaaaaacaactgtctggtgagtgataggtacttcctatactttgggctataggaagccagtttactttctgtggcagatgggttttctgtgcatcttttagtttttaattctcttaaaagaagggacttttattttaagggcagttgggtaactgccattttctaggtttcccaatgtagatttcacttgatttttcaaaggggtgctatgataaaagacatagagcctaccttcatacttgaatcactttcaggaagatttcagtcattaacagtgctttcactaacaatgacagattgaggtaagactagagggtttgacctgaattgagggacattctacaaaatagctggcctgtactcttcaaaatgttaatgtcttgcaacaaaggacaacccaagaactattctagattaaaggaggctaaaggacaggacaacggaacgtggtgtgtgatccaggattttcttttggtataaaaagtcattattgggacagttggtgaattctgaatcaagtccaaattttagatttgtattgtatcaatgttaattttctaattttgatcatcgcactatggttatgtaagaggacattcttgattttaggaaatatagtcagtttgttataatgcctgttttgacaacacaatgttccaatgccatcagtatgtcagggagcaatttgagcataatgtgaatttcatttcatttgattcatttgattgtacagggtttcacctatgaaaaattctaagtgaatgaagaaaattgcccccagcttagccaagatgcacatgcacagaacacacatgcacacccttcaggtatttgccaattacctccattcatcacatgttataagccacatctgtcctgcccatgtctggtgctatgattttctgtcctcttctcgccacttcaccatatactcacaagctgcaaccctctgccccttccacaaacaaactgtagatctttttcaaggtaaaatgacatatttattatggggtttatatatttcttaaccatttgctatgtgtaaaagtaggctaccatttttaagtttcttatttctagcatgtcactgaagtttttgagtgtggtgaaaatgtgatgatttttaggaatgcttaagtatttgagggtaaaaggatatcatgtctgcaattttttcttaaatgttttaggaagacattttatatgtaaaacacatataattgccttctgtgtgtgtgtgtgtgtgtgtgtgtgtgtgtgtgtgtgtgtgtgtgtgtrkagagagaggggggaagagaaggataaagccaatgtggtaaactgttaacattttgggtaatctgggtgaaaggtcggtggtaattctttctattattcttgcaactttttcataaatatgaaactatgtcataataaaaaggtgaaaggaagaaaaagactcagggaatggaaaagattttttaaaaatgaagtccaaatgtaaaaaactaaggaaggcaaaaggaaagggaaaatgattcagctgggaaaataatgaaagcagagtgggagagaggatcttaaacaaaccttctacgaagtggattagaacatgagtttagtttgatgcaagctgtttgtaaaatatcataggaatactacggctacaaaatgggaaagaaacatttgctttcccagaaagatttttttggaagtctaacccagaatagtaaaaaacagaatagacccacatatatggaaatcatataaattaacaattctaaatgtatttaatatctttatctcttcctaacaatacaaagactttgatatacagtagtctccacttatctgcagtttcactttccatgacttcagttatcaaggtcaaccataaaaatattatgtacaataagaaatttggaaagagagaaaaagaccacatttacataacttttattaccatatattgttataatggttctatttattttattaattattgttaatctcttaatgtggctaatttgtaaattaaactttatcataggtatgtatgtttaggaaaaacatagtatgtttagggttcgatactatctgcagtttcaggtatacactgagggtcgtggaacacatcccctgcagataaagaggggactactgtgctttactaattggacactcacatgtacaaatcttagtgttattgcaattttatcttcacttttaaaaaaactaacaaaatattgacagtagttagttgtacagtcaacatccatgttcactattattttcccatgagtttacttttcttcttgctgaattatatcttttaatatttctttcagtgagagtctacaaactaaaatgtctttattttgctatgacgcctgaaggatagtttatctgggtatgaaacggtacattgacaattattttccttttgccccttgaagatttgtcttctctcatctgtttctattggcaaacagtctgttatcaatccagtcatcattcttttatgaaaaatccatcttttctctccrggaactctgaagatgttctctttcgccttatattctgtgattttaccctgctgcatctaagtagatttatttatcatacttgatacctagggctcatgtctttcttcaattctagaatattctcaggcattatctcttcaaatactacttctctgccaaggctagttttttgtttttttattctggaaactcctatataaacatgtcggcatttcccaatttattagccatgctcttacctgctctttcatcttcctttacccttgatctctctgttatttgttctggcgaactctttagtattatctttcagaataggtgatagtgtcctaattttctggattaaaaacaagcaaacaagaaaaatttcagattggatttttcccgaggtaaaatagctagtaagaggtagagcctggatctgaatccatgtctgcctaacacctgacctgtattctgtcctttgtgaattcatgagttcatccttaaagttaaaaccctagcatagtgaagtagcttcacatcactgcattattctatcatgtgggtggatgaattgggaagatgaatgtgacttcagacccagactgtgggatgtcatgtgccagaagacctgagaagtgtcaagagttatatctggcctcttttccattttcattctaacttgtttctgagaaagaaaactttagttcctttttatcttttatgatgcgcagaatttccatctttcacgttcttttggctgtctaaatagactgtttactgaggtttgtttgtataccacttgtctcttctcggtagcagaattttggttttattttattgggcagatgttgttaaacttagaatttttcagcaacagggaagtgatgaaatgtttacaatgctagtctataaatataaaaaaagtctattgttgttattcaacatttgttaagcgcccacagagtgctgagtgctgagtatcactacagtcgggggagaaggggtctaagctcacacagattgtttctttgtaaatcacatttcttataatttgtttttaatgtatctattacttgtctcaaatagttcagtaacattttttaggtcctcataccacccagcttgggcaatatagacaaagrtgagggtgacacatacattactttgtcattcattcatttgtttaaaaaaatattgcattggtcatatgttatttgacaggggaactcacaggcctataaggaaaacaaacatgaaacacagttgcaatgcaatatgatgaagactataatgaaagaagctgctaaataagagagtgacacaacgaggatgtgattaactctgccagagtaagtcaagggcagaggaggagatactcactcgaaatgggtcttgaaggagaagttttccagaaagcaaacagttacttcaaatagagggaatggcatgggtaaacatttaggaaaaactgaagttgttctccgtggctggactatgaagtgtgtctttgaaagacgacactaagaggggctagtttggaattgtttgaatgccttaccagctgccacccaaaagcttgggtgtccttgtggttagtaaagccacttaagggtttaaaacagggagcatttccctttctggaggcagggaggaagctggttggaagatgacagcatggcagaggccagtgagaagggcattatattagctctgggaagcaaaaccagctcaaaactctgatcagtggaaatgagtgagaagaacacatctgagggagattgaagagaatcagtcagtcaaaaaatgtgcagctggagggaaagggaatggtctaggataacttctaaaattctagctagggatccatgtggagatttttttcacaccataagcctccagcaataaatatatggcaaatatttctgtttttatctcagtttctgccaagcaactcccagtcctggaggaaataaagaatattggtttcccccaagaacagtatactggagaagctgcccaagaagaaaatggcttcactttctcagtrgcttgctaggaaagtaatgagaataaggtttcaaaacttagttcctctaatttaatgtctttggaggaatcggctcctttgcagagaatagctttgatattgagttcatgactcctgcctttagctttctttcatcattgcagatggagtgctggtcatgtgtgtcttactagccagctctattctcatgttccccaaaatgttctctttgaataattagactttttcacttaatttttaaaacatgtctgatgcctattatgagccatgtgtgatggcaggtgcgttcacatgtcatctcatttaatacagcaacctgagagatagatagcaacatcagttttacagatgaggaacagattctgagacattaaacaatcagtcgcagagcacaacacaagttagttgcagaatcaaggttagaagctgattcaaactcttttctagcattcatctttctttgagatttttgttcattcatccattcattgttttaatcatatgtagctcctcttgtgtgttagtatagtaaccacattgggcactgggttgatggcagggaatgggtcagaccagtgcagaaaatgacaagcatagaggcagttataatacagcttaatgagtcctccagatgggtgcgggagatccaaggggggtacccaactaggaattggggctcagcaaagtgccctggaggaagtgatacccaagctgagagatgaagaataaatgagtggggtagccagggataggtgagagggaacatcctccaggcagaaggagaagcagacacaagggagggtgtggcaagagatgaacctgaaaggcagtcttggaccakatcagagaggaccttataagctacatcatgaagcttaaaatgaatccttaggtcattggacagctgtggagaaagagtttgtaagggagggaagttatatgaatacacaggaattttttaaggtggctatggtagtagtgtgaaaagagaaatgattaacagtaggcaagctcagagaaagaagccgccaaggaggctgtcaccataatccagcagaaagaagatggtggcctggactggggaagtgactgtagggatggagagaaatggatgggcttgggaaatgagaagggataggatccacagggcttaggatttgagtgaatagaaaagagagagaaaagtaaaacaagaccaacccaggtaactgggtgaggctattcccacccactaggatgaagggagaagaaccagtttgggagggaagatgacttcaagcttattcatgttgagtttgatatgtcagtggacagccaagagatgtccacttgggcagctttgaatgagaatccaggagaccagaggggaagagtgagatgaagatacggatttgagttgtatcaacatatagatggtaattagctagagaaaaggtacaaagtaagaagaaaagagcatagaccagagaacagctaatgtatatttaagagactaccaaagaaagaggggctggcaaagaagtcagaaaaggaatcttcagaaaggtgaggataaatccaggataacatgccaacgccaagggatgcgaatgtctagggccaccaaagagaggttaatcagataaagacagaaagtcccctgtgtgttttagccattagaaagtcttggggatcttgggtgagaccagtttcaatgtcgaggtggcggaggtagagtccagacaagccctcggggcattgtggctgggggagagggaaaatgatgacaaccagatggtcatgtagggctgagggaagacatgggagttccagtgtttgttggttgtattaacattggaagagacttgagtacatggaaatgctgatgagagagcacctggggagataagcgtattcggtaggaccagggccctgggatggaaggggtatggcgaagccaggtgagtggattggccgtgggactgagaatgcaggctctcttgagtatcaatgggaaaggaagccagaagagaccagatccagggaaaggatgaggagtcagagggaatttccatctaacagcaggcatgggggtgtgtgtacgcatatgtgtgtgtgtgtgtgtgcacatgtgcaggtgtgtgcatgtgtgtgcatgtgttgggcagtgatactggcatagagggagaagggtcagtggtatggggagactggagaaggtttgaataaagaatggtggagtggctgagtgcagcagctcacacctgtaatcccagcattttgggaggccaatgtgggaggatcacttgagcccaggagtttgagaccagcctgggtgacatagaccctgtctctacaaaaaaattttttttaattagctggtatggtggtgtgcacctgtagtcccagtgactaaggggctgaggtgggagaatcactggagcctgggaggttgaggctgcagtgaatcataatcacaccactgcactccagcctacgtcacagagcgagaccctgtctcaaaaaaaaaaaaaaaaaaaaggtagactgcactagctgggtgaacctaagtttattgttttctttggccctaatgctgggggatttacccatttgtgaggagaaagtggactttccaccagctgccttgttttgtactgtgtttggagtgtgttcttattttcccctttagctcctgtagagcagggtcatagtgccagccggtattgttcagtgagttattgatcagtgagaaacggatccggttaaagctgtcttctctctgtccttctggcttgtggcatttatctgctacctacacgagtatacaggtgattgaggctaactcaaacagtgtcttctctcttggagttttgatggttagcatgtttttcagagatgccctcgaaaaargaggctgggattcttgctgtgttccttccttgtagtcatcttcccacttacccccaacaagagtaaatttaaccgagcaggccagaatctacctaatagcaggccctaaaagttagcatagaactttctctctgaagagggctgctccctgggtcctggttcccatgcagcctttccatagaaatagaaggtgtgcttagaaggacagcttgcctggtttcagatcttggctctgctgctcacttgcagygtgacctcgaacacgtctcctcctttttcggagcctcagcattcttatctatcaagtagagtgactatgcctgtttcccaaggtagtcagagaagctagtgagccaagggctatggaacgccttagcgataagaggtatgcagtgcctatctactccctgtccttccctcatttttcagttattaaaatgcaattctctagctttccaggtgtgaaacagtctgggttgaaattcttcccatctcctcctgcaaggtagctaagtcggaggtaggcgtttggttatattccccagttgctgtaacaagagcacataccactgtctgctcaccaatcagtaaagagcacaaaggtacaaatgttgagtacgtgggacagtgaccccctcttgaaagacagcctcaactgttactgcccagcctccatcagagggcagcctgagacattgtcattgaagagattccagtcgggaagaccgccctggttcatctgccactttaccagaggtcaaactggcagcctgcaggccagattcagcaaattcagcccttaaatgtgttttgtttgtcaagtgctgtgtttgtaacctttttttaattggatgcttctaaatatttggagacagggcatggctcatctgtgttggccaccactcactgttgtcttacaccctgccgccttcactcagttctattccttgtggacccatgaaggcttttgcgtttgcagcctttctttctagatccaccctggacttattcctatcataagcccgaccatccaacccgcagatatcattgaaagaggttttgaatccttttattgtgtttgctgaagcatattgttgacagcatgattcgtttattatccaaagactatttactgagtgcctactctgtgcagtgtaggatgccctattctcagtatctctgagcatccagaggaagccccatcaagtggcctcttctccacagacatcaggaaggagtaaggtttccccctgggtaattataataaagacctggcattcagtaccaaggcagcaccctgggttacgtgtatttttcatccctgacatgccagcagattcttcactctttttctctaataccacatgctccagtcatcccttctgtcatcacgctgtttcagcaggcacaaaagggcctgctctcttgtttccttaattgttagagagattctagttgttgagggagtttcaggtcctctgcccrtgatcacctcatagaaactcaagcttctggactagaagagttttcatgcttatcaactataatattgattcaaagagcagaccgaggtgctttctgcatatagcccatacattgaatacttttcaggccagttgattctaaagcctgaccttggaatcatattctcatttccaagtcaaagtagatggaggagcagagccctttgcactgagccaccaacatttctggccttcgctcttccacaagctgccactgtaagtttttggctagttttccttttcatgagaaataggttaactttacagtatgaaagtacagtttttcaatttcaactctaatattccaagaacaagctgtgaactttttcacctggtgacccatcgatctgaatctgtagcctaacacacaaatactacaggttccttaattgggatgacttgagttcagatctctaactctgtaacgtattatctgtgtagcagtaaaagcaagtcaacgatttgagctttggttctgtatcttcttatacacatgraataagagttaccgcctcgcacggttcttgtggggcaggcctccacaagatgaggaatgtggagcgctgagcagagcacatggcatgctgttggggattagcctragtggcctccatcctgttgctgtcacacgtaagggggttagagtattgttcatccacaacacagctaacagacctagcccatggactgatcggaggcaacactctctaaacatttaaccctccctcctttacccctcctgaaatctgttttggtttgttaagtatgttaccaattgtggtctcctaactcccatatgttagcaattagatgtggcctcacattaatgctttacctccatgtttctctgccccactagactgtgagcttttggaaggaaaagagagctcagttcttattcacgtctgtattcctagcacatagtggggcctcttaaagtgtttgttcaagacttggctcagatgctgccacttatcaaaagcaaatctgcttgtggctccatctctctagacttcaagcttcttgcaggctgtgacagcatccgggacgtctcatgtttccaatgcagatatagtatgctcccagtcagtgtcagctgaaggaattaagtgatattttcatcagcccggagcccaggacatagtaggagctcattaaaaggtagctgagctgcagttgtaatcattaacaccaagaagaagaagaaaataaaaatgggcatctggtcacccactttggtgtgaagtatggacattgattggaagactatttcagagaaacaaaatggccctttattcattttggggaagggaggagggttagtaaaagagggtctttttcaagtgtttgctccatcttgctgccactttactatgtgtggctgctgttgctatggcaattctttaagcaattgaatagaacagcactagttgttgcaaaccagctctaattgctcccatgcaccaggcctgcccacacgaccactctctgcacagcattccctttttcagatacgtattttcataaacctctgggcattgtgcagctcccttgctcctgtgacattgccatcctctggcagagggcacaagaagcagctctgggtgggagagagggctccgccaattttccctgtgtgaatgagcaacacagaccccatgtccaagggggtagcaggatgcaggctcagcagggccttgaaaccaaataaaacatttgtggggtaggtttattatatatatttgccattgttgggcaatttagtcatctttttaaagccaaccataccattcctgtgccctcctgccatgagggccccattcattgtgtactgagaacttctggttttaacctgaatgtaattggggagaactgatattagaagaaatggaagggagccggcatgggtggtgtccctcctgtgtgccaggcagcrtactagacacttcccatgcgttgtcatttcttacacagattcactgggcagtgggtcgggataggtcgggggatggtagcatccctgttacagatgagggagctgaagggcagagatttagtatggaacccatggtaacagccagtgagtatatggctgggattagatcccagtctgatcccagtcttacaatcactgtgacggattctgagacctgtgttcttttcattgggccacacttcctctaggaaggaggccagcctttggtgacacagagaagccagatttcagtggactggcatttagccagctcccctgtccttccgcatggaaggcccttctttaaggaatcatgaaacttaaggattatcttatgaacaattttattgtaattatagcttgtttggaacactgatgctataccaagctccaagctaaatgtcatatgggtatctcacttaatcttattttttacaaatggggaagtcgatgcccaaagaaggtaagtgacttgcccaaagttgtaacaataggggtggcagagccaagataaaaatccaaattggactctcaagccccttaaccacgaggctgcctcccacgggcttatttgagcatgggtgttgcatatgtatttgaaacctttcatgataatactccaagaatcctgataaccaacagaaaaattgtcttcctattcctgagatatttgtaaaaattaaacttacccggtgcactggcccctaaaggcagaagcgtagcatgggcacacaggggagctggatgaaatttcatctggggaaccgcgtcttggtaatgtgtctcggcgtgaggatctgtgtttacaataagaacctgtactccagcagctcagtcctgtcatacatggtagaaccgtgtttgaaatttcttctttctccctcttttcttcctttttatttkaatgtagtttgtacagtaaaaaggtgagagggaaaagaaacaaaaaccagacactgttctcatagaagtgaacctacactaacagcaaggtttttctcttaataatctacattaaaccctgatgaattcatttgaacaagggtttctaaatgcctactgcgtgccagacaccactttaggtagtgggaacagagtcaggtaccaggaagcattcagttgtgggtaacagaaatctggctgaaatgattatgaacttgattatcgakcattggaaggtcagaggcaggcagttcagtgattggctgattgagaaactcactgattatatcgcaatatcagagccaggattcacatccaaatctgactctcaagaaatctgactttcctatcctttcattcttgagtctgcaggcatcagcctacatgccatcaggcaggctttgctcatgagctcagggtggctgctatttcacctgtggrccttacaccctcaccacaatttccaaaggcagcaaaaatttttgttgttgttgagatggagtctcgctgttgttggccaggctgtagtgcaatgacacgatctcggctcactgcaacctcgcaggttccagcagttctcctgcctcagcctcccgagtagctgagattacaggcacctgtcaccatgcccggctaatttttttgtacttttagtagagacagggtttcaccatgttggccaggctggtcttgaactcctgaactcaggtgatccacccacctcagcctctgaaaatgctgggattacaggcataagccaccacaggtggccttttttttttttttttttttttttttkgagacaggatcttgctctgtttcccaggctagagtacggtggtagtcaaaactgcagcctcatgagctcaggcagtcctcctgcctctgcctcccatgtaattgggaccacaggcgtgcaccatcacacccagctaattttttaattttttgtagaaacaaggtctcactttgtcacccaggctggtttcaaactccagggctcaagtaatccacacacctcagcctcccaaagtgctgagatgacaggtgtgagccaccrcgcccagcctgggtatttcttaagattcagaagggctttcccagatgctctcctggtgacttctcctccagtgccattgaccagaattgagtcacatgccatgcctctgctccagcccatcactggcaaggaagtgaggccaccaggttaacttagatatgaggacccaggccaggtgtggtggctcacatctgtaatcaaagcactttgggaggtcaggcaggcaaatcacttaagaccaagagttcaagaccggcctggccaacatgacaraaacctttctctactaaaaatataaaaattagcctgtaatcctagttattcaggaggctgagacgcaaggatcacttgaacctggcaggtggaggttgcagtgaaccaagatcgtgccaccacattccagcctgggcagcagggtgagactctgcctcaaaaaaaaaaaaatttaaaaagatatgaggacccagcccagctctggggatggaatctgaaagagtcagcctcatggaggaggagggagkcatgaacaaattgggggttctgttaggctagagagaggagggaatgagggctgggtgggcagccaacaatagtgactggagacagatgatcccctccttcaaggagcttacactgtagggaaatacaatagtaaacaaggagacagaccgatgtaccatttacagttccatccgcgctgtacaggaggtgagcagagtttggtgcttctccttcagatggtgcatcagggaagtcctcttggagctgacatcagccatccgtgttgggtggaggggagaaaatgttccaggcagagaagggaggcaacacggcccctaggagggaccgaagggaacgggggagcccaggatgtagcaagcaaggtgagtggcttgagttgaagttacagatttaggcaggttcacgtcatgcaaggttttagaggccatagaaaggagtttgggttttattcaaaatcagtggaaggccagtgtagggctttttaaaatgggtgtgacacagttaattttatatttgttaaaagtcctgctggctgctcagaggatggctttatgaaagcacagagaacaattggaaggtccctgtgatgatcacctagaccacctagacaggtgggggtggcatggactgtggtgtcagtggaaatggagaggaaagagcttttttggagatgggatcagtaggacttgccaggtactgtgctagctccattcccatgggctctcttgtccagtcttctctgtatgcctagacagtcattttttaaaataaattattatatcccctttgcaaataagaaagttctgaggagtggcctgccctgggtcacagcatttagctgagccagagtagggaggagtaggacagctggattctggggtaggtgggcaggaccaactcaattagcattttactgggattgttttcctagatgaagcttttgtttttgagggtgatattttgagaactgctgtctccgtgggaatatcttagttgtgtacagcaaagccatctctgcatctacattttcttgttcaacacatggctgtctttataatgagtgccttctttatatggggttatcagagtaactctgagtctattttacaactaaattaatgatgtcgaggaaacatttatttggctccctttctattataatattgttaccagctaattgcctttgaatattcctacttataaggtcctttgtgccagtttaaatctaccccgtgtaggtgaatccctaatgccgctcagggctactcagtcacttggaaagtttctcttcttgtaataacaagagcaatcatgaaaatttatgccaggaaaaaagggtcagcttgagacaacacctaaaaaataataatatatatttttttctgattataaaagtaacatttttaatgcagaaaatttggaaaagacagaaaagcatagagaaagaaaggtcactcacatttccaccacccagaggcgttccgcattcaattttgctacttctctttacaagtgttttttatgcctttttaaataattgagttcagtcaatatcatttttcttcctttttcatgcaattatggattttcctcacactatgagatattgtgtgtaaataatcagttgtaaatggttgcgcaattcctctgcttgaatttgcctcactgtgccacagtttatttaactgtgcccctcttgttttttttgtttgttttgttttgttttgttttgctgttgtttttttgagacagggtcttgctctgttgcccaggctggagtgcagtggtacggtctcagctgactgcaacctccccctcctgggttcaagcaattctcctgtctcagcctcccaaataactgggaattcaggcgcaccaccatgctcagctaattttttgtatttttagcagagacaggatttcaccatgttagccaggctggtctcaaactcctggcctcaagtgatccacccaccttggcctcccgagtgctgggattacaggcatgagccaccatgcccggccctcccttcctgtttaaatttttgttgttgtgatatgaatgggttttttggggggggttttgtgggttttttgttttttttttttctgagacggagtcttgctctgttgcccaggctggagtgcagtggtgcgatctcggctcactgcaagctccacatcccgggttcacaccattctcctgcctcagcctcccgagtagctgggactacaggtgcccgccaccacgcctggctaacttttttgtgtttttagtagagacagggtttcaccttatacataaagattcattgaattttagagtttttccttaaactaaattcccagcaattccagttctggattaaaggatatgattatttttaaggtccttgagacacttgacaagtttcatttcataaatgttttactattgtccgttcttttttttttttttgagacagagtctcactctgtcaccaggctggagtgcagtggtgtgtgatctcaactcactgcaacttctgcctcccgggttcaagtgattctcctgcctcagcctcccaagtagctaggattacaggcacacaccactgcccagctaatttttgtatttttagtagagatgggatttcaccatgttggccaggatagtctcgatctcctgacctcgtgatctgcccaccttggcctctcaaagtgctgggattccaggcatgagccaccgtgcctggcctactattgtccattcttattaacattccatagatggccactcttgactacaactaggagtttttattttttatatttgccaatttaataggcaaagagaaatgaattgttttaatttttgtttccttgattactagtgacattgaactgttattcatgtttatttgccaggtgtttgttttttcattatgaacctgacacttctctactgggctctcagtgttgtcttatttttatttacataagctccttttatattttttagtattaaccttcttataaaattgtaacaaatacatctttctggactgggattccccaccccagcccaaatacacgcaaaagtacagagtacacaccccccatgtacccatcacacagcttcaaccaccattgacattttgtcatatttgtttcatttgttttctaccctactctccccccaacctttgtgtgtgtgtgtgtgtgtgtgtgtgtgtgtgtgtatgtgtgtgtatatatatctatatatatataattgagacagggtctcactctgtctgccaggctggagtgcagtggcacaatcatggctcactgcaacctcaacctcccaggctcaggtgatcctcccacctcccaagtagctgggacaacaggtgtgcaccaccatgcctggctgatttttgggtttttattttttattttttgtaaagacagggtttccccgtgttgcccagactggyctcaaactcctgggctcaagggatctacccacctccttcctgggctcaagggatccgcccacctcagcctcccaaagtgctgttactataggtgtgagccaccacacctgccactcctcactttttttgctggaatattttaagaacaatttaagtacttcatttcatctttaagttatattaattagtaagcatctctaaaaaataaaaatttgacattttctttttccttcaacttttcatttaaaaaaattcaaacctatggaaaagttgaaagaatagtacagtgaatacccatttacccttcacctrtgttcactgataattaatgttttacaaatgtgcgttgtatttctaaatatatgcacactgtgccttttgttttgtttttgttttcattttgtttgctttatttttgcgsaaccattttaaagtaagttattatgacgcttcactcctaagtatttcagcctgtattttctaagaagataggacattctctatcctaatcataaagccattatcgttctcaagatatttgaaattgttacaataatattatgtaatggaaatatcacttttaatagcaaaaatcgcagttacttttgcaccaacctaatagacaatctgtaatctacatacagttttcccagttgactccaaaatatcttttctaatcatctttcttgcttaatgtacttgggctcaaatcgaggatcacacattgcctatggttgttatgtctctttagtaccgtttcatgtaggatagtctctsttgctttttgttatgttttggtcttccaaggcatttacatttttgaagagtccagaccagttgtcttgtagcctaccccacaatgtgattatgtgactgttaacacatgaccgtattccaccctgccaaactgcctgaggttcatcttgtgcatttcctgtctcagatctggagtcagccctttcctccgtgagtcctggttccttttagtagggagtgatacttagaaaccaagatctaggcaccaggtatactcattcctacttggtattactgatgctaggcccttctagttgatacagccaaggaatgtgtaacacacccagacccacgataggcactttatgtctctgtttctgtatccatcttcccatactgaaggccgtgggttcacaccaatggttcctattccagtccaacataggaattattctagttttctccctttacatatctgtgactactttctacaaaagtgaaaaacctggcctatattttcctaatatatttggttatttgtgtggaaccacgcttctgtcgctgcccctgcctccatccccacccagatgctctccttgccctccctgactctgacatccgaggttaggcctcctctgtctacttcctcacctcaggctctaacaccccagcgctagaccactgccactgcctcccttctcacatggattcttctagatcctacttaagttccaacatcccatgccaacccaccacctccactctctcacataaacatcctcctcatctccctcaggctctgacaccctgagccaggctgccccctggctcaggccctccttgccctgccatcccttccacgtggaccattccatgtggtgcattcctcattgcaccattcaaggtctgataagcatgttgggtccatgacccaaacagataccttagtcacccaccttaggctgagacaccccatgctgggtgtcatggacacacacacacacacacacacacacacacacacacacctcaaaatagaaccctaccttgcccaacctttccagtgacttttggacttggggagggaattctgtttttaataaaaactcttccctcatgttctaatctggtgaccagcactttgcaaacagttaagcctttggggatccatgttgggcaggctccagttaggaggggagaaagcttttaagttctcatttaagatctacctgaagcagacatcatagtgggcagtgcaggacatgatcaaaagggtatgtgacactgttctgcacagtcatttttctgttagttgcagtaaatccatctggattgaccagcccagcctgtctgtcaagtgcctggctagctgcttcctgtcagtcatcaagagcaagtcttggtatgatgctgtctttgggcccagaacagggcagcatcaacccaaagcagttcttccaatccctcttttggtcctcagtgcttccagcagtgaaaggaagagatggattgtatgacacccagcggctcttcccgctctggcgtcctcagaccctgggccttggtgtgtcctcttagcaaccagggaaagatgtgccgatctcaactgagaaaattaaaggatagcactcaagtctgtagagaaaattccagtgcctcrgttctgtaggatctcacctgtcctctgggacccaccctaaaaagtgtttcttacttgaaagtttgagtaacatgcatccgacgtataaagaggacttagaaacagaccttttatcacagtgagtcagtgggaggctggggcttccaatctcagtctctggctctgaagcctgagctccattcagtgtgccaggctgattctcgtgtgggtgtggggtgaacaaggaggaccgggctgccctgagaatcacagtcaacagaggagcccttccacccagaggtcaggccatggccacctcaccggactccggagaagaagggccaacaggtaaacaggccttgaatgacatttcggtagtaatcaacttgaacgatccacattcctatagcatattcagagaagagctacaggttatgtatctctttttctggcttccagaattctgagactgttttaagatatggtagcatgtcttttacctgagttgcacatctgtgaggcagacacgctttcagacaccctcacatctcatttaatttaatcctcacagcagcccttaagggcacgtattattatccccattttccagcttaggaaactgagactcagagaggtagaggaatttcaaccattaccagcaaagctggtatttgaaccagtgtctgctgactccaaatctgcccctccttccactgtcccaagtcaccttcagttctttaaggcggccagccaaacttatgcacatgcccaccccacatattcgagaagcttccagttgcatccatgccactaggcttctggctcctgctttggggaggtctgtgacgctctgtcagtgctggctgcagaatagccagtgggaccgtgcagcaggaaggagcactgaaaagtgccgcgaaggaactctagtccccacgatgctgaggaggacactcacctctcctcatttgaatctccaagtccaagtcccaggatgctgttcttgcccgagacctgcatctatagaggcctcggagctttcaagtgaagtgagccgagtgccagcccattcagtcgcaccccactcccatggccaggggccacgctccccctcgaagccagcacaaggcgaggtcctcatggggcctggccctctgcattcacggaggaaaaatgaaagttgctttattccccggcctcttcatatctcctattatgaggagagggctccacagtgaggagccggggctgtgatatttccgctgcagcatgagagattcatatgtttgactaatcaattctttggcactgacttcctggcctgcattttgttcttttgcctttgatcacctgtttgcctttttgccattctgctggttcttgtttggagcttttagtttccaggaacacggtgacctactcgatcctctgtattcttctcctctctccctttgtcattttcctctctgattttggttccccttgtgattgactgcacacggcttccacatgtaagcagagtggagaccctcaagtcacgagaccctgataactgctgggttttgttttgggagccaagggacactggaccacagacaatccctgcaacccccagccaagctgggctgcagctcttctgtctctcctgtccccattcccgcctggcgctgcaacattcagtagctgttgttggcttggcactctgtggttcacaaagccttctgtaatgctcacggcaaactggaagtgggtgggggtgcaaatactagcatcagtcacgtttttcaatgggagaaactgagtagtggaaatatgagatgattttttctggcattcagagctcataagtgtccagccctgaagccaggccttgtgctgctgctatggtggtcagttgattgctaacttcaccatcctcagccaacagtgacygagcagctgctgtcctcagccctgtgctggggatgagacagggattctgagttaaatcggacatgcttcttgttcccagcacagtctagtcccgtgcaacaggcaactgcactgtgcactgtggcagcaggtgcttcctgagcactgactctgtgcctgacatggcacctagcacccccgctgtgttagccctcagatcctcaccatagcctaggctcaggacagtgaagtagcttccccaaagccacccttctgatgccagagccaggactggagcccaagttcgaaggcctcagacatctgagcccttaactgaagagttacctgcataggactgtggaagcatggcagaagtccctacccagagagggactctgggaagtcttcctaggagtggggatatctggggccttgagggatgcatggaggtttgggaatcagaagaaggaggggaatgtagctggcctctgcacagcctgcttctgggcctgttctgaggtcacagtgttttcctaagcaacattttgcatctgagaatcccaagactggaaggattgtgtggccttattgcctattccatgctcgagtctcccctacaacatcctcccatgaggctttccagcttctcttgcmtacctctggtgccagggaacttacttccttctgaagcaacctttccatctttgaaatgctcctgtttttaggaatgttttcttattttagtgtaaagcatcccctttctgctcctccaccttctgtgttaagaaagcctcaaggccacatctcctatccttggaagcagtgggtacctttggctgaactgtgagcaggaactgaggcttctgcatttctagttgcagagagtgacatggcaggggatggcctgtggtatggagtctaaaaggcctgggtcacatctcactctaccacctgtgctgtgtgcccccatacaggtcactttcctcctccaaacttcctcacctgtagaatgggaacaccagtcccttctctgcccatctcatgtggctgctattcacaaaaaatggcaggtgcatacatgctgcttaaaatggaaagtgccacacaaatgtttcccctctgtatcctgttgtgatgggacacagttggggatgtgtccttgtgtgctcacactgatcattctattgtgtatttccctttatcagatgagttcatatgaccgcataacatgtataaagatgtaatcaacaggttcaacccacttgcctagacacccactctgggtccagctctggggtaatacaaggagcacaaggatcaataaraggtcatctctgcctttgaggaactccacggtggtgagagatgaggaggaggttgtgtagcgactgtgttttcctgggctacagcagagaagtgggaaggcgcgactcacagggcaggccgcactgctggggccatggcgggcagtgcagtcataggacattactctgtatttttgagccaagtctttgaaggggacagctttctcgtccaggagaggaatgacaaggcatgaggaggcagagatgtcttgtcgacaccttacaggtaggttcatctgaggtaggcaacttctcagaaataaggagaaggagatagaggcattggagatgaccctggtcatagaatccaatgagtcagtcagtggagatttccttgcctgaggtcaagaatgcagcaggccaaagggtgggggaaagaagtgttcaggattggagtgtggagtttgagaaacatgtgggtcctccaagtgtaagcatccagcatacaatggatagaacaggtcttgcagttcaggaggaaagtctggcctggagctggagaattggaaagctctcatctcatgttcaggctcttctataatttgaggggcttgcttggtgccacccaagagtagtaaaggactgaaaatgcaagtgacctttcttgcatgttcactggggatgtgccatccatctgtgacccagagagaaggctcaaaaacgaggccataaaggaagatggtgcaagagcacctctcctgtgtaagacgctatgctacgtgacccctaatgctcccagcagcccttcccagtatttctcctcgctctttacagaacctgaggttcagacaggcttagtcagctagcaagtggcaatttagaagacagacctgtctgactctccaactccatgtactgtccaggaaagccaggtgtcccatctcrtgctttctgttggtgagaacgtcttctgcgaagtcttgtttgcctcgcttcttttccctcagagccaaaatttgtccacagtacattcagtatccatgagccatcttaatttkgcagctgctctgtgtgtacgggcttgtgtttgagtgtgaggatgatcatgtgagccatcccctactcacctttaagacagtgcccctagtatatcagatcaagcagaggcacagggcctcttcctctctctttctttccttcttcgtttcatgttccattccttcacggtgccttctagaggctgattttgtatggtgacgtacatgtgcattttgtaagtcataattttattttgtatttaaataaactgtgtgcacacagagtgtgagatatttggaggacacagccgggggtactctgctctgaattcctctggcttcagtgttcttttcaagtttgaaaatgtgttaggaaaaagacaacattatgataattgggaattcagtatatctgtcttttccctctattcttttatacttttttttagatacaattaacacttcacacttcacctgatctctcctcagttacctttgacacttccttgatatttatttagatgttcatgccacgttcactttgaactctgtggttaagagaataacttttaaaacaagcatttttcctcactgaagatgtgcaattagcgaattacacacatgtggatgtccacttgtctttttttatttgtcaaaagatcatggcacaattacaagaaaattgtaaagaaaagtgattatcatcaaatcaaaatacctgctgtgaagttgcagaaacagctcattttattacagtttctagaacagcacatttcacagaagatgggaaaatgcttagagatatcttcatgggtgtcgtcttagaatttacgaaccatgaataatgcatttaatttaaaatggctgtattttctgtaagcatgtatgaatgcaaatggcaaagacacagtggaatttgactctgtcctatcaggtccggacaatatgatcccgttgtcatcaccaaaaacgaaagttaaaaatgtgctttttgccaaaacttttgctacttttccagtttcattttaggagccttgtcttgtataacactggctctggacttactaagtctagctgaggcggtgtttcttgatgagtcccatctctctttgcctgtgttatctgggagctgtcagataatgtcaccattaacccatcgccgatgtgcttgaaaaagaatactgaaactctagatggattttgatgctagaacttgaaagataaaaagcaagttgttttctgagtcaatgcattttaagaggaactgaataaagtcaaagcttcacagtagcaatggaaactgtcttttaactctctgaacactagtaattttaagacaaaaaatatttatttatttatttatttatttatttattwtgagataggttctcactcccattgcccaggctgcagtgcagtggcctgatcatggctcactacagcctcagccccccaagtagctgagggctgcaggagtctgcaaccacgcctggctaattttctttttttttttttttaagagatgagggtcccgctatgttgcccagactggtctcaaactcctgggtttaagcgagctgcccccctcggcctcccaaagtgctgggattacaggcgtgagccactgtgcccagcaaaaagtaattcttatgttaaaattttctgctttagtctacttgggagggagaacttgtaatctcacatatctggaagggctctcagcctagaaccttgcacataactgcctaatgaatgagttggtctgctaattataactattgttagcctcagtgattataaagatgcaaactttaaaattcagatcatttactacatcagatgacttaggtcatccttttgtatataataagatctatttagaattcctttttggccagaagttctagatctcataagaaaaacagtagtggttacaacaaccttgttcctcttagcacagttacccgtgtaaaaatattatgtttcttttctttctttctttctttgtctttttgagacggagtctcactctgtcgcccaggctggagtgcaatggtacaatcttagctcactgcaacccccatctcccaggttcaagctattctcgtgcctcagcctcccaagtagctgggattacaggcacgtgccaccatgcccagctaatttttgtattgtttttagtagagacggagtttcaccatgttggccaggctggtctcaaactcctgacctcaagttatctgcctgcctcagcatcccaaagtgctgtgattataggcgttaagccactgtgcccagcctttttttgaaagagcataaggaaattttgagccatctctgggttctgaagcttgaatatgtgtttattctgtttgccctcaaagcaacatcttttggtgggaagaaccctggactgaagacaaacctgggttcaaccccactcctgtgactttctggctatgtgaccctgtacaggtaatttaatctctctgagcctatttcctcgtttgtgaaacagtcataattaccctaatctctgtaagttgttatgaggataaatgtggatacacttattaataatcatcatagtaataattcttttttttttttttttttttttttttgagacagagtctcactctgtcaccaggctggagtgcaatggcacgatctcggctcactgcaacctccgcctccctggttcaattgattttcctgcctcagcctcccaagtagctgggactacaggtgcacgccaccatgcccagctaatgtttgtatttttagtagagacaaggtttcaccrtgttgcccaggatggtctcgatctcttgacctagtgatccgcccacttcggccacccaaagttctgggattacaggcgtgagccactgcctggccaataattcttaaatagtgcttactccgtgcggggcactaattaaagcactttatacatattactcatttaatcctcacaaccaccctgtgaggtaaataatattattttttctgttgtgcagatgaaaaaactaaagcacagaaaagttaattgatttgcccaaggtaacacagctaggaagcattaaggtcagaattgtaatgcaaaatgtctagctccaaagtccttgctcttaatcaccatactgtgtgggctctcggaggtgtttggtgaatgcttrtcatttctggaaactttcggctcaggcgcatgaagggggcacactcactcacgttgaggagcagcggcacagaggatggcattgctagcctgctcctcttgatcacagggcacttgtctaagggaggccacgttgttgaagagaagaaatagcatctctgacccaaggccatccgagagcctcgtgtcgctgggggacctttaaatattctatttctaaatttcaaagctagtttgggctatatttacagcatttaacatatgaaaaatcattgggaaagtgggcttttaagtggaacggttgtgtaatggaatatttcacgttccggttcagccataaagctcagggctgataaacaaagcatctgaagccaaatggctcctcatctgaccccaattaaaataaagatttcattccattctgtcctgacagagaggaacatattgttgcctttaagggagtttggtttagttaatgaaataattttatttcatttttccccccaaatacaatatctaattaaataagattcaatttgttaggacttctggtagggatatgttaactcttttaaagctatgttgcctacatgcctcaaaatgtggagggtgcttgtgaatcccacttcgcaatccattgtttaaagaagaaataagcccaagtcactttaaagacaaacattatcttctccaaggtatatctgtttacatctccactatagcaacctgtgtatgtaagtaagtagcatggattctgtacaaaatatcacatatttacataaagccccatttcctagaagcatttgtacttgtacatattgtaatttaccaatcaccatagatctgtccatatagaatatctcacgcagggagttgtagctgctaaaatatgttaggtaacataagttgggtattgatgccaaattatcacggagttccttcagagttatcttgcagaaatatgtgactgtctaaagacttcattatttaacattaagagtgaacaccagcaaaactcttcttttacaaggggggtgggttcttgtgtcatgctgtcgccgctttcttgtagtcttttctgtatgtgctgtggttcatcgtgactgttgggtccataattaccaagcagaacatgttggtgtcattatggagaagttctcttcagcttagctaggcatggggaggcatttggattgtgaggccctgattggtcacctccatgcccctgaagaactgccttggtagtccacagagctgtagggaactgctggcctgggcatcaggagtgccggccctgcctgagcgcctctcttctctgggcttcagtttcttcrtctttaaaatgacagcacggggtcagcaggtctccaaagacccatggctctgcctccctcagattctgtattcagtagagcagaaagtacatgatgttctgaaatccactaagaatttgtagtcagatgctaaggatttatattctgagaaatgaaaaattttttaactgtataaaacctaagacatttaaatcagacttaaaaacactctgtcattttccagtggctccttctgatgttctgtgagcatttggtcaatgttataagcatgcatcccgtgcaggcctagtgtcaggtatacaaagacaaaccattcatggtcctgccttccaggagcttacctcccagtgggggtgaaaagagagtcaagaagtcatcccttgttaaagtacaacagggtagggtaggtgagatgaggtgaggggcaggtgtcccagaggaggggatattttggcgggacctcgaagggcgagtgcagtttcaccagatggcgaagggcaactcattccaggctgaaatgctcaagaatagacggcacagcctactggggcaaaatgatcatttctgtgtgcttgcagcatggaagtgggctgagaaagaagcaaagagaacgataaaaccagaaaggaaggcttgtgaaaaacctcagaatcatagaagttcctttcaaaggagtatggccaatgtttttcaaactggtagaaatgggtattctttgaataaaaagagccaagaccctgggagtacagatgactcagttcccctgtcagaagcacacagggaacgataaagacccgacaggaccctcagccattgcccagactgaacttggcttaacccagtgtgtctcagactcattgaccatcaagccctcctgaggcagaagacctgttggtgatggggagatgcactggagctctagtcattagaaacacagaatccaatcagcattttagaaagactatgctggcctacaggggtgggaaaagggaagggaggatgtcatagtatcagaaagtatcaggcattagacagctagttgcacttgaagtttttcagggtacatttcaaggagaatctcctctgaatgtaatctataccttctcaatgctgatatgtgagttttacgtgagtccgatgagctcaagactggccagatgctgctatttaaagtcatctgcctggcagcctttcaagagctcatagataacattggtggctgttacagaaatgggctgagtgttaagaggttgcaggcagaagatgaagactgatgttaaagatttccatggctctttgaagccatttgttgagggcataccagtgccaggggctgtgcgaagtactcttaaatacactcccagctattccttgaaaccatctaaaaagatattgctgttgttccactttgatgaataaggagacagaggcataaagagagtagttgactatgccaaggtcacatggctgatattcaggtctcaaatccatctgactaactcctaagtccatcatcttaacactgcgcttctgtagatagcatgccgtagataacctccatctcaaagcactgaccacctgccaggtattatgtgaagcacctgacataatgatatttaatgtactctccccaaaaagcctaagaggtgagtggtattatccctgctaaatcaatgagcaaactaaggcttcatcatagcagccatggtcacggctagatcttgcaaagctgggaactgagcttcagtctgtctgctcactactccccctaaataatttttagaaagttattcatgttgctcagaaatgtttctctgtagccatgttagaaagttagtgggctcaaaatagatcaagacctaaatttaagacctaaaactatgaaaacctgtggaagaaaacattgggcaaaagcttcacgacactggttttagcaatggcttcttggctatgacaccaaaggcacaggctacgaaagaaaaactagacaaattggacttcatgaaaacttaaaaattttgtctatcaaaaagacaatgtcaacagcttaaaaaggtaacccacagaatgggtgaaaatgtttttaaagcatatatctagtaagggattaacatccagactatatagagaattcctaaaactcaacaacagaagaacaaacaactgattcaaacataggcaaaagacctgactcgatatttctccaaagaaaatgtacaaatggccaataagcatatgttcatcactaatcattcaggaaatcaaatcagaatgacaatgagataccacctcacacccattaagatggctactgttaaaaaagcagaaaataacaagtgttaaaaaggactcagaaattagaacctgtattagggttctctagagggacagaactaacaggacatacatatgtagatatagatgtagatatagatatagatatatggagcctgtattatagtcagggttctctagagggacagaactaacaggagatagagatatggagcctgtattagtcagggttctctagagggacagaactaacaggagatatatatgtagatatagatatatagatatggagcctgtattatagtcagggttctctaaagggacagaactaataggagatagagatagagatatggagcctgtattagggttatctagagggacagaaccaataggagagatatatatatataaaggggagtttattaagtattaacttacactatcacaaggtcccacgataggctgtttgcaagctgaggagcaaggagagccagtctgagtcccaaaactgaagaacttggagtctgatcttcaaggctaggaaacaatctagcacgagagaaagatgtaggctgggaggctaggcccatctctccttttcacgttttcctgcctgctttatattcactggcagctgattagatggtgcccaccagattaagggtggatctgccttccccagcccactgactcaaatgttaatggtttttgacaacaccctcacagacacacccaggatcaatactttgcatctttcaattcaatcaagttgacactcagtattaaccgtcacagaacctttgggtactgttgatgggaatgtaaaattgtatggctgctgtggaaaacagtatgatggttcctcaaaaaactaaaaatacagtcgccatatgatcctgcagtttcactactgaatatatacccaaaggaattgaaagcaaggagggtctcaaagagatatctgtatacccatgttatatttggtacccatgttcagagcagcactattcacaatagctaaaatgtggaagcaacccaggtgtccatccacagatgagtggataacaaaatgtggtatatacaaataatggaatattacacagccttaaaaagagaggaaattctgacacatgctacaccatggatgaacctggaggacattatgctacatacatttagccagtcacagaagaacgaatagtatatgattctacttgtacgaggaacgtagtcaaaatcatagagacagacagtggacaggtggttgccaggtgctgggaggagagggaaatggggagttattatttcaggcctacagaatttcagttttacaagatgaaaagagttctggagatagayggtgataatggttacacaatagtatgaatgcatgtaatatcactgaactaaccgtacacttaaaaataatcggcagtaaattttatgctatatgtatcttaacacagtttaaaaattggacaaaaaagaaagttagtagacattatttttgatgcagcaaccctctagcactctgagctaagttgagcccactggttagatcctgcccttgatactggagatgaaacacccagatttgagtatggttctgtctttgtgtgacagcgtttttgcattcaattcattgtgtgttactgagctcctaccctcatcctggcactgagctagaaacatgagtgaacagaacactgtctttgcccttcatgctaagagggagaggygtgcggagaactctcagtgcaggtgttaagtgcaaatagaagcctgttcaagtgacccagaagggggagagattaactccatttgagagagcaggataggcttcacaggtgttatgtcaacagtgggttttaagggatgagtaggagttcatagaccagacagtgaaggggggaaatgcctgacaagttcatttttctttcttggactgaatattgaagattcacttcagaacaatagcagaacacattgacrgcttgaaatcggtacccttgttgcctcagtttccttttaagaaaaatctaattccaccctatctgccaagctgatgtgattggaatcctgagacgtggtggcctatgaagggcttttgtatctgtcttctctgaatgacatttacaagtgtttgttcattttgagacaaagatcatggcatatccaggtggcctgcttcatttaaaatagttcaaacgatggaacctgggaaaaaataagtgacttttagacttttcttaacttttattttaggttgaggggtacatgtgaaagtttgttgcacagatcatttcatcacctaggtattaaggccagtactcactagttatctttagatagtaattaaacccctatgtagactggcccaaaggggtatagggctttcctttgcccagtgtgaagggagcccatgcttccttgctcatygattcattcggcagtggcaggatgctcgctctgtgctgggtgccaagcgtacagagaggagaggaccagatcctgcttgccaggtgcgcatagacaggtagaggagtcaggagcgtttgctgtgagccggaagagctgtgggagcagccagctcagccagcagagaggttgctcggcagcacttccctgaaagatgcctgagctgagccttgaaggatgaatttccaacatcaacaccactgtcataaccatctgccgtaagcaggagaagatggtggtgaagtgtgtgggtttggcggtaaattgcaggctccaactgccagcccttagtgtccttggtaagtttttaatatctttgtgctttgtctcgtcatacaaaatgggaattgtaatcatctctacctcttggggttgttgtgagggttgagttaatatatataaagtgatgagagcgctgcctggtgctcagcaagggctgggggaaaagtaagcaatactgccgtgtaccatatgccatttgctaagtacattagctcctccccacaaccctttatgatattctggtctttttcctataattcagatgaggaaatcaagtattgagagaatggctaagtgaggccgagcgtgctggctcacgcctgtaatcccagcactttgggaggccgaggcgggtggatcgcctgaggtcaggagttcaagaccagtctggccaacgtggtgaaaccccctctctactaaaaatacaaaaagtagccaggcgtggtggcgtgtgcctgtaatcccagctactcgggaggctgaggcgggagaatagcttgaacctgggaggtggagcttgcagtgagccaagatcacgacactgcactccagtctgggcaacagagtgaaactcagtctcaaacaaaaaagaaaagatttttttaaaaaggcggggcacagtggctcatgcctgtaatcccagcactttaggaggccaaggtgggcagatcacttgaggtcaggagttcaagaccagcctggccaacatggtgaaaccctgtctctactaaaaatacaaaaactagccaggcatgggggtgtgtgcctgtaatcccagctactggagaggctgaggtgggagaatcactttaacccaggaagtggagattgcaatgagccgagatcacgccactgtactccagcttgggagacagagcgagactttgtctcaagaaaaaaaaaaaagagagagagagactggttaagtgatttgcccaaaattgcatctartaagggactacacttgcccattggaccccaaagccctggcccccatctttactgtgccccttcttccaagctcccagatattttgaatagtgtttggctttaatggtagttgaaactcttttcrtaagaaaaaaattgttgacctttggtaagacatggtacagagtaaaagaatgggcttagagataagagagacctggattgaaatcccagctctgatcttgaccagcgctctgctgatgttggacaagctcagctgttgaccagcacgctggtgatcttggacaagctctgctgttgaccagcacgctggtgatcttggacaagttctgctctttatacaagttacttccctgagcctcctcagtaagacagaaataagaattccttccccacagggatggtcttaaagactaaatgagagaatgtgtagaaagctagtctgtaccaagtgcacataatagggaccctataaatgtgaagtgttcctccatttttcccaccctcctatgttgtacagaactcttctttataattagaattccccagtggctatttcacccaaggctttacatatttaagctatctcttagttgtcagcatggaaattcttctattacaagtgtctttctgacatgagccctaaaattgcgcatatctttcttcatccctgtgcatctccacacacattcttaaggctccttgcacagtaattacaacctttctctctgctagcatggggtctgggttgatgaagtaactgctccttttgtggctttgcttataaaatcagtgtcccatttcctaagatttgagccttacttgaggagtagaatgatagattttttcttttttttttttttttttggatggaagagagattggactgtggaaataaaactagaaatagcctgtatttctatatggtgaaacagaagatagatgaggatagtgctaacgtagttttttgggttgaaataatgctcataaggctcttctgtgctactgataggagtgttgaagtcacttagcagtttatatcaacagtcttagaaatggccaggcacagtgactcatgcccttctatcccagcactttgggaagctgaggcaggaggatcacttgagaccaggagttcgataccagcgtggtcaatatagtgagaccccatctctataaaaattaaaaagaaagatttagctggacatggtgttgtgcatctgtagtcccagctacttggggagctgagctgagaggatcccttgagcccaggagtttgaggctacagcaactcatgatcatgcccactactctccagcagcctgggtgacaaagtgggacctcatctcttaaaaaataagtaaataaaagagccttacaattgttcgtgctctgtcagcttcaggaaacgttttctgagtcactgcactgtgcctggccctgtgttgggcagtcatccctaagttctaaatgtgcacacttgagtaaaggaagtcggctgtagatgcaaacacttccaacaccrcgtggtccgtgctgccctgatggggactgtggagccccacagaagacatcaaactcagcctggaacagggatgcctgggttcatgttaaaagttgtcactcaaaggaaatttgtgtagggacccagtcacggaggtaagcagcagtggtgttgtgtggctggaacataccaggggagatagggagtggtgggaacagacagggtccagatttggggaagcccagaaatgcacattctggtcctcaacccaaaatgacagtgggcagtatgaccagtgagtttgatttcagcactatgtgagcagccccgtgaagacagctcccaccaagggcaccggcagcacacaggctgcggttttccccctacgtgtaccagcgcatcaataacggtgtcccaatagcagcttctaattaaattttatcacagtcctgaatgcaccgctgacccacacactcttccaagtgggtccgattcacaggatatttgcgcagttccgcagatctgcagatttgaagaggtatttattctcatttctgccttcccagtccagcagaagttctaatttgtggacggcagctttggtaattaacaaagtgtgttctgtgaagtgaagcaggaaaactcaggactggggagtctcgctttgggtatttatatgcttagttgtaaataccagtgaaatctttgaaatgaagacctgtctgtcttaaaaataaaaataaaaacccttaccatgcatgtcctcttcaaaatcacttgccagaactgagttatttgaactctgactagtacttaattttagctacttttttgttaaaagcaccaggaaaagcagtgagactttcagatctttaaatctccttttttggaagcaatgacaatgctcctccaaagtttgtttcttacctttgcacctttgaacaattgattttgattagaaacattacaccgagcatttactttgacatccctgagtacaaacagtcattttaatggtttttttaaaaacaaaatcatgacaggaacatcaatcctttgcctggtgtatgaaggccgggtatattaattggctgtcagattctgaagaaataatggattaatgtgcttgatcgtaatgctctgttcagagactgaagtttgatcctgatgtccccagcctctctgcttaacgcaattacagatatgcattcaggacatttgagtggattgcatttcattaatatgatttgagcggacaacattaagctgctgtcgggtcctctctgacagctaattactagaatgaagcatgtataccgctaaggaacaatggtgcccttattggggccattataacaataggaaaatagtgctttaaaatacttggatagttactttccatacgtgtcatgggccatgaagatagcttagtgtggggagttagaagaaaaaggatggacaagaactggaggagtctgtaacagcaggattcttgcttgtctttaaaagaatctaacagtctaacctacggtccttctaaaggaattgagaaatcacttgcttcatattgatcggtgggttctctcaagatgtagaagtatcatgggctgtgaccacacagacctgatattttgctctctcctctttgcctcctcccccagatgtctttcatcctggagaaagtggccatttgtaacacccgtggttttttaaatgtttcctttgagaaggaaagtgggcctttgactcgtggtgttgtgacttagccacatgggccatttgaatgtccacccaaggcgggaagagctgcatgtgttaatgaaagctcatcctctcagagctattcccagctctcagaattcctggatttactgagaccatgcactcaacacattcgtttggctcccagtgtccagcactgctggctactggtgataaagaggtgaataaggcatggccccttgtccccaaactcctcaagccctgtgagggaaacagacattataagagagagagagagagagagaaagagacaatgatgggtcataatagatagacatacaagagaagtacaaaaggccaggtgcagtggctcgtgcctgtaatcccagcactttgagaggccaagatgggcagatcacctgaggtcaggagttcaagaccagcctgggcaacatggcaaaaccccgtctctactaaaaatacaaaaattatcctggcgtggtggcacacacctgtaattycagctactcaggaggctgaggcatgagaatcgcttcaacccgggaggcagaggttgcagtgagctgagattgcaccactgcactccaacctgggcaacagagtaagactctgtctcaaaaaaaaaagtacaaaaaaagggcctgaaggcttctcagtggaagaggtaataagtgaggcaggtcctaaaagatgattaggagcttattgaatagttagaaggtggggtaaggcttctaggcagagtaggcacttgtgcataggccaggaaatgggatcatcagactgtgtttcctttaatagggatgatctggcttaaagatccatctgaggaccagaaggaaatcgtattcttagctgcacttttaagggtgtgttctgtaaccttgagccacccctgaccaaggctcctaagaggctctggaaaatcttgaactcagtatcaggagtcctggtttctagtcctaggtctatcccttaaaagtcatttggcctcagttgtctcatctatgaaactgacgtacccccaccatgccagcttcatagatggcccaggtttgatccaagagggtgcgggtgtattcccaggacctccagacttccggggaatggcaaaaccaggagttaaactcagattaggccaactccaggcccatatgcttcgcactgctccaggttcctttggacagccagtgtaaaaaagtcagttttattagcaagtaggaagctctaggccatccagcctcatctttggagcctcttccagcagtacaaggtgacatgaaaacgcctgacagtgaagcagctgtcatttgagagaccctgagccctgcccactcaaagcaatttcctaggggaatgtgccattcttctaggaaatgtggggggcctctggctacttgcccagacccctgttttcctgggatgtagcatccctggtgcagagaagttccccccagaaacctcagagtctttttagagtcctagagacagatcatcccagcttctcccaagatgtttgcttttctttcaaattgctctcaggaaagagagccagaagctattggtgaagcaatggagggggcggtccaagcaatggtcgcctggtgcttcagcgtgcatgccttcccctccgccctggcagcctccactcgtagtccctgagtgacarttcatcacccgcagctgggcttctcgggctattcttcggtaccactaggggcaaagtgtctaaatttgacccccagaaatcagatccctgatccaagccaaattcctctggggactagagattcttcrccacactggatggaagagcatagggcagggactccctgtaacggacactctgtggatgtcttctggatgaaggagtgtctgacatctgagagaagtggcaatggagcaggcatttctggtgtgatggccccgctctctgggcactgtcagttgacatcatagcagttcccacccctccaagttttcatccggacccgctgcaccgcccatcctctttcaccctctcagtattctgagtgattgccatgacaagaggaacttgatgctaagcaaagtagcaaagaatcgattcacaaagaaaccaagtctccccccaacctccctggttgcccacagatgtggaatgggggtgatgaggtctgtcctgcctccctcaaggctccagtgccaccatgtcagggagtgtgagcttcctgaggatgaagccgtgtcttagtcatggccccatccctagtacctgacacagtgcctggggagtggttcagacttgaggatcagctcttgcaaggagcctgagcatcccagccctgcctgagcatcactgcccctcctgggaaggaccctcctactcacctgagcctgtagtagaccactgggcaagtcagctgcctcagcaggggttcctcaggtggtaaccatgtgtcattattccccaagagcctcaatgggtaagcacagaagcccctgctttcttccctgaatgttttttgctaatttctcaatgggtaacacagccctgccaagatccatttccctcctattaccaggctagcgtttttctaatggctcctttcctagtgatcctcaaacaaagagacgatgttggagggtgacactccagcgctgcctctcactccctggtcattcctgctaacgggcttagctgcgcttcacagtcattatcacatgtcgcactgtctttgggatgcagagatgatttgccagctccatgatgcttcgtttttactaaaatgaaggcagaacaagaaaaattcttgtatttaaaaaagtgtacaattactcctgacagatctcatcctaaaactctcctatgtcccctagtccctatatgatggtgtctcactccttggcctggcatccaagaccttcacaacctggcccatgatctccactttcaattcccttcacattctcctcccatcactccaagtcccctggtgcagctatgttcctgagtgccttgggctgttcccacctgcattctctttgcctagaacaccctctgtggtctgcccagccaggctgtcaaggctcagcacacgcttccctccctctctggtcctctgtgaagctcttcctgactgtgtgcctgggagtgaccccctctcttcctttgtgcctcctttatacccagcaagcctctgtcctgacacctgggccaggcagtgccctcatgtgcctgtctgtctctcccatgaggctgaaagcacctcagtaacagaagccacgctggagtccttggtggcccctagtgcccagcacagagcctaactcacagttaaccctgtgaacatctggggagggcaaggaagccatctctgagaggccttctcaggctttctatgtagaattcatctcygtcttcctctcttgctctgaaggagtccctcggaaatcttctcttccagctgtttctttagagttacgtgtccctctcccgtaaggtagtaagatccagcacccagtggtcaaagacaaagccaactggcccaatagcaaactcccctcccactccacccaagtctagggttacagaggagtatgttggagggtgaggacagaaggagtttggtttgggacacgttgatgttgacacagcacattcaggtagagatgattagtagatagacattcaaaggagagtgctggagagatctagggctcccagggtcctggatgggctggaggacctctagccttgaagtccgtgagaacaactggaaatgttctttttctgtgagatgcaggaagagcagtcacacaggatctgtaagtggggaggagctcagagacccttcttcttctttctgttgactagtcagctgagacccagcaagctaacattatactagagcgttcatggcagaccctcacttataagctccttgaaggcagcagctgtgcaargtaaggccccacaatgcgggtatccagccactggaattacctgtgaggctggccagaacaagccttgacctcccagaagactacctgaaggaggaaatgtctctgggtgtgtacattctggtttgttggctaggcagccagtcattttccttcatgttgttacttagcatctcagagcctcagatcagagaggacatcagctttctatccacacagatagcctcttttgcaggctgtctggccttggcctacaccgttccttctggtgtcagggaacctcattctaaaaagggcccaaatgccatcatcacagttttcatgccctagtcctagttctgcactctgcagccacataacaccggatcattgctggtgatttccccactagtgctagaaggatccagttcttttccactaaccgttctcactcccagtccttcagatagtcttagccaggctctggtttatcattgtccctcctaaaaggcctgaaataccagatattctggatgtggttctgttgagaacacagtgcagtggacttatctccacccctactccagccttgtcgcattcagtacagtggcctctggctacatgtggctgcagagcacttgcaatgtgcctcgcccaaagggagatgtgccgcaaaggcggaatacacagcagtttcctgtggcctaggatgaaaaaaacaacgtaactctcattaataattttctatattgattaagtattgaaattatagcatatattgtataaaataaaatacattatgaagattaatttaccttgttttttttttaatgtgctactagacaattgaaaattatgtatgtgactcacattatattcctggtttgtttttgtttttgtttttttgttttatttttagatggagtcttgctatgtcacccaggctggagtgcagtggcatgatcttggctcactataacctctgtcccctgggttcaagcgattctcctgcctcaccctccccagtagctgggattacaggtgccccccaccacgcctggctaatttttttggtatttttagtagagatggggttttaccatgttggccaggctggtctctaactcctgacctcaggtgatttgcccacctccgcctccgactgtgctgggattacaggcgtgagccaccttgcctggctgatatattcctgtttctaatggactccaccacacttgagtacagctcaggattttctacttctgtgaatgtagtgggtcgcattattcttttgtttgaactatatcctacactggccattgctgaaccatgtattaaacataaaactttgcaccttgtacacctaccatggaaattgttttcaaaacaggccggccttaactagtacttctaaaggtgattttttttaaccaaagtgtaggaattcacaattgtcccaaatacacctcaacttgttagtttcagcctattgttccagtctcctgagaatttttctggtcctttttgtcaccagcttctttacagattttatcagcgttttctgtgttttaacctaggtgactactgatgatgtcggttgggatcagaacatgcagggagcgtacaaagcaccttcaccagcagtgttgacaacagctactaacccactgtctagctgtggctgttcagcccgtgtttttccattttgcccataaggagactgagtttctccagttatctcactgacaccagcttgtgctgtgtctaaagtagcctcgtcccactgaacccaagccccactcccaagccacctgaccacctattaataaaagaaacttgcccttcactgcttttagacaccaaatggatgaactaattttcactagtgttagtgactgataagagccaaacttgacttttatgtgaaacaacaacaagctgtaactggggccttcggtaccacaggcagaggaagaaatttatttggagcttatgccactgaggcagagttaatagagaaaaagttgggggacttaggcgaggaaaaagttcagtgcccttcaggccatttctcattgctcttgccgaaggatgaggcttcctgcagctagtggtggagacctggtcaggatcatctactcagtgccaggattcatggatggaagcatttcctgtgtgtgccactgctgtgctagcggctcacacggagtgcctccacctaaactctctctcccttactctcctttcatcatagtaagttttgggaataggactagaacttctaacttcagatcacttgcttttggcatgacctttatctgtggtctcaaacatagtcccctccattcgagctaggtctgtggttttggttctcgcctgcagctgtatgtgtgcrtgtctgaggtgtgtggatgtgtgtgtgtgtgtgtgtgtaacagagggaagaggaagatattctctcagctggcatagggcagaggggaaatctttattcgcttctctacctttgaagccttcgctataggaaatgttttgagtgtgggaggccagaggggagcatttgcagacctcctgcctggccgaattgtaagcattagctgtctttcccgggtggctcggcaggccctctctccctttctttggggatgatagatgaaggcaggcaccacgcaaaggtgcctgttttcaagcgcaccgcatgagggatactcactttatctcggtttgtggagcatctctcccccagaggacagagtttactttatgtaatgttaacgtctcgctttaatgctgtctccttaagagaactacatcctctgctttggagatttgaggttcatgtccagagggtctctagtccagggacgtggagtggggaggccccctaaggacctcacagagggtctcttacagaactaaaactgaggcaggctgggggataagcccttgagccccaaattagtagaggttgtgtatttactaatcttgcccatcaagaagagaatgatttcatgatttagaccaaacaattctggtccacttttcaaattgtcagttacaaatcagactccctcattgggatctgtctcagaggctgtggtgtcttttgcatttggaattagctggatgtaatgaattctggattttacatatttattaccattgtccatgctccctctggtcttgtaaccacttctgctacccagcctgactccctccagggagaacaagagggaggctcggaggcagctgggggagggggaagcactgtctcacaattgaacaagcagggttcacatcatgactccattgtccatgtgtttactccagcaagcattcattgcagccctgtccaggctaagccttgtgctggcggataggatctagaggtgaatgagtaatggtgtctgccttgagatcccatctagtggcagaggctgccccgtacccagcaggaggacaccctgtgggagctgctggctggatgtctgtgggtgctctgccgctggttccgggaaggaggcttcaggtcacatgggaggcaacactggctgggccttgaaggaagaggaggaggcatttgcccagctctgtgttggaaagcaaattaacctctgagcctcagtttcttcatctgttcttcacctgtaaaatagggatagtacatcaaacataagggctccagaaatatcagcagtcccctttcagcrtgcttkgtacttacatttaatgggaacaagtcttttgttcccccagcccccctctttttttcaattcttttaaagctgttgattctgcaggacattgtgtatgtttatatttctgtggtctctgttgtccagactgggaaaatggtagaaaagattcaaagggatctcaggaaagacctttgagaaacaggggtctttataaggagcatgtgggacaagaaagtgtccacaggacaatcgcatccaggaaagccatttgggggccatgcgcattggtctgagagtagcctcaggttctgccgtatctttgctcatggttcagggagaaaaccaagaactgtgaccttggctcgtaactaaaagacacaagagagaaaacattctgaagaccctgctctagttaccagcaataatattggtgtggagggggcaggtaaacaaacctgccagctgacttgggccctagacttggttaaaccctggcttgscttcccttgattgtagatggtagaagcccaacttaaacgaacttgagcaaagaggataggagggagaatttcttggcttatataactgagacatcccggacttgtcttgctaccagcatggctggatccaggagctcaaatgatgtctagactctcagtgacctctgtttggctttgcttttcattatctgttttattttcaaacattctcttgctttgctatagaaatatgggggcctctatggtccttctagcttgaagtgagtccctctcaactccagtgtctgtgcagcaactctcagtggagactgctcaagttagtgtcgatcacttctgggctaccctaaactcattggtgtgaccagaggatggagtcctccagtcggctcccagggtcgcatgcccacccctgtggctgggcagggggttggcaggatcagtcccaatgggaaaagagagttttattacctattcccagaggagtgtaagaggcaaatgtgtggtcaataggagggtggagggtgcccagaaggttgggggaccatggaaggtatgggaactaacatatgaggtgggggtgaggagttggatatcagggatggtttcaccaaggtgcttgcaccagcactgggctctaaggacaaggaagaygatgccagcacactcatgctcaaggcttgctggctggacacatgccrtttagttggtgccaactttccaagaggctcctgttggccatggctacaggttagaagatcaaaggggtgctttagggagtgggactcatgggggatgcaggagccagctgcttccttcctggcctcccagaagtctcggtgtgtatcaagctgaggcagaaagattccagggctgggctagcagctctggggctggcggcagagcccagagccaaggtgacgctgtctgtgaacagtgcagagatgccccacagcgctggcatctaagagcacagtgttccgggggcgagtctctgttcctgtagccttgacctgggacacgttgccctctgactagctcaagttcagggtggggccttcattggatttacctgcccacttgcctgacattcagcctctccccatttttactgaaattttaaacgtatttatgattgagcttcttttacagaggaggaaattagggctcagagaggttgtgacttggccaaagccacagaactgagaaaagtgacaatgccaaaatccatcgatctcttctcttcccacctgctcccatgcaccccaccatgcagccagtgatctatggcacccggggtatgccagccactgaagatccaggggaatcaaccccttgttcccaagtcacagagcccatgggccagggagatggattcagaaaatgaaatctgctgcagtgctagctaaatgttagcaatggctagaaaatccagaagcctaggcatgagagtttagcctccgcatgtggaggccaaaaacagagtctttgatccattccttatatccaggaaactttgtaaaaccagcacatgctcctcaaaggtgagtgcaaactgagagcaaagcgtcttcttggatgctcaggcttctttccccggcagctgaccccacactgcgtgtgtgtgtgtgtgtgtgtgtgtgtgtgtgtgtgcgcgcgcgcgcgtgtgtgtacgcgcacacacacacacggtgtcccctggtggaacctggcagggggagaggtaaggtctttcagcctctccaaagcccatggtcaggtactcaggtgggggagccctgctcgcagccccgaacctgatctgctggtgttcagcggaggagattacagagcttaatgattagctcctccaagctgcagctgatgccagcccctaccccctttacacctaattactctcattaatgagctcctctgctctccatagagagagtttcctctttggaataagaggcaaaaataccttgcccaggtagattgctgaagcctttaattattgcccacacctgctaagccttgtgactcacacctagtgatagtgcggagctgaaatggagcttgtttataatcacgagcagattttaactctttcaaagccaaaaagccttctgatttcaagagacatgtttccccaagacctcacacatgctcatttcatgcatgcacgccaggctctgctcccccaacactggggatcctgaggcagcagaagtgcagctcctgccctgagggagtgcacagtctaggaagagtgacaggctagaaactacacagacaattatagtggctaccactcaccacttccctacatcaggtcgcctgtagccctcgaaataaaactttgaggcagatgttactacctccatgttacagaagaggggagggggcgcagagggaggatgtcacttgccccaggtgccacagctagggagggtgtgaggagagtgggatcaggtctgctgggctccatggccagtgtgcaccccactgttgcccagaagctcccttgcatgccagactgtactgagggccacagtgaagtcactgcaggacacggtgaggttaggaggaaacaggactatgtgagtaacaacagaaggaacaggagcagaggctcaggggagaactgaatgccttgtgcattcgtagacctgcaagcactcagtgtggctagaaggtgcactatggggtgcggagcaaggggcaacaaggcaggaaggacaggcaggggccggggcagggtcctaaatgcaggggaaagaccctggacttcctatccgctgcaccctccccagtacctcacaaagcacccagtacatagcaggtcagtacatgttgatgaatggagggacagccatgctaaaggcatgataaccattgaaggatttaagcaggggagggacagtaccagagggctgtctggaagaatctctgggcggcttactctctgaacactgagattcaagggcaaagtcctcaccacagccctttgccccaatcgagaggtctgcgctaggctgtctagttgctcagtgttagaggtgcgattaaacccagatctttgtgtctgcaaaaacccagctctgtctccttcaccttgtgtcctgctagatagaagataatatactaaatggcttagaacagaaagacaagagtttcccaccatggctgctaggattctgaatgagaaactttcaggataggagcacaggtttctaaaacaccagagctgctcagacagaaccaagtccctctgaccagatttagacagattgttagatgaattgatgtaatatttaatagcatgtatggcatggctccgatgaccaggagacactaacccgtttgctacaagtcctaggagactaaaaatcatttttaaaaaaacacaaaaaaaactaagctgtgtctcaaacaaagaacaacaacccacaactgagtctctcttacacatctggccttggggcaggtactttatgtgaaatctgtctgtgcctcgcagcaactctgggaggtagatggaattatccccatcttacaaacgaactgacctgtgacttggggagctaaagacttccccacagtcacatggataatgagcgacagagccaggagtctcagcccagcctgtcccactgcagagccggagccaccccaggacacactgtccctcagaagctatccatcacaagacatcagtcaccacacatggaacccggaacagaccctggcagacttggtgtgtgcatgcgtctggtcagcccagagctggggaacccagcaagtgctaggcctgggaagcctgtgtgttctggatagagactgtctgcacacagaggctggcctgcaagacccaggctttgctctgcttgggatttgtctcctgagttcctggaggctgccatggtgggggtcatctggcagccaagggaggactggagcagcagcggcggcatggccccccagcatctctggaccaccatcggcatgccagcccctgctcttggggtagggattccaaggtactgaaaacatagtccctgcatggggcctctgctggactcttaggaaggaggagaccctggcgagtactacctggtcctacttgcctctccaaagcactcagtgtagtagggggaggtggtcagtcggctagatccatcaactcttgcatccaagtcaactcttgtctcctaaagcctctcttgaattcctccctttccattcctgcctggcagctgcctcagtggacacagtgcttccttggcagatcactggcctcactgagatcagaatgatcctcttgaagtgcaaatatctacactcccttcccccagccacccaaattttagggttccctgttgctttaggacaacatgacctaaaaagacctgcatgatccatgcccaggcttggttggagcccctccccctctgctgtcctgttccagcctctctcatttcccctggcactcctccatcccacagaggcctggggcttctgcccaccttcccctctgagcacacaggttactttcccaggaatgctttctgcagcctccaggtgtcttcttgggaccttgttctttgttctctgcacagcaggaacctctgcttcaaggccattgtcccagggggtaattgttcctttatggggctgcttgactatcctcaggtagctgactgtgwtagctccaggggctgatacccagtaggctctcaacaactactcactgaatcagtgaatgaaaggcaaaaacagccacccttcctcacaaatttgggaaaggcttcccataggcagagacctttgagttgggtcctgagtccatgtttgccaggccaagggaatgataggcaagaggtatttgatttgaccatgtgtgtgtttgtgttaaaaaataaagataatgggccgggtgcggtggttcacgcctgtaatcccaacactttgggaggctgaggtaggcagatcacttgagactaggagttcaagaccagcctggccaacatcacaaaaccctgactctactaaaaatacaaaagttagccattcatggtggtgcacacctgtaatcctagctacttgggaggctgaggcacaagaatcacttgaacctgggaggcagaggttgcagtgaaccaagatcgcgccactgcgctccagcctgggcaacagagcgagactctgtctgaaaaagaataaaggccgagcactgccactcatgcctgtaatcccagcyctttgagaggccgaggcaggtggatcacttggtgccaggagttcgagaccagcctgaccaacatggccaaatcccatctctactaaaaatacaaaagaaaaaaaaatagccagacatggtggcacacatctgtaatcccagctactcaggtagctgaggcatgagaattgcctgaacctggaaggcagaggttgcagtgagcagagatcacgccactgcactccagcctgggcaacagagcaagtctctgtctcaaaaaaaaaaaaaaaagaaagaaagaaaaaagacaatatgcatattgaattacagctttcctaaaagctgacaccccttttctgaataggcataaagaagcataatcaaattcagctcaagtgttccccctccaggaagtcttccctgatcaccccacctgtaaatagcaggggcaatgatgcctactgcagacctctacttagtgactagctgatggcaggtggctggtaggacctgaccccaccactccttatttgggtttcttaatctctcagaacctcagtttcctcacctttaaaataggaataatgatagctgctgggcaaaggctgagtgaaggacggcctcttcggcagcacctggcacaggagggccgtctgtaaatgcacgcgtccttcctggtgcctgggcttccctcactgtttcttcctcccgctcccgcttccttgtttccacgtgttgctatgcagcctcactgtcctggtaggtttctaggtagttgccatccccaccattgccacctccaccaactaatagctgctgtttagctcacacatgcatattttagcctcataatttttcttcctgagtcggcctctgcagattctaatcacctcactttctcttccctgaattccctccaatttggagattcaaaagaggcgcttctctgcatgaacatgctgtgattcaagttgaaaataaatttctgctggcagcagccagctttctgaaaagtgacatttaagactgacagtggacaagattgtaaacaggtttccaataagaaaaaaaaagtcagtgtgaagtgcattctatgaatttttttaaacaatgtgtgcgcatgtctataattgcagccttgctgtgacgccgtctgcttcaggaagaattctgggacagtgtatgtctgtttgaaactatcttggtatccttttacttttcggaaagcagcttcatttcatgggactcactcccatacaagagtgtagcgtattcattcattcgacacacgtgtgttcagtgtgccattgtgtgccaggctgtatgcttggtaaggtcatgaagacagttccctccctatctgtagagagttcacatcctcaagggggaggctggcggataagcaggtgacttttatttaataggatagaggtaagcttagagtgctatgggaccccagaggaagaccccaagagggatggctatgggggcagggacagcttcctggaactatggcacctgagcatggcttgtaagatgagatgttagcctaacaaagaatggaggaagaggcattctattctaagcagagggaataccgtgagcaaaagcaaagaggtttgaaagcacagcgtatgggaagctccaggcctgtagcaatgattgagacttctggtttgcagggctaatgtcaagaggtgtggctggaggggccttggggggctggcacgctaagctaagaagagccttgaagcctctcacaagggcagtgccgggcttccgcaggtgtggcgtgagcacatgtccagagtggtgccttgaggaggtctctcgggagtgtcgagacacagggttgggtggagagagtctggaagcaggggccctgggaggaggcaattgccgctgtccaggcagaagatggggaggcctgggaaccctcacagagtcagatggagggctcaggggataagaacatttagaaagtaaaatagcccattggcagaaggtctgttattttgtatttctcccaaaacaaccttgttcatgagtacctcagattatcagctcctacttcggtaggggagtctgccctgacactagggaatatgttgctagttaaatgaattcagctgacatttgccttccccattcatcatgactaaatgaaagctcttttctgagtttcttggaatggtcttttgacagtcccctggccagaaccacaaatcaccctgcagttagcgtctaaaggaagcaagaagcaagaggctcccaatgtgtaataccaccaaagcaagtggaagattcgtttgatccttgtagggggtttttgccaaaaggcgtttggggtcctgcaggggcagacaggccaagtgggcagacagggaaaggcatggcactatctagtcaaaactctggcatccagatgctctcttggggccacttctctttccgcccaactaaccagtccctacgtgtttcagtagccgtgggacagaggggagcagagggctgggcaaacaacctgtcacttcagacctcacaggtcaaacgggctgaaaactacaggaattccaggctatctttcagggctgtgtgcaggttaaatgaggtagtgattgggaagccacctgaaaagccgaaaggtttcccaaatgaaaagaatttcaacagcagccatccatttcccagctttctaagacagtctgatgagaagcagggctgaaaagcatggctataatggagttcaggagtgatcctgggatgtcagtttccttgtagctcctctcatcaagagcaaatgagaggcgatcatgttggtgaccttttgaaaggtggcaggtgacagaggaaagaacccagactttagactcagacatgtctcacgtgaacctggccccaactgcttgtcatgaggacttgggcaagttgcctggcttttcagagcattatttccagatctgtgaaaagatggtagatgccttaccatgcctgtcacatatttatttccttgtttatgtgacctccccaccctctctgagaggagagaccttggctggtttattcattaccattctggtgcttaagcagtgcctagcctgtaataggtgtacaataaatagtttggttttcatttatcactcacttttaatacctccctgtcastgcatcagcagtaaactggattaacacgaagtctcatttggtgtcagttgtggaataacacagtcagctaccactcgcatcccttgaggttctggctcttcatgtccccttgtggatcttccccaacattttattataaaaatttacaaacataccgaaaagtggaaagaattttatggtgaatacctgcatacctaccatctaggttgtaccattaacattttactagacttcctttatcccatatctgtccatctgtgcatctatcaatgcatctcatttttcttgcatttctgagtaagtcacagacatcagtacactttaccgtaaaccattcagcatgtctatcagtaactagagtaaatactgtttgaacgtgagtagcaggcactcagtaaatgttcactgctattttggttattggaaaggagggagggaaactcatggcaattcagtcttcccaaaatgagacacctgctagccagtgttgggaatggccaccatttcccaggaaccagactgctgttatttcacaggctagcctcgggcagggaaatggctgggagtgacagctaccatggtgcccccaggcacagacttcggccctatgccctggacgcttattcccctaacaaccgccaaaagccttttgaagacttaataatgtgactggaacaagggaggttgggattctcatggtggatttctgcagagcacagttgagtttggttatctgggttcagtccgtgtcaggtcctacttgtccagatgcagtcccaaccctcttttctcggcattgcctatctcagaagggacacggggattaggagatcataaatccaggttctagaaactcagaatctgggaccctgaccagcaaatgccttggccttgcctaggactggtattttccacatgtcccagtgaagagcccagggatgaacagacccctctgagaacttgcacttttccaagaaccacgtggagccatcatctcaattcatgtgttcacgttctatcaacaaataccattgagcacccttgcctttgaagttaacaaccttgggagaaactgaggcagtccccgagcaggatttggaaagcaatttcatttaaaaggggctggagggaggggggaggcactcgtgtkcatttaatctttttttttttaattatttttttttaagttccacggtacatgtacaggatgtgtttgttacataggtaaacgtgtgccatggtggtttgctgcacctttcaacacatcacctaggtattaagcccagcatgcattggctcttttccctaatgctatcccccagccaccaccctcccccgacaggccccagagtgtgttgttcccctcactgtgtccatgttacgtcacccaggctggtggagtgcagtggcatgatcacagctcactgcagccttaacctcacgggctcaagtgataccctgcctcagcctcccaagtagctggaactacaggggcatgctatcacacccagctaattaaaaaaaaaaaaaaaatttatagagatgggatctcactctgttgcccaggttggtctcaaactcctggcttaaagcaattctcccgccttggcccaaagcaatcttgccttggcctcccaacgcactgggatcacaggcgtgagccactgtacctggcatatttaatctacacccatcttctggagcaggaatttgctctcacgtcccattaggttgcagcaggagataaaggagcaagccaggcttggcctcaaattccagtctcttcactcactattgaaatgaccttcagctgctcatggaataccctgccctcagtttcttcatctgaaaatggagagtagtgagaccagcttccttgggatgtagtaagatagagcctgtgccaaggggcctaatggtttcattgacatattgaccacctaccctggaaggttctatctggggcattggggatgcagccatgaggaagagaagtagagccaccgccctcttatgctaccgtctgggtcaggcacggaaccaagcatgaccacctcggtttaaatcctgcccatgtgaatctagagaagttatgtggctcagtttcccaattgtaaagtggacacagcaacaatatctaactcatgggtggttacgagaattaaatgagtgaatacatgtaaaacacctagaagggtacctggcacatggtaagagcatacaagtgtctgttacccttgtactactagaccaccaccactaccgcctcccacacctcgttcccaaatgcgttagaatcatctgagcaactttgtgaaggtctaacccatggcccaggaacgggcattgaaaagaacctcctaggggaatctctatgtgctgctggctgtaggaaccactgatcaggtgaccaacaaatgttgggttccaaaacacaggtacagaagctgaaactcacagggaaggagcatgctcaggaagacacagctaggaagtgctagaactagaacaccatggaaggctggagactcccacatccaggctcttgggtagacacttgcccaagatcagtcagcccagcctgctgggccttaaaccaaatctgggttctccacaccrtcgtgacccctttwtcagctggaggagatcatctctcatatacggaaatccctgtatctcaatattaagacacttaccaaatattgtaaccaggaatctcccgaacattttttttttttttgagatgtggtccctctctgtcacccaggctgtagtgcaatcgtgcgatctcagctcactgtagcctccacctcccaagttcaagcattcttctgcctcagcctccaaagtagctgggattacaggagtacaccaccacgcccagctaatttttgtacttctggtaggggacagggtttcaccatattggccaggctggtcttgaactcctgacctcaagtgatctgcccgccttggcctcccaaagtgctgggattccaggcatgagccaccatgcccagcccacccaaacatttaaactccctgaaggaggcgtataagaagctgtccccccagatgatcacctcacctacatacgtatatggaggagtatgcatgccactctggcattctatctgggcaactcttataattaatatttacttaaaacaatcattagtctctgttgggcgacacgaagcccacgttagcaatatttttagccaggccttccccacacctgcgatggcaggcgagtgtgcagcagcgggaacccccacagtgctttataaataagcctctgcctgcacctggaccactcaggcagcaggccaggggggcctcggatggggtcccaatgtgcactcagagcagcccgcgcttcagtgggtgtccacactttgcttttctttccaaacactaaaaatgcaactctgtccctcgacacagtgtggcatctaccccaggctagacctgccgaaaaggtatgatttttcctgaagtggttgaggatttcttcagtaagggagagggggatcataataaccgtttatcggatgctattaataacttatttatgttcgttgtttcttttaaaccacgcaacaggccagatgcggtggttcatgcctgtaaccccagcactttgggaggccgaggtgggcggatcacttgaggccaggagttsgaggccrgcttggccaacatgacaaaaccctgtctctactaaaaatacaaaaattagccgggcgtgttggcgggcgcctgtaattccagctactcaggagactgaggcaggagaaccacttgaacccaggaggcagaggctgcagtgagctgagatcgggccactgcactccacctgggcaacagagcaagactctgtctcaaaaaaaaataaattaattaaaaaacccacacagcggtgtgacaaagtaggtcctatttttatcctgctttcccagaaaaggaaactgaggctcggaaaagatgagtgcctccccaaggtcatgcagtgagcaagtgagattctaacctaggctggctgaacccatgcttttcactgtcctcttcctcagcctcagcctttttttattccattaaaggaacagggtgaaggtatatgctaggcagtttacatacattgccccagttacttctcacaactggaataagctcatgggagctaagaacaatgattcccattttacagaggaagaaaccaaggctctagagagtttgaagtcacttgctcaccatcacactgctattaagcttaacagccagaattcaaaaccagcctgatcctccaacaccagacagtttcccaccttatcaaaggcattaatgagagacatttgccatacatgtgggtaacaaagcatcactttatatagaccctaggattttctcattttcctactgcgctgcatgagctttttgcttaaaatatttgagctttttgcttaaaaatttttgcttaaaattttaaactttttgcttaaaaatttttatcccagtcaaaaactgccacggtaataacagctgatgtttatagagagttttataattgtcagggttcttctgtaattatttgatccttaaaataatgctgtgaaagtaaatgttacaggctgggcaaggtggctcacgcctgtaatcccaacactttgggaggccgaggcgggtggatcacttgatgtcaggaattcgagaccagcctgactaacattgtgaaaccccatctctactaaaaatacaaaaattagctcggcatggtggtgcatgcctgtaatcccagctactcaggaggctgaggcaggagaattacttgaacccaggaggcagaggttgcggtcagccaagattacaccattgcactccagcctgggagacagagcgasactccatctcaaaaaaaaaaaaaaaaaaaaaaaggaaagaaagtaaacgttaccccattttacagagcggaaccctgagcttggagaggctgagtgcaaacccatggccaataccagcagagcagaagctcagccaccgaagcctgcgtcctccccatactgggcgcagtgttgctccaaggcctggatctcttagatggggcctaaacggagatttagggacttttagtggagaaagagactgggatgggaagccagcaggggagcctggccctggaggaccccctcattataggtggtgacatctcaccagaggaacaggccgaaagttgtggtggtcagagaactacaaaaatagcagccctcatactgcttcctacacaagaggaacgggtggttccagggcagataagaatgactttacaagatgaaaatgatcagtgagggcacacaggtctggagaggagcggagttggcattttttggccctgcaaatagctgcccatctgctctctgtcagaatatgttaggggtgcatctggattgctgcccctgagtctcggctccaggctggtcatgtggttgtctccacgacaactccaggagcggtgtaaacggctgcgcttggagccagatgctgctctgcacatgtggtctaattaaacggtgttccctgtctccctccgccctcccctgcccctcccagcacacacatacattctctcttttccatccctccctgcacccctcctccttacatcctcagtcagcctgtctggctctccaccctgtgtgcctcttcttcagaaatgttcctgttgcctgatttgcagtagaataattcatgcaacaagcatcagagcgcttgctctgacccaggcatggggctagaagctggaggtgcagaggcgagtcagacacggcctgcccctgaggaggtcaccatctagtaaggatctgaccggcagccaggcaatgtaatgcatggcaataaatgctacagcagaggtgagcgtagggctgcagagcccagaggagggacactgacccagccccgggcaaggaggaagcatcccagggcagcttgccctgggttaatcctccaagggtgaagggcaagggggactccccagcctgagtggcctccccacagagggcccagcacacacaaaggcaggagacttacagacctacctggagaaccgtggctggccccgtgttatgggaatgcaggaagtttggggaatgaggagccgcggtgggcggggtgggcagggtcacaccttggggggcttctccccaactccatactctgcttgcttctgcaggcactgaaagccaaggaaatgggagcaactcagtggctgcctgagggggacaaggggccctgagtgaatgaagcctcctgggcatgtttccctcgatgcagtcctgccctggacactcgaggcactgttcagggctgggcggggtgtaccggacatgctgaggagctatatttttgtgtgtattttgagggtctggcacccaccacatctcagatctctggctctcaagaaagatgcccccaaatgaggaagaggggaaccagcaactcccttgctcaccctgtccatgacgtgcccgccagccccagtgacacagctcctcgctgtgaaccgccggctggctgccccaccaggccctccacctgcttcccagttagggagcacttgcttcttcctggtccttggtttttatgcctccccctcccccagtggcctttcttggaccccaccccacctggacagagtcacctcagtcacccatatttgtggaatgacaggtacagaaggccccatccaagacatgatgcccagctcacaaagggcatctcaaaagagccrcaaaggacgttgatctcccctgagcacctgctgtgtgctccaaagtacgggcagcttgacacacaccatatcaccttaaacctcacaataggaagtaggtagtttccccaatttatagctgaggcaactgagctcagggaaattcacttgcttccccatttcttcagagcccctgggcggtacagaatccccatccagagattctggattcctcggtctgggactgcagctgcagaacatggaaaaggacatttttgtgtagaaaatcgtctgacatatcttggatttcctagaagcccaggggaaaactgtgtttgggtaactgagcgtgctcagagctcgggggtgtcgtgggaggagcctggactttggggtcagagaactgacttcaagtgcgactatggttcttcagctctgtggccttggtcaagtcacagctccttcctctctaagatgaggctcaagagcctgtctttgtagggttcttacgagaagtcaacgtgcagccacagagagttgccatgtcctgcggcgtcccagccctagcaggcagcttcgtggaggttccttttcttcttgctgtacgttgcggtctcgcctccactgccctgtcacatgtcctgcacaggtagcgcgtgtcacatgcactgaaatggggctgcttgagtacaatcacttgccatctgctttgggcaggaaaccatcctaatttggggtggaaaacagatcctttcttagcccctccgctaagagtcaagccccccactaggcactttccatgcctcgattgtcaatccccacacagccctgtgaagtaggaagtagctcccccattcggcagatgagaaggtggtctctgaggggttagggacttgccccacgttccagacatgttaagtggcagagcctgcattcccacgcagtgtctttcactgttcccgactctcccatcatgcactgtgcatcgtgacacatttctctatgagaggttgtggcagacctcgtaaagaaaagccttttctatatctagaaacaacacattcacattagaaagcaccttggagactttccaagcttcccattttacggaggaagaaaccgaggcctaggcaaggaaaaggaatccagaccaagtcaggcatttgactcccctggcgctctttccagttcctgatgctgccacgtgctcacgactagaaacttcctaccgaagtctcctgtgtaccaggcccgtttcaacaccagagactcagccctgcatgagtgacgttcggaggaggagtgataataaataagggagtcatggggctaataaataattctgacaattaatcatgtggacagtgccacagagcaccccccagaggactgtgtcaccaagcgatgggtgggcagcacaccttcaggggggcctgtctcctcagttagggggttagggcttttcatttgtggagacgaatttgtgcctcttctgttttatcaccatgtccttttttaccttgagatccatgagtctcatattcccattgctgcagctacgtgggttctgcggctgattgcgtttcagatagattctgttgctctaggggcctatcaggtccctgacacgtgtcctctctccagtgcacttcctcaaaccgtgttctcctcaytagggaaacagaaatctctaatcagcttggcgcttcctttcttgggactttggatgcaagtgtcattgtgttgaaaccgggaatctggcccctggtgagagtgaggcaacccctggcgtgagtgaggcaacccctggcgctggccacgtggttgagccagcaggtgtttgaggttgagatttcagtgggcccccatttggtttctgtgctagggagagagctgtagctctgcggcagcacaggggtcgtcaccgtctcactcatgtcagctctcaccttgcgccaccgctgcactgtggactcaccctatgtaatggggttgaatgcctagagcatgacatagctattacctccattgtatctgtaagaaacagaggctccaagagccgagatggctacagcaggcatagagtgcagccaaaacccacttcatttctccaaagccctttctgttcaacatcaccttagaatccctgtctgaattgctactagggcagccctgagtggccattgatatgtcaaatacaatcttgtgattacctctcttaatcaaacataaataatattgtgctgcatgagccccagggccagacagacttcgtttcaaactctggccctgtcattgcccagttcttcaccctcaggcaagtgacgtcccctttcagagccttgatttccttatctgtaaaatggagatcatcatcctacctacctcacgcgatgctgtgaggagtaagtgagctaatgcatgtaaaaccacccagtgctggtttagggctcagcaagcggtagctgtttttaatcactgcacctgctttcctcttagagccgattcccatctgcatttcttatgggaagaaaatcttacgctagtatgcatgaakaccaccttcattgtgtctccttagcttccacaggcctcccagctcatctgccgttcctgcactaatcagaatttcctgacttctccctgtttgtctcggttaatgcagaaggaaggggctgctggcacagaggagccgaggcgtgggccgacacgcctgtgatttgaatgtctttactgtaatctagcaagcgcgtgtgggggcttctgtcaataccagagcggccggccagaatgggcaaatactggcagcccggccatgcctgcccctgcaaatcatcagagtagctctgggctgacacccacatttcccctaacttaaatcatctgaacagtgagctggcttcacgatgagacattgattctttgtttagggcttgttatagtgacaggggcccagactgggagtctatttctgacatgcctcggccaccgtgcaaatggttcagaaagctgccttggtcctgtcaccccaaaatgtggcatgtccccacccagcccagccagagtcatctgactatagccatgcagtgacccaccttcccaagtccacctgatggtcctgggatccctggtaacccaggccctctgagggcagggaaggagtgtgtgtgggctcaggggtcattagaccatgagccctgggaccttaggcaatgtgcttcacctgtatgggcatcccttccttatccatgaagtggaaatcatttcagaagatctcccttctggcgaggatttggtgagtgaaggatgcaggtcatctggtcccaaacaggagctcagcagaccttggctgccttctcctcacactcacgccagtgtctggctaacctgaagtcattgtcatctaagcctgctgtccccactctctcagctttctggtaaacaaggtcttggcattctttaggccagacaccacactagctttttccatgttggccgggacctcaccctggctccttggcagctgccacagctgaccctgtaagaagaagccgtcagaccagcacagcgttctcctcccagctctgggagggatgctgaggccccagcagggaatttggaggcatttaaacaaaatgcaactgagatgggactgctggtgagaaatagggccaaattccccagcttgctttattcttaagtttttaaaaaggactgtcaagtgggtccaggctctgtgctggtcactttcacctgtaccaggggttgtccgccttagctgcactggagtcagttggggaatttcaaaatctgtgactctggcattggggattaaaataacccaggtaattctggtgaatagccaaggatgagatctgtgaacctccaccatctcattcatccctgcttaatcccccagcagtccccggaggcaggtagctctacccacattacatgtgacaagaatgaggatctaagaggtgtagtcacttccccagggtggcaccaagagcagcaaggagcagagctgagagtggaaccccccaatctgccacttctcagagtgaccatgaatcagagcctgccttctaggaacttgcagtgtgctggggacagtccacctgggtacaggtggtggttggtggagacatttagkgggaaatgaggtcctcttcatctgaatgattcaagtaaggtttccccaaggaagtaccatgaagaaggcagccaggagtgagagtgcacaaaatgctcagggtgtggtggacagcccagaacctctgcaggaggagatgtgtgtgtgagtgaggtggacagggtgtcataagcaagaaaggcagctggagaaggtcacttagagccttgagtgtcatgctcaggaaccaggctggccccacctgcatggacctgtgcagtcacacagggccccaggcttggcttaatgctctgctgtcaccgtcctgaaattcctaacatttttacctttgaactggtgtggggatgttttgtttgttttgtttcragacggagtttctctcttgttgcccacgctggagtgcagtggcgcgatctcggctcactgcaacctctgccttctgatttcaagcgattctcctgcctcagcctcctgagtagctgggattacaggcgcccgccaatatgcctggctaattttttgtrtttttagtagagatggggcttcaccatgttggccaggatggtctccatctcttgacctcgtgagccacccacctcagcctcccaaagtgctgggattacaggcgtgagccaccacaccaggcctgaactggtgttttataaatgggacagtagagtaaggacattggcaaaggagacacgcacagaacatgtgtctccatggggcctcgccatcccaaccccatacaattttctagtgcctgcagcaccaaattccagtggacccaggatgtggggacattcagcaggactctacgtgctcacaaagtaaacatgtccatgtctgacagccccaagaggccacactttccattagaaccagaacttgcttcaaatacagaaagaaggcaataatgtttttttgttttgttttgttttgttttgtttttgtttttttgggtttttttcctgagacgtcttgctctgtcacccaggctgaagtgcagtggtgtgatcacggctcactgcaggcttgacgccctgggctcgagacttcttcctgcctcagcgtcctgagtagctggcatgacagacttgagccactagccaagcccggctagtttttttttttttaagagatggggtctagacggggtctctctgtgttgcccaggctggtctcaaactcctgggctcaagagatcctccccactcagcctgtgatgttctaagaaacatgaatgaccaaggaaacctatcatatttcttatttatgttactttgtacttagccaaccatttatcctgaaaatgatgacatagaaggaaaggcaaagataaaacaaccatggttcctttacctttctcatcagtaagctggagatagatagagaatgtgcagatagcaagaagtgaaataggccaggtgcagtggctcacgcctgtcatcccagcactttgggaggccgaggcaggtggatcacttgaggtcagttygagaccagcctgaccaacatggtgaaaacctatctctatgaaaaatgcaaaaattagctgggtgtggtggcaggtgcctgtaatcccagctactcaggaggctgaggcaggataatcacttgaacccaggaggcagaggttgcagtgagcagagatcacatcgctgctctcttgcctgggagaaagaggtagactctgtctcaaaaaaaataaataaataaaaaggcaggcacggtggctcatgcttgtaatcccagcattttgggaggctgaggcaagaggatcatgaggttaggagatggagaccatcctggctaacatggtgaaacctcacctctactgaaaatacaaaaattagccgggtgtggtggctggcgcctgtagtcccagctactcaggaggctgaggcaggagaatggtgtgaacctgaggtggagcttgtagtgagccgagatcgcgccactgcactccagcctgggtgacagagcgagactccatctctaaaaaaattaaaaaagaaaaaaagaaataaaaacaatggcgttagttttgtgcagtgtttccactgtctgatgagaacaaaatacaaatgtataaatgcatgtacaagctataaaatacaattgtacatatgagttakcatttaaaactggcattgcacaaggccaagctaaatgacaaagttcatgccaatataatttacatttttattttttcttataatgacattaaatagtacatttaaaagcatcatgataggtctaaaaagacaccataaaagaaaaaaggtttatattttagttcggcacttctatattttaacagcacttttttcctgcatatttattttatatttggtcttgcatattatgttgccagccctggtaagacccaatctccaccctcaggggaaacagttatttgttgaaagtctatkgtgaaagaatctatttgtttatcatctgttttactcttcaaagcaaccctgtgaggtaggttggcattgtataattgtcacagacgaggagggacaagttagtcacctaagagcacatagctagtacagtcagggtcaaggttcaaatgcaggtctttccacccaagccacattctcactccaccatgttgtgtcatctaaattgatcaaatagaaacagagttttaagtttccatacagatgcctctaccaaaaaaaaaaaaaaaaaaaaaatcaaagacaaaaaccagccctctggtgtgctagctgtcacactgtactgttgttatttgctccctgaactagacaggattctttgatacaggagcttttctttttaatgttttttttttcttttttttgagacgtagtcttgctctgttgcccaggctggagtgcagtgccacaatgttggctcactgcaacctccacctcccgggttcaagcgattctcctgcctcagcctctcgagtagctggctgagtagctgggactacaggtttgcaccaccacgcctggctaatttttttttttttttttttttttttgtatttttagtagaaatgggtttttgtcatgttggccaggctggtctcaaactcctgacctcagacaattcgcctgcctcggcctcccacagtgctgggattacaggcatgagccattgtgcccggcctttttaactttttattatggaaaatttcaaacttatacaaagtcagtgaacccatctcccagcttccactgctataaatattccattattctattttttaagttaaaaaaaaagttttaattaaaaattttgattgtccttaaatatacataaaatttgccatcttaactatttttaagtgcacagtttagtggcattaagtatattcacattgttccatctccagaagtttttttgtctggcgaaaccgaaactcagtacccattaaaaaactcacccttccccctgccccagctactggcaagcaccattctttctgtctctgtgagtttgactaccctaggtacctcatacaagtggaaccatgcagcgttgatctatttgcgactggcttatttcacttcacgtaatgtcttcaagattcctttatgttacagcatgtatcagatctcttactttttagggctgaataatattcccttgtgtgtatatgccacactttgtttatccgctcctccacagatgaacccttgggttgcttccatcttttggctgatgtgagtagagctgctatgaacataatgttctgccattcttacattatctatattttcatccacttctcatccctcatttagttattactgtttgtaccaactctattttattcgtgtttgcattcccctaacacagagcctagaccatagtaagtgctttaaaaatgtttgggtgtgtggatggatcttccaaaagtatgtgttttcttaattttaatttgtattttattgtttttaagttatggggtacatgtgcaagatgtacaggtttattacacaggtaaacatgtgccatggtggtttgctatacctatcaacccatcacctaggtatgaagcccagcaggcatcagctctttttattattatttgtttttttatttttaatttttttttttttttttgagctggagtctcgctctgtctcccaggctggagtgcaatggtgtgatctgggctcactgcaacctctgcctcccgagttcaagtgattctcctgcctcagcctcccaagtatttgggattacaggcacctgccattatgcctggctaatttttgtatttttgtagagatggggtttcaccatgttggccaggctggtcttgaactcctgacatcagttgatccgcccacctcagcctcccaaagtgccaggattacaggcgtgaaccactactcctggccgacattaactcttttaaatgttaagcaaggtccataaagaggtctgagattctttccatttctcataagaatctcataaatgtgcacatagaattttgataaaaattaaatcagtaaaagaagaatgtaatactctatgggtcttcagaacaaggaaacttgctgaaaaatctgatgagagattttatttttatgccaataaaaatatcagcaatgctgtggatagagtcatttatttctggaagtatcaaaaacctttgaaatcaccaattttacctgttaacaaggattcaacttattaatgatagtgtttccgatggattccatatgtcaagaagataatccaggagtaaaacttgtctttttgtaacaaagttctcgacagggttaagcagctgtgttttactgtccttcaggtcatacttggaaaactctgctaatgtgatctaagcttgaacactcacggcctgaattccctgaattaacactgctatcagccagtagccccagcacctagaatgtcacctaagaagacaaagggcttaatcagcctcgtagaactaaatcagcacttcaggggagaataatgagacaccttgccttactcttctccatgcacaatggagtgggggccgccatttttacttgcaggacgcaggtggacgagctggtgggagtggcttggcacctcaccttgggcctgtggcagaaagagccttgacagcggtttgtttactcccaggagctgtttgtcactgaagggctggtgctttgtgggcaggagaacctaaagggttccaattttattttttttgttgtttttattttttgagatggagtttcactcttgttgcccaggctggagtgcaatggtgtgatcttggctgactgcaacctccgcctcccgggttcaagtgattctcctgcctcagcctcccaagtagctggggttacaggcgtgcgccaacacgcccagctaatttttgtatttttagtagagacagggtttcaccatgttgatcaagctggtctcgaactcctgaccacaggtgatccgcccacctcagcctcccaaattgctgagattacagacgtgagccaccgtgcctggccagggttccaattttaaagagaactctcctgtccagggaggtctgagggcaagcatttaggactgaggccgcagggagaagccaggcctgcagtagaccacatgcatgctgcacacctgggtttgggaagccaccagctgttaaccctgactctgcaatgtctgaatcctgtcacctgggcagatgtctttacctcagttattcctctgtaaaatttgagtgtaatttcgacttcatgaaagtttccagaatgttaaaaagagttgtgaagtgcgtagcactgtgcctcacagagagttaaactatgattattgcctttgtcttacaaggtgagttgctccagggaaaagagccctctgtgcctggtgccattcagacctttatgcatggttctgggtgacaacgtcactgccttgcagcaggattaagatagaagagttgggccctgaacagacaggatttgctcacctaagtcctattcacccttccaggcgcagccgaagtgtccacttatcatgttttctgacctgccgccctggagaatttgccgtttcctctttggactcctgtggacactttaccccccaccccaccccaccctggtaacactacaccatgtgatagactttcttcccatgtctaattcacacatctgatgctgttctttaagctcttttcagaaaaagccccttgtcacatttcccctgactctttcccttccatgcccatgtcctgttgcatttttagggcgcagacatcttgtccgggggatatcacctcccgtgagcacacaacaggcccaaaatgtttatgtctccccaaaggcgagattctttctgctctcctgcagctaaattctgcctcagactacctcatctacgaatctggttgcaaactctcttgaatgtatcgggccctcagcagacttcttcctggcaaccctgagccaaagctccaggagtgactgccagccacttcagtgagcatttccttggagcagctcaactccctgtgcatgggtgccacttgcctggcatcgagctctgagacctctttaccatcaggccaaacagtgtcagagacacactgagaccacacaaggctcctgtggctggaagcagggttcarctcatttcgtggttctttaaccagcatccctgagcttctgattaggggctgggctcttcctggggcgtacagagatgagttcagcctctggccccttgagctcctggtgagaggggataccagygaagactatcccagcacccaggagtgcacacggcactgggatgagtgactgccactcagaggcctgcatgtgtcaggaggacagtccaggcagaaggaatagaactggcaaaagcaatgaagaaggtgaggaaggaaggatgtggtgtgtgatcatgggatgcgtttggagcatgaggtatgtggaagagcagaggcaaagtgacacagaaggactctaggaaaggaagccagggtcagctttgggagggtgcgttwgctggttaaggagctctccctttcctcacccctattgggcccttgtgtgtgccacatatgttgccaggtgcacaatgttgaacaaaacagacaccattccggcctgcgtgaagcatatagtctagtgggaaaaagagacattagtcaaataatcgcacaaaggtaacatctatgcagagttcctgagtaggatagtgatgtggtctaatttgcattttagaaagcactctagccagaagagctggagtagaagagggacgaaacaggagaggagtgtggagttaaacctccaccgtggtttaagcctgtccaggcctacgccaaggtaggcgtagatggagagccgggggtgagcgtgagacaattcacaggtaaaataggaaggagttagaaagtctgataggtccactgtgggtaactgtggataatgacagttaagaaaaaaatagatttggggcgcagtcttgatgggatagtaattggaagtttcaggctattttgagtttgagacgccagcaggccatcaggtggaggttgagatggatgggtatagagcttcggaaaggtgtctgagctgccaggatttgtcaggagtcatcagtggatgagtgatgctgtgtgcatggatgagatcacctggagagagaattaattgccctgctctggtcccaagagtgagaacaaaacttccaagccacaggaatggaattctagctgagcttgtgttagttatcactagctggtttctcagctgttgagcaaggaagatgtaaacccatgccaaagtaataaatggcacataaagctatttttcccaaggaactagtgtggggtttttttctcgtacacaaaataaagtttgcattgttttccttcttgctccagcagccaggaagctcagagctaattttgtaacttaacttagatgccacataggacmtacatacccagctacttttttcccaaacaaatactttttatatatctatgtatttggcagccctgatgtttttctttgttgttttagatgctcatataagctgcctcagatcctttgtaaaattaggtagggtgtaactgtataaaaataaatattctccttaccctaatatttttgggtcatcctcacagcccttgtgcaataagtctgcccagcttctgagttaatattggctagatttaagcaggaagaactcttagaacttacggaagctcgacagtaaatttaacactcatgcaactcattaaaatagkataaaagtggagcttcaaacatctctgtgtttgctaccagggctggggggtggggtgttacccttaattcagctcaagatctgaaagtctgatctttcagaattgagaatacaccgctgaaattaaagacttgtctgtgtagataagcactccaaacatgttcaaagaaaaagtgaggtgttagctctatacggataggatttttttttttttaactcagggtatcgtcttcttgactcataaaacatggtttggtaaaagcaaacttgcttatcaaacarcataagcataaaatcgattggatagtatattttatttttgatcatccccgttctttaattattttaaaatttcagtttgctattgtttaaggtcactgtgtaaatggttttcaaagtatgtcccacagccagtggcctagggactgcaaagatgcctgggatgttgggggatgaggaggtggccaagcctggagaacccagccagcacccctgctctacccccaggtcctccagagcagctgatctctgcattatggaactcaggtaacagggttccttctgtataaaatcttatttttttctgagatggagtctcactctgttgcccaggctggagtgcaatggcaccatctcagttcactgcaacctctgcctcccaggttcaagcaattctctcctcagcctcccaagtagctgggcttacaggcacctgccaacacacttggctcagctcatttttgggtttttgtttttttgttttgtttttttgtttgtttgtttgtttgttttgagacggagttttgctcttattgcctaggctggagtgcagtggcatgatcttggctcaccgcaacctctgcctccaggttcaagcgattctcctgcctcagctttcctaagtaactgggattacagacatgcaccaccacacccggctaattttgtattttcagtagagacggggtttctgcaggttggtcagcctggtcttatactcccaacctcaggtgatccacctgccttggcctcccaaaatgctgggattacaggcatgagccaccgcgcctggcctagcagggctgcttctgcataaaatcctatctgaataaagggttccgctgctaaaagtgaaaaaagtgaaaagtttagaaatcttcacattggagggcatgtctccctaaatagcccttggggtacggaaggggatgtggggtgtagaatctgactgttggttcctgctctgccttctaccctctctgtgactttgcgggatgactcttcctctctgaaacagcttcctcatccataaaagaaaatgaatttcttgataatagctacttcactattagctagttagaaatagttagatatttctattattagataatagatagttagaaatagttagctatttctaactatcagagggttagaaaagttagcagatgggggccaggcacggtggctcacacctgtaatcccagcactttggaaggccaagatgggtggatcacttgagttcaggagttcgagaccagcctgaccaacatggtgaaacctcatctctactaaaactacaaaaattagccacttgtggtggggggcagctgtaatcccagctacccgggaggctgaggcaggagaatcgcttgaactcgggaggcagaggttgcactgagccaagatggcaccactgtactccagcctgggtgacagagtgagactccatctcaaaaaaaaaaaaaaggaaaagaaaaaaaatagcagatggagaaactctgcaaataggaatttcaaaactgatggctcttgctccgtgccactgacccacctctcccctctgcacttcccaggaggagccgatcactttctgtgaggaagccttcgtgtcccactaccgctccggagccatgagrcagttcctgcagaacgccacacagctgcagctcttcaagcaggtgcctccmtccctggtctggcctgggtctggctccctggcggggatttctgcagctgtctccactctaagtactgaggccgcaggcatggatgggactcaggccccaggcaaaagaggctcaggggagggggattggatgaagagagcagtcactgaccagacagaccctttgcaaatctgccgtgtggttttccaagttatcataaatatgcagccggtattttagaaagaaacttgcctgttgaaccttactttttgaaaactcctaccttggatacagtaaggtgcccagctgaatggtttttcccccttttctttgtacgagctgttgtgcttttgttccttctttctatagtttattgayggtcgattagatcttctcaattccggcgaaggtttcagtgatgtttttgaagaggaaatcaacatgggcgagtacgctggtgagaagcaactcattttccttccggggctgcaggctgctatcatttagggcatatttgacaaggagtggcagtgacttgcttttcctttattggggcttaggaagagactgctttcaagcttggccttgaaatgtttgaagaattcctctttgttttctgacaaaatgcacactggcccatatgaagtcgcccagcctaggatcagttgcttcccctgtgtagacaaagtctagttaaagtagtagccagcgtggtccactgggaagcacatgcagtattcagttaggaggcctggattcaagttaggactctgcctcctcacaagctgcaagaccctggttgagtcatttccccttctgtagctaaagttcctatccatgtcctgagagtacgtaccgtgtcccacctcacaggattcctgttgagattaaatcagagtacatgaggaaaggtttgtgcagtcatccaggacagttcctggcatggggactgtgtgcagtaagttttttttgttgttattgttgttgtttttgagacagagtcttgttctgttgtccaggctggggtgcagtggcacgatctcggctcactgctgcaacctctgcctctcaggttcaagtgattctcccacctcagactcctgagtagctgggattacaggcacgtgtcaccacgcccagctaatttttgtattttagtagagacagggtttcgccatgttggtcaggctggtctcaaactcctgacctcaggtgatccacctgcctcagcctctcaaagtgctgggattacaggtgtgtgagccaccatacccagccctgtttctttaaaatatgacaaattattgttgagtgcctggtccctgcagatctgaagaactgaaggtcttgtcttctcatttttcagaggaggcatctaaggcccagagaggtgttggtggctgagtctacctcctgaatcccagtctgaccttctttccaaatcccatcgcctcagtctttggcagcgaaggcaaaaccagatgcaaaataatacccatgctgctggcccccttttattgctgggtgtgtgcccatgctgctggcccccttttattgctgggtgtgtgtctattctggactactgtgataatccaattggcagtttgtaagctcacagagcaaggcacagtatacacctataaacattgcaggccctcccagcctgtgctgcatggagagcacagttaagaaaatcaccatgaagtctacaaacagcaatagccagtcactgataagcatttcctgaacacctgctaggtccagagccccatagagtaaaaagcggaggacccagttctgccctcaaggagtgttaggtaggagagagaaatgcatgactaaagacaatcagaaattaaaccaattcaggaaaaggagtagaaacgcatttcgstgcggttagactagggctgtgttaatcctcgctgtgtaatgtgagggcttgacaaaggaggctgggctggagttgtgttctaacggttgcatgtgagttccaggaagaaaggctttaggtgttgttaaactgagytcacttattcagtaggttaagacccaccatttaaaatgaacagagtttaccaacagcacatccattttctttctgtctcactctccgagggttcaatgtgtgtccagcagggtcctttcaatgggacacacagccctgggggttcctgttctggtgcccctcacagtacttcccagagtacggatgtctcagtggctgttacctattcccgagggctgttcagaggaaggagaagcctccagaggacatcacatctgagctgtcaagtttactaagcagagagagtagggcgtggtgactaggcaagggagcggcatttgcaagggcctgcaggcctgcgaggatgctggtttatggaccccgtggtcccttaagtagttccccgtggtgggacataaggtggtgcagcatcacagcagcacaggatggagaggccgtgaggcgcgactggaggagagtggcacggctgcctcggagcctgacctccagccagcaggcagtgaggtggctgctgagtttgcagtcagggtactgcatgatcagctctgtttgagaaggaaaccctctggcagtgactcgctgccgcctcctttaagaacaggacatgggaccctccaccgggttctccaagtcctgaatgctgaaagcaatttcggccaagcgtggtggctcacgactgtaatcccagcactttgggaggccaaggcgggtggatcacttgaggtcaggagttcgagaccagcctggccaacatggtgaaaccccgtctctagtaaaaatacaaaaattagccaggtgtggtggcgggcacctgtaatccgggagactgaggcaggagaattgcttgaacccaggagctgagatcgcaccactgcactccagtctgggagacagcgtgagactccatctcaaaaaaaaaaaaaaaagcaattttaaggactcccaaggacaaatcacctctttaagtgacagcttctctgaattctctttccccaggcagtgacaaactgtaccatcagtggctctccactgtccgggtaagcatgcacccaattcagagccccctggactccctccttagcttcctggcagccttccgcttccctgtgcttccccttccatcctggagcactccattctctctgctggagatgcctttgtttgtaaagccaggctcttctcatgccasatggagactagaagggtgggattgtccaaagccatcacttggtgggggctgaaaaaggcatgagaggcttcctcctctgcaggaaaccagccaaggagagctgaatggaatgttgctgtcttagagcattcggggggttctccttctagggccagagcaattgtcatgatcatgggcaaaccaaaaattgctgctgtgtaacctctttcacagcaaagctcctgggaagatggggaacacatcactgggaggttgactgttgttgtgaggtgtcttgatgtgtcaggagccaggggcatagggcttccaacgtctctaaagaattcgaaatcttgcctttcccttccatcagtttataattgaggtgtcctgaaggcctactgtgtgccaggcaccctgctgggtactggggatgcagcagggagcagggtacaggccctgccctgggggagctccctgtcttgctggggaggcgggcacgaagcaggcaactccagcatcaagtgataagtgttccctcctgctaatgcgtcagtgcactgctgccaggcgagtcccttggaagtggctgcagttggcggagagtaagcaattccttcatgaaagacttcctttgttcctcttgtatggccaaacacagcacttggcaaatcagagaggagtaataaggacttgttgattgattgataaagggagtttcaatactccaaaggaccatttaaatgggatactgagtaattttggaaagcagtatggaataaatgagtgggtgaaaatttcccattgtcctacaacatagaatgctttctaggtcaaattgtaatgtttttaattaaagctcaaaatttctaatgtgggcagttaccaaaaattgtgctaaaagttaagaccgataattacattactgtatcttattctcttaggtacccactggttccagcctctctccatccgaatcagtttttttaaaccaccacagacctgattctgtgatgaatttgattaaaaacgctctgtagtgtagaccccttagcctggcattccgggcccttcacgagctggccccatctggcctcccagcctcagttaatgcttctctgatgatacactcatgggagtgtgtcatggcgcagtacagcagccacttgttacagcatacgccatggcttttcagcttctgcactttcttttttgtgctatttcctgtccctagaatgttctcctcccgtctcctacatcaactcctatttatccttcatggaccaggtccagtgtttcatcctccaaggccttccctgatcttccaagtctccacgctccctgtgcacacagccattacagccgtcatcacacgctgttgtaattatttactgtgctgtcctgcctctccarctggaggttttggaaggcagagatcaggcctcccttggcctggtgtcttcagaaccctcacgacgtgtctgcagggatgagactgagaaatggattcacggacagctatgaaaacgtgccctgtgcacttcaggtccctccactgcctcttttaggagcgggaaggccttccctcctccttcctcccacttttgctcctaaagaaagtgagcgagaaattgctgtgttggatttaactaaagccatggtgaacatttgtggctattcattctttccttttttcaagatttagatgttaaggaaggcagcctaccagagagatttaaaaaaacaccacagaaaaccaaggaaagaaaaggaagttgcacggtgagggcaatgtatttcccaacgatcctggctgatcagggccccactttctgccccggcttggtgtcagctatggagtccacggttattaaacttacctgagtgtcatccgtggtaactagaatatcttgaaaagccacagatgcccatagggaagcccttgccttaggcagcctgtgatgcagttccctccagccagggaacaggtgccaagcagagcactgagtctagagtctccttccatcaattcacactcctcatccccagtccrtacacacccacccasagctcccaccgagagtccttctgtcatgaccataactgactggcagggaccagttatcatccaggcctatttctcgatgtgcatttacatacctttgaaatgttgcttaactcgattgaagagaagcagtctttgttggtgttggatgactctgtcttcagcccaaattgctaattgacatttttattatagaaaggaagtggagcaattctgaatactgtaaagaccaaagcaaatccggccatgaagactgtctacaagttcgtaagtactggtcttgctgtcaggagccaaaacagatcagtcccttagcatgatgagactctttatttatttacttacttttgaaactgggtcttgctctgttgcccaggctggagtgcagtggtgcaatcacagctcactgaggccttgacctccagggctcaagcaatcctcccacctcagcctccccagtagctaggactacaggtgtgcaccaccacgcstggcttttttttttttttttggagagacaggtctcagtatgttacccaggctggtcttgaactcctgggctcaagcaatcctcctgcctcggcctcccaaagtgctgggattaccagcatgagctgctgcacccagccaagcgatgagactcttaagtataccttgtcctctattgcagagatgactcaggctgctgagctctttcctgaaggtctcaatgttcttcaaattatttagcagattattataactggttcagtgacatttttaatttatagtgttggtgctcacatttgccacagtagagaaatgggaggctactggttttagcttttaaaatgtagactaggtggctgcaccctgcctctgtttctgagacccggaagcatggtctatctggtgtctggcaaagccttcctgcaggaatccccattattgggtcaaaataaagcagctcctttgcagtttcctgaagcgtgttcgtggtggcatacaccacttaatttttgtcccaaattcttcatcatctctctgatcactgccctataggaaatgcattatttgtaagactcgtgtccacagcggagtgaaaataggagagcacatctgttcccggtgcttcatctttcacaagcatcaagtattttttcttgtgacttctcttgcttgctaatttgaccgtgagccactgaagcggggtggttttattttatttccatttttaattttgttagtcctctctgtgcttaagctgtagttattttagcaggatgggtggctgccagcagaaccacacaggtctaaaatgacctgaaatcaaagccagggtgtctgccaaaatgagatttaggaaatggcactgtagaaacccagcaatgtgtctgttccggccattcagcctgggcagaaaattggtcctggggccctgccctggtgaaatagaatggatattctgaatcttccagccagaaatacggctgccgtactcttactggtagctgtcaccaggctgctgagataaataattatagagagcagaagaagggctttggaacggaaagaaaaaaaaaatctgtgccatcaaaatgcagaaaataaaatctctgcagcctctttaagggtttttttttaaccttttaccgttgtatttgttttcatagccattatgttttygacttgatgwtcccatttttccttcctttttctagtaatcagagaaggtgattctcgatggactgaaatcaagcatagtccctgctggaaacagaaagggaatcttaacttaaattaatttttcatgcaggcaaaagatcatgcaaaaatgggaataaaagaggtgaaaaaccgcttgaagcaaaaggtacttgaagttcttattcaaaatgtataagcaccatgtatgaaatgcatggccacaaaaaagtatgaggggatcaatagagggctgtttgatacagtgttgttaacacacttcaaaatgcattaccagctgtccgggagttttcacactgttataaatattcacagacaaaaaactgtcttcaaataacattaagactctggcttaaacccacaaaggcaagcaagttcagagttgccactgtcgggctgtcccttgcccaccccaccaggcctgagttcacaggcgtctgtagaaattggcttggtgttcccatctggcacctgcccacccgctatggctgacctctgccccagggccggttgtaaccaaaaccaaggagcatctctagggaatgattgccatggtccagcatgcacgtggccaccgcccagacacagcatagggggtggggctgagcagaatgccgtgggcttacctcgccctgggggaccaagtgagcagaacccagtgggcgctgttgagactctgagtggggaggggagggctctgattgtcttcaccagccgtcagtaaaagtgggatatcatcccagctatgtcctggctaagattcccccagcctgaatctcccttttttttttttttttctttttttatctgacttcttttgtattttattttattttaatttttttattgccatagcctttgggggaaacaggtggtatttggatacatgagtaagttctttagctgtgatttgtgagattttggtgcacccatcacctgagcagcgtacactgaacccaatttgtagtcttttatccctcacccccttcccagcctttccccgagtccgcaaagtctattgtctcattcttatgcctttgcatcctcatagcttggttcccacttgtgagtgataacatacaatgtttggttttccattcctgagttatttcacttagaataagagtctccaatcccatccaggctgctgcaagtgccattgattcattcctttttatgcccccagattgaatttctggacttagacagtgaggttactgtaagagggagggcttttttatattattatgaatgccatcatcataattacatcataattattgttgccaccttttttttttttttttgagacggagtctcactgtgttgccatgctggagtgcaatggcgcgatctcggctcactgcaacctccacctcccgggttcaagtgattctcctgcctcagcctcccaagtagctgggactacaggcatgtgctaccacatctggctaatttttgtatttttattagagacggggtttcgccatgttggccaggatggtctcgatctcctgacctcgtgatccgcctgccttggcctcccaaaatgctgggattacaggtgtgagccaccgcgtctggcctgttgccacccttctttaagctcctcttaagggtggtccagactaggagctttcacacttaatcctcagaacagccctgtggagtattgttcccatttcatgagtaaacagaccacagttcagaggtgaagtcatttgcccagggccaccttgagcctagcagagccagaattggatcccagctccatcgacttctggtggctgtgtgttcttaccactactgcattgcacactgccttcctcaaacaagtgttttgttttccaaaagatgtttgggatcacctacttcattatccctatgcccccaaacgtaccactctaataaggccctttgtctagctctgcagtttttaaaaaattgaaagcagttttaattttctgaagtcagaaaggacctctaattaacttgaaagggtcgaaggaattgattcctttcttttaattggaaaataatttgctctgactaagcatttaaattcttagtttcagctgagagtggatttttaacagctgagattcacatcctgaaataaaagctctgtaatgtaaatccagatagaccttaaactgtagtctgtttgcaccctgccagagactggcaggtggcattctttacttggatgttatttaagtccctaaatatacctttttatctcccatcccagttgcatgtagctgaaatggattgcagatataaaatggagtggcagggagcggagagttttccctccttgatgcctggatcgtaggctcgttggtatcagaatatcccctgaagtaagcaaagaaaggggtccctcctcaggcaaaggccccatgcgccctcattggtcagatccactctctgcagaccgttaagctacagacatcaccttacctccctacttgtatgtgcaagcctctggccttaggaaaatccccttcttatgataagtaacatttctgcaaataaccagttaagctcagattttttaatgtggttgttcaaagatttgtttaaacaatctagatcactttccttccactctctctccctttctgttccttgatagtatctaaagcagatgtctccctccccttcccttccccctgccagtcttttcaagaatagcttcaggagataatgttctatagagagcgtcagtacatttcaggtgacacaaatggtgaaggcattttatagaaatgtggcttgtcaccatcggactgttgacagatctattagtgcacccttttcaattttcacttttccccccttcggtcgtacagatttccacagacttgatattttgcagttgttcttggaagagagctattttgtaattgaaactctagcattgttcgcatctacgggacttggggctccagcactctccagcgccctttcttgagctaatttaggatttggctgcacctgacctctcacatagcagtagaaaatatttccttgktttttttttttttgtccttctcccctttccctcctcccctttatctggcaacgaatgtacctcgtgactccccagawgcctctaatatagacatctcaagtttggtttctgccatgaaatcgaggcagtttccaacaaagatccaattttcaaatgtgctgggttgccacctggcctcctctaactctgcatagcaatggtgaccttgcagatataatcaagaacccaagcttgccctcttcaccctcgccttgggtttgaattgcaaatagaaaatgtggggccgacctgtggagaggtcaccatgatgtatggagggtccatctctaatatgactgagctgggccccttctccaacccttgttcatttgtgctgcagattttcaaagcatttgaaatcggagctttcaggatatctgtgtgaccattggcaaataattgttaatagatccgatggtgtgactttattccatacctgctctgcttcaacccaacaacaaaaaaagaaggatggataacatatttctctagataaatggagcaaggtggtcaggttcttctgtagcttggcctcctttgaagtctgacttgctcaaaattgggaaaaagaagaaatggcaaagatgctacccagccattgctttctaaggaagagtgtagtgctttcatctggagtgtctccctgccagaagaatgcctcctggatgggctcatgactgtcaacaaattgcatcccactgcagcaccatgcagggctggcatgagaatgccctgctttaaaagcagtggccacaaatccatttctcctcacctgcaggcaacgttaagataggcacgtagggatgtcctcttttgcctattgaggaacccctgaaatttttctcttttttcttcggtatcaaaatgatttagccaaatgggcccatttcacagccctttgtaaagtttctgaatctttgatcttcttcttttcttttttttattttgtttttctttgttttgaaacagggtctcactctgtctcccagtgcagtggcacaatcactgcagccttgacttcccaggctcaagggatcctcccgcctcaacctccagagtagctaggacaacaggcatgcaccaccatgcctggctaattttttttagggacagagttttgctgtgttgcccatactggtctcaaactcctgggctcaagtgatcctccctcctaggcctctcaaagtgctgggattacaaatctttgatctttaaaagacaaatcgagcttgttgatttagagtctctgtgattgaaaggagcaaattcacagttggtttcacagaggcttgaatttctggccaaactgttcccattgaagggagtgagtaagcatgcgtggggccgggagagctaggtagacttgtagaacagacattttcacaccttatcacacaactgtcagctccctgtctcccgacacattaaaatacgctgcagcctcaatcacagaaattccaactttggttactattttgatatcaatattcatattttaatttgcatttgctgtgctgtgaggtggcctgggaaaagaagggtgcggcacgagtctgtaaatggagacgggagttctcacacccgcagcatgagtcagacgggaaggcctctgcccataggggcctttcaactcccccacatggtgatgtggtgtttgggcttctgaggcaggcaagtgggactcagtgctggttgtgtaggatattaactatgtgaccttggataagttacgagacctcactgaacctagtttttctcatctgtaaactaggggaaatacaggtttttgctggatcgttggaaggagtagaagagataatgtgttgagacagcaacacttagtaggcactgaataattgagagtttcccttttgtctgtcttttgtttgtttgtttttgagatggcgtctcactctgttgcccaggctggagtgcagtggtgtgatctcagctcaccgcaaactccacctcccaggttcaagtgattctcctgcttcagccacccaagtagctgggattacaggcacccatcacacctggctaatttttgtatttttgtagagacggggttttgccatgttggccaggctggtctcgaactcctgaccttaggtgatctgcccgcctcggcctcccaacatgctgggattacaggcatgagccactgcatgtggccctctctgtcttcttatgtcccacatctggaacagccagtctgcccacatacccatgtgcacacacctggagaccatgtccagcgtgaatgaatcacctcccttgaggttgtccatacaaccaccaggggaatctttgtaggacccagcactgaccaagtcactcccttggttaaaacatttcagacctttcaaaccttccacctccttgcctgggggcagcccaggggtggaatgccctggccgctgggccgcagcaggccctgctgtctgcctccctgggcctggggctctactctttcatcactggctcataagtcctttcctcagctcccaccccaacccctacccaaggccacccagaaccctctttgtcctctagtctcccgagaccctgggtccttacctccccgatttctcatggagactcatgtccagagacttaccgtatgccgtgcctgccttcttctcagagggctggaggttagagcatagtcatggcttctgattccagtaaacactcaaggaaaataataggaatacaatgactttctgactgccttgctttaccgagggacgggaactggcaggacccccgtaactctctgagctgagcctcggggctccaggaagagatttgccaccctgtggtggcccctgatatgtagctctgtctggcgtcttcctcctgtgtgacccttcgggaagaagcaggtttaaccctcctgctagcttcttgtttctgctttttaaaaatgacatttagaaggtcaggttttttcctgtttcaaacaaaattcatgtttattgaggaaaactcagcaaatcagaggaacaaaaaataatctcattttataacctgcattttcatgtactatatcctgggcatttcccagaccactaaatacttcttccccatgtctttattttattttgttttgttttattttttgagatggagtcttactctgttgcctggcgcagtctcggctcactgcaacctctgcctccctggttcatgcaattttcttgcctcagcctcccaaatagctgggattacaggcgtccgccaccatgcctggctaatttttgtatttttggtagagacggggtttcaccacgttggccaggctggtctcaaactcctgacctcaagcgatctgcccaccttggcctcccaaagtgctaggattactgcaccaggcccacatgtcattattttaaatgactacatcagattttatctgatggacatatatacattatttaatattcccattgttggacccttacatgagttccaattttttctagacaaatatccacataggtaagacttagaagaaattcatattatttcattaggataaatttctaaaaatgggagcagtgggccaaagggcatatacatcttttaggtttttcatataaattgccaatttatattcccatgagaagggtatgagagtacctgttttctcaagccctttgctgacagctacgttagtgcttaggccacagtttctttaatcatgggtatcaaaagttgctgttattagctccctactacgtataagatctctaccaggagatagaacagagaatttgaatgccccccaccttwtttttttcttgagacagggtctcactctgttgcccaggctggagtgcagtggcctgatcacggctcactacagcctcaacctccccaagctctggtgatcctcccatttcagcctcccaagcagctgggaattcaggcatacactgccgcatccagctaatttttatatttttttgtagatatggggtttccccatgttgctcaagctggtctcaaactcctgggctcaagtgatccttccacctcgaccccctaaagtgctgggattaccggcgtgagcctccacacccagcctcttatttcttccttgacgtgggctcctcctcttgtgctgcctgtggcatcctgagaggaagctgttgtccttcttcaggtggagggaatagtaaagaggctaataaattggtggcctgcaccacaggactttataagaaaccttttgcatctttggatcttctaataaatgaaggtgcagcactgctttttgacacgcaggtacatctgtgtattggacacatttcccttccaaatgtttaactccactttacaaaggtttatttgacagcatgtgctagattcaaggctctaggttagagaacccagaccccaacgaacttacagttgatagagatacaaaaataagatagtgctaagcatggcagcctatgatcagtgtagccaggagcttccgaggagaagattacatctgagcactttttgagcagctccttaattcagaataccttcacttgtgctgtcgttatgggatgatatggcataaaagcaccaggactcccatagctctgggttattccaccttctaactatgtggctttgggtaagttaccccttctgagccctatttcctcacctataaaagcaggataatcccatttaccttgtgatcattgtgggaactaagtgtgagaatgaaggtcaagggtctggaaaagcacaggggtaggccgtccacacagggaaactcttctttttagcaggtgctctctccgttttgcaaattgaggttcaatttgcacagtgctgtgacatttttcaaagcttcctcctatctcatttcacccattctcccagtagctttgatgtttgccaagcaggtggtagtctcccattgcaaaaataaggcaataggtgcagagaggttgagtgatttggaaagattagacaactagttaatgggaaaaacaaaactagacgatagtatttttacttataagcgtgaactaagatgctttttccaaaactactacatgaattgttctttttttctaaataactattaccttagagttttctattaatacccagattttcttaccatattaccttgcagcttcatttttttttcagccaaacacaaacaggcacacacacccacgcacaaaattttacctgaaccaaaagtgaatttgttcatgtttgaccttattcattctctcatatctatcttgtaggatcttcacctggatccaaaatgccccttttgcccattgttgttttctagcacagatggaacccctccccatctttttccacttgacctgagcacctttggacagcccctttccaaaagagctgtttctgtttggccatcgacagcctctttcatcactgagcctcagcctggctgagactggttgatcaaacgtgggccacctgatccaagccctcccagtaaagccaggaggtcatcatctccctttgttgtttaccaagcagtacagacttctcaggtctggcctctacaggcagccttgattccttaggaaaggaggccagctggtaggcagctggatgtgtgaggtcaaatattggtagtaatggtagtaattggtagtaatatggtaattcctataatttactgaatagctaataatattcttgacactcagttgtattatctgtctcctttaatcttcatgctaccatatgcccatttcacagatgaggaaactgagtcttagagatgtatatatgtttcttccttaatgcataatttttcaataaggaattactttcctccatgtcccaccattctctcttagctgagaagttaggagcaaccaagtatcaagtttctcatgtgcagaatttaatgagtactaaggggatatrttttgttgatcaaagtgtatatttgttttgcaatgaaaataattggaacttgtgttcattatataattctggctgagttatttttatttggtaagaaacatgattatttaaatatttatttgtacatgtattctctgccttgttccaatgaaggtttaagcaacttccttgacttgaataaaacacgggacccttattgcatgagtggccccatccatgttccaaatgacccacgtgtatagtcagctgccagcttcagcyaccggagccatggcctgccttttgcacattgtggtttttcttttcctgataatttgacttcagtcatcagaagcacaaattaaatgtaaatttctggatttaaaaagatttctttggtccctaaatgtttcccaagtcatagagtcctgagtcagacttcaatctttttattttctgccagaaagatgaggkgtaagaaggggtaggaacaaacacatcttattcacaaacaacaacatcatcagtaaacaaatgtggaaaaactgtccatactcataattaaagtaatgcaaattaaagcaacaagtcaaatttttcacctattaaattagcgatacatttttaaaatgatacagctcacaagtatcgtgaaactggtaatgcatccattgttggtagttggtgtaaattggaaagcaattggataggatgaataaaaacccttgaaaatgtttatatctgttgtcctagtaatttcattcctggggatttccataaaaagagataatatgaaagaaagaaaaactgcagtatatatcactggcattttgaatgtttaaaaaaaaattagaatcctaaatgcccaatagtagtagaatattgaatcgtggtatattaaattattgtatatccgctcaatgaaatatgcattcagtaaaattatttttgtaatgactttgtaacaacatgaaaatgcttataatatagtggggaaaagcaggatataaaattatgcatgagctgtgattgcaagtaatttttaaacgtctgcatgtggacaaagtaaatacataaaaatgaaaatggctgtgtaagagagtaggatgaacaataataattgttttccccactgttgtgaattatgatgttatctttataacttcacatggatggtttgggtttctctagttcttaaaagtcaaagagccaagttagccctccattccctccatcttcatcaagaggtcaggctcagaatgtcacggagagagtcgcctggcaggcctcttcgttgtggggtgagagggaacatgggtgccagaaccccagtgccaaccgctgactatccttctccctacaggacattgccgagaatggctgcgcccccaccccagaagagcagctgccaaagactgcaccgtccccactggtggaggccaaggaccccaagctccgagaagaccggcggccaatcacagtccactttggacaggtgtgtaccctggccctcctacctgtctgttttgttttttttttatttttgtttttagcagcagtagcacatgcagcagacggttttkcatttcagttctctttggcagtgcagctccatggaggttttcacatctttaaatgtttatttggtgcaaacatgttttgcaggcaaattttcaaaaattttgaggagacagcacggctgaggtcataaatgagcgggactgttgaatgaagtcattaaatgcactgctgcctcccgtactccaaggcactctgcttaaggtgcctctgttagctaagcatctcattagaacactttagcatcccgggcccttctttgcaccttcaaataaaaggcaacaagcgaagtcttaaaaaaaaaatcaattaggagttctttattaatgtacttcctgaaaatcaatatcaggagtcgtgcttctgagagtaaacacccgtgctacaattctagagattcaattttttaagcaactgttttcaactacctgagcattagaaaaattgtctatttaattttttttcccttaagtaaaacattccactctgtatagaaactaaaattttgtatccccttcctacttgtaattatatttttggttaaaaaagattatgtaccctttcctacctgtcctgaattgacttttggttagcgaaagtcatcatttggagagatttatgagaaatggctcttttagcaagatatggctgtaacaagaatttgcaaggttatttatttttaaatcacctgattctgtagccatttattagatgatgcatgattaagagtcttcatgatttttatcttaaatgtgattgctatttcaccacatgtaaaggacctagaagcctacattcctgttttaaacagacctttatcaggtgcctactatgcaccaggcattgagctattcagaaatgaacgaaactcacaaaattcttgctccaggttactactgtaaggggtgagttggttggaacataaaagtcactcttctctaatcaatattttcagataatatatgtttatacatctttaacttggggaggttcatccccttttctgattttatacttaaaaggatgttataaaaattgaaacgcaagaaagaagaatccacagggtgatactcatttagttaataagtattttcaaattgcactggtgtctgctcccctgaagagctgcctccccccagctccaggctcaggccctgttggagcaatctgcaccccagttccctggctgtgtttgctgaaagcacagcccctggttgtcgccagcgtggcattccagagtcagcttcctgctttcctttgtcctcattcctgcacacactaaccttcccatgaaaggagcccctcactggagtttggagcccattacagagaaagagggggcgggggagagggatttcatggtgttaaacattccattttcgaaacacaaaaaaaggaggccctatttgaaatggagaaagaccttctttccatttcagccagaagtagagattctttaatgtcattcccagctaaatgcagaataagagtatgtgtgtgtgcacgggtgggggataaacaattaaaaaagccaccccaaactctgttgaaataagagctgtctgtgccttcacaggtctgcaaactggagaggatgaaagtggctttttttccctgtttgtcacttccctcacgtggctgccagcattatgcaagtgtacaggaaggcaggatttttttttttaatgcatgcatgcggattaaggtcaagcccctagtatcagccatgcagcgggctctcccttccagctgcagccgcagagcctacccacagccgcgagatgccttaattgagacgtgctgtcaaagtgacaaacacatttgcatacagtctacactctatttattttctctggaaaggtctacagtctgctgttggttgaacattcttaatcagtttgctgtaagtgaactgccagctagctcacttatgccggccccttcttcattaggtgacagattagctgcagagggaggggggcttgagccagggaaaccacagacccctttcttttaactctttccagctttgcccttatggtaggttgtccttgagtcttttcccgggtccctggtttgatgggctsttgaccgtaagaagtacggtttctagagcacctactaccggcaggcatgagttttaaggacttgatattcttcccaaagaacagtctcttgagtttcatttcagaagtttttaccacactctcttaccatctatactattttctttacttgatagttttctttaaataagactcagacctgacatctatagcatcttagcctcatcttcagagatgccattggtaaaattataggcttgatatactagtcccagttttttctaacatataaaacaattttaagtgttcatctatgaatcacctaatgcactcacgtagccctaatggtatatattctctttttttggaaaccaacagactccttggtatcttttttgttgtctccaccacatccctttgaggaagggaccattagccccattttattgacccagagctggagctcagagacgtgagagaacctgcccagggccgcttcaccagcttggaaacccaagcccagacacctcctctcgagcccacaccagctctcaaaacaagcagggactgcagccatgtgatatgtctgttaaagctactgtaccctgccctggcaaaatcatcttaaccagccagagagagcacctattttaacctcaaaaaaatcctcgccttgggtctgtgtttctgtggatttcgttatttaagaagatttagcttgccagtggggatggagaccgttgagacggttgccttcatctcaccacctggcaaagccggtgcctgtgcagctagccagggcagctccatggagacctctgacggcagctctgcagcgggggctggcaagaggggagcttagtgtcgaggcaagagctgctactgccaggggagagaaggtgctgccttgccctctgcctcagtggagttcctctttccaagctgtgatcattcctccatttaagtatcatctattcatctgtctgttgagacctaccatgtgtaagataaataagttctcagtccctaccattgtggggcataatgatgagacagaccagcagatggacaggcccaatcagagggataaagacaatgagggaagtaggctccaagcactcccagggccccccagaggctccctcttcatctccaggcccacttcatagtcatagtcacttcatagtcagtcatagtccacctcatagtcccaagttggacactttaattaaaagatgcttttgtcagtagcctgaccaacatggtgaaaccctgtctctactaaaaatacaaaaattggccgggtgtcatggcaggcacctgtaatcccagctgctcggaagggtgaggcatgagaattgcttgaacccaggatgcagaggctgcagtgagctgagatcgcaccactgcactccagcctgagtgacagagcgagaccctgtctcaaaaaaaaaaaaaagatattttgtcaacaaactgaactcgctaataatttgttttctaaagcagacatatgttaggccactcagcttataagagcaaagtaaataggtttctagttagcctctgcctcctgatcacgtagtttctttaagaattcaaaagtgtcaacttgagaatgcctattcctgccttggaagatgtcgcagtttagagaggctttaaattactgttttccccttctcaagtttagtatcatttgggaaacaaagcccaggggacagtcaaatgagataaaagtgccagctgtgtttattgataagcctgaaaggagaatattgcattagacctgaaggcaaatgttgcaaacacttcacctgagaatgtgaagaccgcgtttctccactcgagataagtggacaatggcaggtctctccaggttggagctgcccatagactcctagcaaggaggagctgcgggagggcgttgccctggctgctccccaggagggagctggaaggggtgatggagctcagttccttctcccagactccccgggaaggcattcttcctcttcctctgggaggggttgaacaagagggtgcctggccaagccaaggattcccccctggttttctctcctagggtaggaaatggaagctcctccttcccacagctatagaaggagtgagtgagcggtgtcctccccggcagccctgggcaccccttggttagaatggctggccttgactggcttccctcccgaggacccctgtggaaactgctctgctccctacatttaataagatgggtgagccatagatgctttcacatccgtgagcactgacttgagactttgccatcagcgggtgaggaagaaatcattttacccatcgtacacgtgaggaggcacactggaacggcgttgctggaatgagtagctaattcctactccaaatccagcagcagcagcacctctgcttctcttggctgtgtgcagctctccctccttgccaggagaatggcctgattgtgtgagttcagtgacactggaccctagtcctaggtgcagatagccaaggctagagactgaggcttccctgagaatatcacagcaaaccccttccagggcccccttctttgtatttcctccaaatgactgatctgcaaacaaagtagttgcctgccttccaatctgatagattgcaaaaagcatgtattgaaaggtgctgcctctgttcttctcccatctgaacaaaggtttctaaacctctttaatgtaaagtttgaaaagctggttaaaccaaaaccaaaaccaagcaccaccgtggcttccagagaactgtggcagggaggtctggatagcagccccaggaacagctcttgggatgtggttgccggcttgtctctgcgtatggagaattctggcatcagggtcatcagccaggtcatttagtgccaatcccatgctaggctggagaagatgccgagctagcaaatgccttctcagcacccttggctctgagtgccctgagagagtcctcttgccccactgagcttggaagccacatgcaattcccttcacttcagccattgcctcctcaccacctccagcaggtgctcccatgttctcaggatactgcacaccccaggcctctggtctgaacatacactccccaccaaactcactcctccatcttccaccccagtgaatgacacaggctggccatccagagccaggctccgccctccttctccccagatcctctccttccacccctgaacactacttcatcctctcctctccatcacctttgccacagctgtggtgcaggcagcataatcattcacctggactgtttcacaggctcctaactggtactccctgtagtccccatgtggccttgccgggtccactgtaagccgggtccactgtaagcatgcacttactgtaagcatgcactagtggccgcctcacccccgctcccagcctctcctaaagactccatcttcctccttggcccctttgtgacctgcctgtccaatcccagagcaggcctcctggtaaattctcccaactcccctaggaagagtgagttgcttctgtcctcgtgctaccccaggactatgcacacgccgcttgtcacgcagccctgcaatttttctttaatgcttgccttcccaccagaaagtccactgcagggcctggcactgagctggcagtcagtgcacatcctggggttttattattggtgtggatgtttaaattaaggaataattgattgttgttgaagcacttgctgtgcattcagcaagttatttggtttcatttctgttgctatgcttgtaattctaattcatttgaagaagaaaaatgaacattcccttagtggtcacaaactatttccaaattcactttccataaagaaggattttgaagtgaggccgggcatggtggctcacgcctgtaatcccagcactgtgggaggccaaggcaggtggatcacctgaggtcaggagttcaagaccagcctggccaacatggtgaaaccctgtctctactaaaaatacaaaaattagccaggcatgatggcatgcgcctgtagtcccagcttctcaggaggctgaggcaggagaattgcttgaacccgggaggcagaggttgcagtgagccgagattgtgccaccgcacgccagcctgggtgacagagtgagactccatctcaaaaaaaaggattttgtttccaaatagaaacagctttgtgttatagcaatttagatcccgtctcattttattttgtgtgtttttcctagttcctaaggtcagtcataggtgtccccggaagggaatggagaggaatgaggcagggaactgggaccccccttctcctgtgcccaaggatgggcagagctgtgcaggagcagcacagtggggaaagcagtcaggggaagggaggggcccatcatcccttgagtcacatcaagcgaagcaagcaacaggataaattaggcgtaaaggttttatctgtgaaagagactaggatacatgaccaagtgcaaagtgtgaacctaacttggattatgtgttgttgtttttttaaaaaaaagaaaaaagaaaaaagctttaaagacattcttgggaaagttggaaaatttgaagatggactggaatgttagatgatgatgtgggattaatgttaatatgatagttttgtaggggtttatctttattcctaggagaggcaggctgaagtctgtggggtgaagtaacacaatgcttgcaacttactttcaaatggtatttgaaaaaacattacacatcatgtacacacacaggctcacacatatataagatccatgtgtagagaagagagagaaagcaaatataatctcctgtttccccaagatgtacctgctgaaaggcaaatgtggatcagttcctggagacaatgagttagagtggatgaagcacaggttttagaatcgggcagttctggacttaagtttcagctgtgccactcactagctggtgaccttcagtaagttacttagcctcagtgaaattccgtttccacatctctagaggggtccacgtcataggttgctataaggattaaatgagatattgcctttaagtaccgagctcagcgctggcacacaggcccctggtaaatatcagtctctttccccaatgtgcaagagtggagctggctgtcaatcatttgctgacactgcctcctacccaaccctgtcttcccagtgcttggccttcaccgaggctctcagagcgcgcagtccctcaggggcggccctatgcatgcacacatggcaactgacctgtgtccctacacctctgggtgggaaaggcaaaacccaagcccagaggaggcccagtgccaccaggcagagggagcaggccaggagctggtaccagcaagagtggataatgctgcccaagcctgagtcaaacatgtggaaagaaggggctatggggcaggttggggcagaaggtacctagtggtgggcattgcggtctacaatccagtcattttttctgcccatcccagtcacgcgcccacagtccatgaggcggtataccctgcacacctctctttcaacccctgttgtttccaaagcatatttctccttttccgttgcccccgtttcttcccctctcatccatgtctttgtgtgagtgagcagaggtacggtggtgatctccccactccgctccctccagctcctcctgctctgatccggcctctgtgcccactgtagggtgaccgtgacagtgccctcccttcggtccccatggggtggctgtccagagttgtttggactcattcgctgccatgaccaagagcagcgtggcccctaattggtggtgcatttctcaggtctccctgatgagggtggctggctaggcctgtctttccacgtgcactcaccttttcagagcccaggctagcccagagacagctttctgatgaaaggttaacaaggctggggtttgctcctttgagcagacatatttgatttcgggaggaaaaacttgccaatcaaaaaagagaaatcagattctggacattcataacgattgagttgaacattcgggagctatgtgattaggcattcagcgtgkcctcctcgggtggtattcctctcgttatagagagctggagaaggccagagagctccacggtgaggccagggctcctgatgtaccatggaagaactgagaaatgtcagcagctgagtgaaaatccaggtgcaaaacagtagtttgctctctaagctgtaccacctctgttcagcccaagttcatgttggctgcagaagggctagggaccaagcttagtccacccctccagaccgtccagaccatccctccttctaggacttgagcactataaggtcaatttaagcatcccgtatgtgctaggtgttgggatggcctaagagtagtgtgggaggggcatggagatgaattgctcactgcccaccaagctccacactgagacctggagggaatgggtctctgttccagctccagggagcatgctaggccattccagtaggttagcctactgaatccctccagccaacctgtaaggggctcaggtggtatcctctcttggagaggaggagacaggctcacagagaatgggccttagtcaagattacacaagtcagaagcaacaggattcaaagctacattgtttattctaaagcttgggttcttgcccaactctgtgctgagaacatggcagtttcctgggttgtagtgagagggccagtgcagccacctgggcaggtggctcaggatcccaggagggtggaccacaagtgagactgttctggtattcttacagatcttaggccctccttaatgtttctgggcctcagttggaaccaagacaagtaagctggtatcctgtacctggtgtaggctcaaacttagccctagaccccaaaggcatgttggatgattttctggtgtgtgtgagagagtagaatgcagggtaaaaactgagcatgtgtgggagctagcactggaggtaccagagggcagtccaaccccatacccacaattactttggcatcaacctaatacatttagcagtgtctacatttagttagggtacatgagacataaaatccaaaagagaaattgttggcttatgctagcttcaggtatggcttggtatccagtcatgttcatcagaccccagttttttggtttttgttttttgcttttgttttgcttgagacagggcctcactctgtcacccaggctagagtgcagtggcatgatctcggctcaccgcagcctcaaccttccaggctcaagccatcctcctgcctcagcccccaagttgctgggactatataggtgcacaccaccgcacctggctaattttttcttcttcaatatttactttaagttccagggtacacatgcaggatgtgcgggcttgttacataggtaaacatgtgccatggtggtttgctgcacagatgaacccatcacctaggtattaagcccagcatcccttagctattcttcctgatgctctggctcgcctccccacccaccactgacaggctccagtatgtgttattcccccagtgtgtccatgtgttctcatcattcagctcccacttgtaagtgagaatgtgcggtgtttggttttgtattcctgcactagtttgctgaggataatggtttccaactccatccatgtccctgcgaaggacatgacctcatttctttttatggctgcatagtattccatggtgtacattttcttttttcagtctatcattgatgagcatttgggttgactccatgtctttgctattgtgaatagtgctacagtgacatgtgcatgtatctttatagtagaataattgatattcctttgggcatataaccagtaatggattgctgggtcaaatggtatttatgctttagatctttatggaatcaccacactgtcttccacaatggttgaactaatttacactcccaccaaccatataaaagtgttcctttttctctacaacctctccagcatctgttgtttcttgactttttaataatcgctattctgactggtgtgagatggtatctcattgtggttttgacttgcatttctctaatgactactgatgttgagctttttttcatatgttcattggccacgtgaatgtcttcttttgagaagtgtccatgtcctttgctcactttttaatggaatttttttttcttgtaaatttgttcaagtcccttgtagactctggatattaggcctttgtcaatggatcgattgcaaaaattttctcccattctgtaggttgtctgttcactctgatgataatttattttgctgtgcagaagctctttaatttaattagatcccatttgtcaatttttgcttttgttgcacattgcttttggcattttcgtcatgaaatttttgcccatacctatgtcctgaatggtattgcccagattttcttctaggatttttgtagttttgcattatacaattaggtctttaatccatcttgggttaatttttgtatatgtagtgtaaggaaggggtctactttcaattttctgcatatcgctagccacttctcccagcaccatttgttaaatagggaatcctttccccattgctttttgggtttttgtttgtttgtttttttgagacagagccttgctgtgtcacccaggctggggggcagtgatgcaatctcggctcactgcaacctccacatcccaggttcaagcgattctcatacctcagcctcccaagtatcggattataggtgtgtgccaccatactcagctaatttttgtattttttagtagagatggggtttcaccatgttagccaggctggtcttgaactcccagcctcaactggtccaccctccccggcctccaaaagtgctgggattacaggcacaagccactgcacctggcccctattgcttgtttgttgaagatcagatggttgtaggtgtgcagttttatttctgaggttatattctgttccattggtctatatctgtttttgtacaagtaccatgctgttttggttactgtagccttgtagtatagtttgaagtcaagtagcatgatgcctccagctttgtccttttgcttatgattgtcttggctattcgggctcttttttggttctatatgaattttaaaatagttttttctaatgctgtgaagaatgtcaatggtagtttaatgggattagcattgaatctataaagtactttgggtagtatggccattttcatgatattgattctttctatccatgagcatgagtgtttttccatgtgcttgtgtcctctcttatttccttgagcagtggtttgtggttctccttgaagaggtccttcacttcccttgatagctgtcttcctatatattttattcttttgtagcaattgtgaatgggagttcattcatgatttggctctctgctttgtgtataggaatgctagctatttttgcacattgattttgtatcctgagactttgctgaagttgcttatcagcttaagaagcttttgggctgagacgatggggttttctatatataggatcatgtcatctgcaaataaagataatttgacttcctgtctttctatttgaatgccctttatttctttctcttgcctgattgccctggccagaacttccaatactgtgttgaataggagtggtgagagagggcatccctgtcttgtgctggttttcaaggggaatgttaccagtgtttgcccattcagtatgatattggctgtgggtttgtcatatatggctcttactattttgaggtatattttttcaatacctagtttattgggagtttttaacatgaaggaatgttgaacttcatcaaagcccttttctgcatctattgagataatcatgtggtttttgtctttagttctgtttatgtgatgaattacatttattgatttgtgtatgttgaaccacccttgcttcctggggatgaagccaacttgatcatggtggataagtttttgatgtgctgctggattcgttttggcttgtttaatttttgtattttttgtagagacagggtttcatcatgttgcccaggctggtctcgaactcctgagctcaagcgatctacctgcctcagcctcccaaagtgttgggattacaggygtgagccactgcgcccaacctagaccccatttttttattttgcctcatttattggccttgcctcttctgctacggccattctcaggcaggctttcccctcctggtggcaagatgcctgcaatccttccaggtgcaagaccaacaggaaagtgactgtcacttcctagtaactcccacgcaaggcacggcattgactcgctggactgactgattatatgcccatcggaaccaattattgaggccaagggttttttgtgtgctgcaggtagggccccacctgaagcatatacctaaggggtcattcctgaaagggaaattggggccattatcaaaagaagggagagaagatcaagttgacaatgtgcacagaagccaaacaggagacactgtctcagctctttgtccacttgtctcacagcagagaacggttcataccagacctgtggggatcctaaaaccgagagagcatgcagggctgagagtcaaggtcagacattaaccagggcaccagatagaggagggacagaagagaaatggcaggttagcgcatggcagaccagggaggtaggaggcagggtgtagagatgggcacagctgtctgccgttgcctgcgatagcttctggagactcaagtgtgacaaagtccactgcagtcccggggctaggagaggagaagggtasaagctaagaacctaggtcattcgttcagcaaatcatcactgatgcctactctgtgccacatctgtgaaaacagagatggcaatgacacggttcctgacttcaggggtctaacattctcgtggtgagtggttcaacgtaatcctgatggacagaatccatctggtagttttgaaaggcccagatttgtgcttgtgtgatcatgccatagggcatctctaagtgccctttttgtttgttctaaaccccaacaagtttggtcctcagggtggtctccccaccagcattctcatgaggtgcccatcagctcctcacggccagcttgctagagatcactgtgaaatagatggaatgttttgttaacacccttgctttttatctgcttcaaggactaggcagagagcttgtctttctaagatgggagtgtgcatcttcttcaggctgtgtctgagatgcatggggagggttccaaaccagagaaactaaacacagtggctgttccaggctgttctgcgatgaggtggcaactgatttcatgttaagtatctgcccctggtccaggcgtccccacttgctttccacagccagttgcaatggacatttctcaccttttaaataatttctttggtgcaagttatggtctccagaaaagctcaactaaaatacacaaagaggaacagaaactaggctggctgcagaatggctgactgattgccctgtagagtccagccagagagggaggtctgagctgggctttgcacctaggacctgtgtttggtcctcccttcccttagatggagctcctccctggctccattctgcctctaactctactcccttagcagccacgaggagctctacctgtggtttctagcaccacctttgttctkggagctccagktttctgtttctagctcattcckgtttcacaagcttcagctactagaatgtcttagtcagacttcccaaaccagctgtaccccagttccaccaaggtgtcagcccctctgtacccatacattcctcatatccctggggtcctgtgtctctctcctcgactggtctgtgaggcacaatgggtatcagaaagcatcagcacaygttgagataggcagggcctgcagcctcccgaatgtggcacctctccaggattstctccctgaccactggtttgcctgcatggtcaagaggacgtacccagcctccaggaccctccctgccagaaatcaccaccacccctaccaagcccaccctgaccacagctaggccttctagtctggagctccctgccatcctccactcctggcagttcctgcccaccctccaggactctgtgaagtgcccctgccctgggcagagtcccttcttctctagtccctagcgcctcgtatttatttgttcaccagctcttcatgggcatctgcactgggggacccagggatgaatcagcccctaccatctctgctgccaggaatgattttcctcttctgttccacytgaacagaaaatcctcccaacccttcaaggccctgctcaggcatcgccttcccttgacaagcccccacctccaccgacttctccaagcccagtcattcccttgctgctctgagccggcactgtccctatgctggcttgctggggatgcatttataccctgtcccacagaaaaggacagaattggccttctctgtatccttggcaccctcacagggcctggcacagacgagctgccccatgagagtttggggaatgaccaagtggtgaatgagtgcgggcaggaaaggcagtgacgtggggaagaggcgaggccaggtccactcactccttgtgcccttgagtagtcagtcggttcagcagagcaagagaaatccagcaaaaggcagtgacttgttctgcggcgcctgcacgcgctttagaatccccgcacgcggcgccaggttgtgagrgacaggatcctgagtcccccaaggctccaccttcagcggtgtgacagcggggcttctctgccaaaggactggccagagcctacaaacggcatttctttaaaggtctgtgtcggagctgctcagaatccagctccctgccggggagatattgagcccaacaggacaagagcaggaaatctgattcagcgagaccagaggagacattttctcagattagaattctctgtgccagaggtggggagtttatcacagcagggaaggggaaataaaacataaaatattgaaaataaattatataccacatgcgagatcaccttagagagtcagctctgtatctgtggctgtgcagggagtccccgccccatggtcacaggagtgctgtgccagaggctgcttgtcgcacatccaccatcagtccctagccctggcagagccaggtagtgcctgcgggctaaggaaattattaacctggctgtgcccagaggaagggatggcaaggactaaccaagagatggagagtaaaaaggggttaggtggacctaggggttttcattacaatgtagacctcctgtgtctcagccaagccccttcacaaacttcgtctcacttaatgttctcaacagccctctaagactgatgcagttatgatgatccccagatagctgatgctcagagaggttaagcaccttgaccaaggtcacacagtaagtggcagagcaagaattaaaatccaggcctatctgatgctggaacctgggctctccccaccccaggtgggggagcttgaattttatcccataggtgcctaggagccaacgagggttgtattcagagaaatagcagctgggaatatgtatgctgggccactgtggaaggggatggaagtagttgaggcagagagaccactgatgatcccayggacattgctcaggccagggctggtgggagcctaatctaggacactgcttctgggggtaaagatgagaaaatcatcctagagacatttaggagacccaaaggacacaacttggcgggcagccggatgtcctgcgtgggaactgttgaagctgatcatagaatagcacagggctggacacaggctgtgttcctcttcatccagccagcatgccccagtgaggcttgaagtacagtccgtgaggaagggatgtcccttggggtgtgcaggattgatggacaccctccctcagcaacccagactagaagtttctgctcaggggcagaatagcctgcttggaggaaagagggtacagctcccccaaccctcactgtccctgcattttccccagggctgtctaccaaccaccttcctttttatactctcccagagtgctgtaagcaccaggatacccgtaacttactccaccccctctccccagcctagggtgtggaatgttatggctccttccctccaggttgccagctcttcagcccccaggccatttccaccaaggatgatgtacagtattatgctaaaccaactttacgggtagccccttaaaatgcaggcctgtacctgtgatggatggagaacatccagttgtttagccaaccacttacagtttgttgcaaacttgcaagaaccacacacgggcctcttgttaggcctgttatgccaaggaccccataaataaacagtagcgtgtatcttggtgcatcagggctggagtatggaaatagaagtactgtataaataatgcatatttacaaaataaatatatcccatacatgagcgtgtgcagccataaccaaagcacctagtttaacaaccacggaaagctttgagggcctgccaagtgatcagcttccatccatcagtgtgcaccagcattagaaatgaccgccgaagggagggggtcctcctgcacgctgaccttgaggcctttgcattgaggcaagtggtgagattgcaggtgggcaccctgacacacagcttctctgccaaggtgtgaaacctaccacagccatgtgttcctgcagatgtcttaaggtctaccgccaagcagaaggctgatgagcgccgagttgcaggacgtaatgggttgtacctacaggaagagggctggctgggggagggagagatttcctaattatgcagattcactttggcttgcaaaaggggccggtgagttgcctttccaggggactcttaccggagccctgtaactttcagccattcaccctgaaggcagggctgagctttcgggaagtcagtgtcccgtctctgccgccccattttgagctctgaaccccaccgggcatccggctctagcatctggagcttggaagaagcagctgacagaatggccgctggagtgggcgcccctccccttggttgtaatggcacaatgctggatttcagtattttaaatgaaaaatatatgcagttagctgtgcgctgacaatgtccttgaggatttgacagtgagattttccagcagttggtcttcgttaggatcctggcggtgtttaataaggcagtcgaactgctggcaccttgggttcctgtttgttctccgagggctcaggggctgctgcggtaagcacatcgaccagagctgatcattacaagggcgtacgccaccatgaataaaaatgtcacacgttttcccatctcacagcagtacaaaatgtcagtcctgtcaaacacacattgcagggagctgtgtgcagtccgtacaaattggagagccgcatattcccccagccttctgatattcttcatttgaagctgaagaaaaacagttgttaacctattagctaggattttaaactctgctgaggcggtggatgggtagactttgacacagatagaaatgtattccaaggtccaggaattttaaaaccaggttctccgtccatttgttctgagggaaggaaaaaaaaaaaaaaccttctgtctggtgaacctgactatctttctttaacagacacactagggaaattttgggatatttcatatctaagcttcccattgcttccacgtttgcattccactcaaaaagtctattgctttgggggatggccctggggctcaacctgttaggctaggaaacctgtaggtagagggtttttcctgatcagaagcatgccaggaatgttgccagtcttgcagacaaagtaactcaaatcatggggacaatgactggcgggtctggcattattcagatgctgggtgatggcttcactgataatttgatgctagttccccactcttgggcagccatttactttaacttgaccgcgtgccaggccttgtgccaggagccagatgtgaaccctcaaggactcaccttcttaggggaaggacagaggtaggagtgcccgacttttgtgggccaggaatagagagagaacttctgggggaagggaacagagtcgtgagggatgcagggatccatcaggtgggtgagtgagggaagggcttataggaccagcatgtgtgttgtgaagggccatggcccgtgagggggctggctggaaagaaggggcttcttgtggtggggtttatcgggggcagggccaggtcttgaatggcatgctggggacagggatgtgagcaactctcctgggctgccagtggcagggaaagcagttggaggctcgtggtggcctggccaaggagtcctggactccctttctagatagagggtgctatgcactcctctctggacctctgcaaaatgaggagaattcttctcatttcctagttgcatcctgttagggtggacatcattccagagatgataaatgagcctggttttgctgagctggccctggtccttaaatgtactgagcaaattctcactgagtagggacacgggcctggtgaaatgcaggcggctgcaaagacaaacctttctgtgtggtcagaacagacttagcaggacaaaagtctcaaaggatgtcagagggaggactttctggggagagagaggagcggacccgaggagatacgttttaacatcttcttctgctgttggtatgtcgggtctcctgggagcagcgtgggcttctttggagtcaggcgtacttgggcttggatcctggctctgccacccgttagctgtcaggccgggcctgggcaagtcactgagtgacatggcctcggtttcttcatctttcacattcttggagggttgctgagatgaatagagacctcgcatgtagatctcctagcacggggcctggtacctagcaagtgtcagaaaatagtagccccagagaggagatcatttcccccaacatctggaagcccctctaacctcacctcgtgtccccctcctcctgggaatgtcacccaggcaccctcgacagcatcctagatgcatcccagcagcaaggcgcctgcctcctgcttctgtctgggcaaagattggcatacgtcagcgaggtccctgcccctgcccaggcaccagccgcatctggtgcccgacctccggccaccaatgggatgccacctattcagactgtgcacctgcacccgactaaaaacaaagggctcccctccccctgccccactgctggccctcctccctcccccgcctctgtcccccaagcggctagggtcacccggcccccacgcagccttccctcacagctgcctcgctgcttttgttcagcatgtgaacttccccgtcagccgagctccttgcacgggaagtaatcagggatcttgacaaggcttcaaaccacaaatgccactacaaattaaccagcaccactacaaaatactactcctgtcaacatcggggaagaatgcactgctcttcaggaccagtctgagatgtctttcagctcagcactcactcacggcaaagagagtgcccggacccagccggagagagtcgttgacaggactggcgagcccctgaatcctgagcgcgctctctccggagatcatctctgtgagaccccgcggcaggtgctgcggcttttcttccmggacccccttcgatcctgagcaccccctcatccccctcgcaggtggcgcctctggagggcaagttgtggggcacccagaaacctcactgtggagtctgccgttcagagtgaagcccagcccgacctctctgcgtcctacctatgtgctgtgcctttgggcaaggggcttccctttccctgtctacagagcggcaatcataatagagcctctgtctcagagtcgccaggaccactgggatatcctgagtaatacctggcccctcccagcctcccttcctttccctgaagaaacaggtccttgttgccctgtgtgagtggactctcagcaagtggaaacctcttcctcagcgtgacgtggaagtccttcctgtacagcatcttgcaaggaatatccctctagagtgacagcttgttatctctgcaaatgcttcaggcctcaggatccccacatttcctctgggtgccccgctgagtggctcaggcaaggagcatgctgtacgctacgtgacaccagggcctggtcttctccagctgccctggctgaagctctgaagtggaggcaagtatttgatcctcccccgcaagcagcacagccctcatccagggcggacagagaggatcggagacagcgatgggcgctggggactaggtgagagctgtgcctgcaagagagcttcttgggcatctcaaaggagacactccacaaaaatatcgcttcaatgcactcctttttggaggcatatcaaaagcagccctcttttatttccatgccttgcataatagcagatttccagtcccaaagtgtagaggagccttgctctcggcgcagaggccctttgtaaaactacagaaggctttgtcttccctcccaaccgggtctgtttcatgcataggtcagagcattgatgtggctactagccaggaaaaattaaccaggtgaacactctcctcattaaacagcgacagagtttaattgtgaatttgctctcttccccatctccattcctggccacgtatttgactggggcatgtgcctgggacaaactgagaaatggcagggcctatccagcttccccctctggggccaggcctcctccatttgaggcaggtaggcacctggcagggaagggacaattcagagtacacagtgcacacagaggatctgagaccccctttggggccagcttcagaggctagctctgtcatgcgccagctgccatcaggcacaccccaccttcttggcctcccctcaccagccaccccaatctttgcatgcacagtcctcagcctttagtgaacctggttggtccctgtggcctccagcatctgtrctattctattttctcacctataccgctcctcggttggggtctggcctgtctcctgccaactttgacatttcaccttctgtgtggccctgctgtcccagcagtgaagtgcagatgctcattctgacggcacaaggatattgaagggatggtcccagatgtccccttcactggggactgagtgaatccacgggtccatccctaaacagctgtctgccctctgccccatgcacaaacatcatagcacccctgccccagcccataattaactcaggatgagctcactggccctcttctcagggcctgttacgcacttgctctgggcaaccctgggcaagtccttgcttgccctcatctgtgaaatgggtagcagccctcgttccctgcagaggagccttgcgctggtgagtgtgcagcggctgcttaggccctggaagcaccggcagcagaaagtgccttggctctgcccacagcacaggcaggctggctcccaggcagcagggacaccacctctcctcccctacacactgcgctctctgcccccaagtcaccacctggccgtcgagcgttttccaccctgcagccctgtgcggggtgcccactcatccatgccacccaggtaattaagttgctattccaacgcgccttcccctcctgaccttttggaaacaatgtgttttgctgcatcaacaaatgaactgcaaatcagatgctgtcctcataaatgccggtttcatatccaatgagcatactcacctggcccacacagctgacagatagagatgccgagggccaggcagagaccaacaaaggccaaagaggtcccctcttctcagggacttctgtgtcaatcatgccttcggtcttaccctctcttgtgttcacatctcccagcagtggtgtggccagggccggtgggttggcaatatggaggcctgggcaggctcctgtgattggaggggagtgtctgttcctaggagcataccccatcctcctccaatgcattttctataccaaggacgtcaaggttcctcttattgtgtctctgattatatccctcccactgagctcagaagaaaatccgcaaattctcagcctgacattcaaggccctctttttatctgacctcccccagcccctcccaggtcctggcctgccctgtcctcatattcagcctcactcttgtctgattggaccactgtgggtcccctgtccctgcactccctaccactgccccccccccaatctatggcagagaccttcctgtgtaccccatgcatgacagcgccctctaccagagtcttggtgagacatgtgcccctgtgcctgggatgccacgcactgtttgttgaatgaatggacaaatgaatcaggtgcctcctttggaaagcaccacaaaaagatgctcaaataaggaaagaaggagaaggtgacagttactctctcatcagccttttctctgaggcacagatctctaacaacagattctaacttcagaagggacaaggattagaagaaccgtgtcagaaaggattccaggtgactttggaaattttagttgacaaggatagcacaatgggctaagaatacctgcttgttttagttttcrctactagctgtgtgacctcatactagtcccttaacctctctgggcctcctgtttcctgtctctgtaacagggaaataatccttctctaacttgcctcaccagggactgtgaggttcaaaagaaagaacagaagttaaaatgctttgaaaggaaaacacatcatataaatagaagagattattattaaaatccagtgtccttcaacagaaccttgctgatagcacacagctttggaaaaccagggtcctcacgtccataggacttttctggaaagacctgtgggtaccatggggagatggaagatggagtggtcccatttcatcttcaggatatcaaaccagaacctcgtgcggctgtaactgtactctcatcctcacaccgatgcttgtaacctgggagttttgccattttacagaagagttcactgagacttaagagagattaaataactcgcctaagtggcagaaccaatactgaagtcaactagaaaatgacagaaccaactcgtgaacccatgggtttctaacccgaagtctatttcttggggtttaccccaccaatatttctttcactttaagaagttattttcccatgrtgtaggtcaaatcccaccagactctgcagtcctcaaggacaaggactgtgtcttattctctgaatccccctggtcctggcccccaaatacttagttgttccataaagacacacaggaggaatccttccactctgtgacagtccatctgcttcccctccagatgtgtttttcaggaaagcaggcactttgcgttgaccatcgaagaaaactccggccttctccccgcttcgccggccctctctcccctcctgccctggcccagctcgggaagtgctggaggaactgtcgaattgaactctccttagcaaaagatcgccaaaggcccagtctttttgaactgacttaagaagcagcagtctgtgtagccacatttcaacccggccaggggacagaggatcacatataacatgacctcaatgcaaagatgcccagactgcttcgattctctgctgcatctactttaaagctcttccagttttaccttcctttccttcagcggtggaaagagcactcaagcggtcagcggtcaagaggccttcccgatgacaaccaacactcccagctctgcccattaccagctgggggtgttgagcagctcgctttacctccctccaatctgttcccttttccatggccactaggacacttagcaagggcaggagcaccagmgtgaaagaggagcaggctcaggggcccagccctgggctgtgggctggggatgcagacaaccagagctgagtcagatgggagaggaaccactccaggttcagaataactttcactgagtcctggccagctctgccgtcctctcgggcctcacaccaaccacactgttgtagtccctacattcagctagtgctggcttcagcttctagagcaccggggccactctctggaagagagcatgcttttctgagttgatcctttcctagctcatccccttaccccctcttcccacccaaatcactactactcacctcctacagtgtttaatggtctccagactactcttccccatctgtgtccccagctggggacaccccagcttatttgggaaactgcaaccaccatggccgatggccccaccacgccctgtctaggaagcagaggcctccccagcagcgtgtccactgtgcccctggccctgcgtgaagtgccatcagatgccccgcatccctgcagcagggccctcgtgactggcctcacagatgaggacacagaggcccagggaagtcacttgcttgccaaagtcactcagcaaaccagctaggcctggagaccctgcggtgggagcaggagggccctgcacacaatcagatgttctagtgtccgaaatctgagacygcttcccacgggattactgtctaatccgctggtgacaatccagctgctcacctgtccccagcctcagctctggtccccagggcctgcacactcctggcagggcatcctgataattagtgcagccctccccttcttcctctccccagccccagggtggagggtcttcaatgcgcaccccctgggagttcacctttctcttcctggcggccaccccacaggaggtgtccccatcatatgctccagcatcataacaagcccagggtcggtgagtgcagcccccgtccctgtgtgtttcctctggtgacaggatcccctcgtgccgacaacccgcagggaaaactccccgagtgtcagaaggggcaatgtggcttcctgttcttggttgccgttgttgggttttatctgactgggtgcgccaggacatctgtaccacgttactctttcttggcatctttatatcccgctggctcactctgctaacttttagaatgggtgtggtcaagaggctgctttcttcccaccatttatcaattcagttgcaaaacagccagcacttcccgaggacaagcaaaagaaaatgagttaattgaagaatctggagaattgacatttggtgtgtttttacatgtgccaggaagtttaagccaaaagtaatttgctgagcacctattaggtatcaagtactctactagamcctatggtaaacagagaagtgagtgagctgataacgacagccggtgtgctgtggatgtgaggcggggttttaccagagatgagattgcggaggtggatggcggggccctgaatctggagggctttgaacacttcagacagcattttccaggggatattcatgggtggtatagggaaagcaagtctatgttcaaataaacttgggaaataggactttttaaaaaagagttaataggtttttgcctggtttgggtgggtttttttcttgcaagactcaccagcctttgctatgctaacaggcgttgtgaatccccaaaaggagcaagacagaagacagcatttctcagatttgcctggctggggaacctccttttttcccttcacacaatgcgtctcccaggatggtgtttctcagcagacaccctgtgagatgccggccttccactgagatgatttcatctgccaagtgccaagactgggtggacatttttttaagtcctctctggaaacaaatgtaggcgatggactgggagggggagaggctggaggcagggaaacctgctgatggtaatggttgctaatgtctgttggtggcactgtgcaaagaacctgaygtccatcatctcgttgaatcttcctaacaggacactcgggtaggcagtgctgttacctgtacttcacagatgaggacagtaaggcttggaatggtcaaatcgtgggcctggagtaacccagggagtaaatgggagaactggggttctctccaaaactgtctgacccctagaggctgcctcccgagcgctctggtgcactgccacccagcaggaatggaaatagcccaagccagaggtgacaagcagtgaagacagtggggctggagaagatggttcccccgaagtagaaaggccaagcataagagaagcagtattgtggggagtggtgtaggagagctgggtgtctagacagggtagcagcctgtgcacyggtggagggggtgggctcccctctccctgatcacctcttcctcttgatgaatggtgtgaattgaggggtgggggggctgttcccctttaccccacacacttcctgtaagccaggaaggggaaaaaacatggtggccttgcccatccctaggcagcacccccaactcccgggtagctgtcagctgaagggtcaccaagcatgggtcagccctcacgcccagctaatggcataggatctgggaagccacggtgtcattctatcccatcgtgttctccatgtgccgccagggaaccctccaccaagtccctggacccgctttcccctcaggctgccccgacaggttccatgcagagcaccagggacccagggacaactgggacacaggccctgccctccaggagtagtggggcaggttcagaaaacaaattctaaggcagatttgagatctgaagtgtcactcccactcagtagagccctatatcagcactgtccaagaaaaacataatgggagcttcatacgggagtcacatgtggaattctgaatgtgaaacataaacaggtgaaattgattttaatataatgaacccaatatatccaaaatattatttcaacatgtaatcaatctaaaaattattactgaggcgtctgacattctttcctcgtgccgagtctctgaagtccagtgttttgcacttatagcacgtgttttttggttttgttttgagacagtctcactctgtcgcccaggctggattgcaatggcacgatcttggctcactgcaacctccgccttccgggttcaagcaattcttctgtcctagcctcccgagtacgtgggattacaggcatgtgccatcatgcccggctaatttttgtatttttgtatagatgggggtttcaccatgttggccaggctggtctcgaactcctgacctcaggtggtccgcccaccttggcctcccaaagtgctgggatttagagcacatcttaacgtggaccagacacatgggacattggctccccttttggctggggcaagtctggatttggtccagttagatgtatctttgtgacctgagtgacggaatgggcaggaaacaaccggaagcctcccggggattgctgtgggtccgcggcctgggtctcgcgtgaatttttactttccttactcagcctccctgtctcccatgcctgcgagagcatcaagacaggcaggctgttgaaaggacactgctgggcgttcaagataaagggtttgaggggagagctgagaagtctgtgctctactggttttgattcaaatcctgatttcaaaagccaatcattttggacaaattttatttgttcatcagacgcttgttgagcagattttttccccaggtctcacagagcctgcaggcatagggatgaacccccttggagatagacctgtaagaggtcccgtgggggcaggggtgagggatcccacgctgagtcccacatagcaggaggcacgaggcagcatccgagccgacagagctcttgaaggacaggcacacgtttggcaggccagtccagccggagcagcccattccacccggagggtgggtggcaaacaaggcatgagagcccagtgctacttaaaggatctgcccagggcaggcatgggtgaaggttgagaaaggtctgtgtggggcacagtggagtcccggtcttgggggacatgcagtgccagcctctagccttgagcaggcgcccaaggacaggagggggcatgagaggtctggagagggggtgggctcgccctattgcacctgggaagggcccccagcctgtgtggagcatggtggagggcggagctgggagccctgttgggagatgattgcagtaacccaggctggagacaaggttagaaggaaagaatgagcagaggagacggcctcaaaaggtggacagtggggcgaggcaggaggcgtcgaggttggccctctggctctggcttaggtgactgggtgccttcctccaggccgtgtgtggaaatgcattgagccttctcagtgtgtcctgatgttgtaagtttccactttaatgcagctgcagagactgcgtcccacccgaccgcctcccaagatacagcgctcgaggcccgtgagtagctggtggttctgccctccccacctaacactgcctgagccattctccctcagcctgactaaacctccagagtttggaccctcctgcctggcaaaagaaaactgggaattgggtttttcagcttccctctctgtgtggcatgaacttgagcttgcattctctgggcttctcttgctttttcgtgaataagtttggtgacttgcagatcagagccataggtagcaagggggccactgtgtgctgcgtgtgctgcgtgtgcattatttgagcaagtctcctagggtgagcaatgggttggaagccttcctccagacgcctgttcctcacaaacgaagcagaagtccgggggcaagggtctcgttcccgccagatcttggtctggagatgcatttgtaccttcccaggggtggaggctatgtccagggagtatggagccagctcatatggatacaggtaccgctgccctgccaggccttccttggagatccactttcccatgttaagtgccaagtaaggggcgtggtggtgcatgcctgtagtcctagctactcaggaggctaagatgggaggatcacttgagcccaggaggctgaggctacagtgagctatgattgcaccactgcactccagcctgggtgacagagcaagaccctgtctcttaaaagaaaaaaaaaaaaaaaccaagtaaggatggagaagcaggacaaaatgtgataaacccaccaccacctgggaatggggtgggagggcgagagagatccgtccatggaaaaatatggggtctgggtcccgtgttaagcatcagtggagtcgttttccttggtaggtcagactccggccatgctgaggcatgcgaactttagcaggtgctttgaaagtgggaaaccatccaggacctttcgatgggggctgtttaccaagggaaaagtttctccatctaccattcagtgtggccaccactctgtggccaaccaaagagtaccccacaacccagtgtcctagtcctcccgccctctgcaacacacgtgtccaaatccatcttgtgaaggcaaagaggccggggcctgcaggtgaccaggtgaactgtgtctgttcacctggggagatgcacccagcatccactgggtagctgctctctgggtgggtgttggccattctgtggcacagttttccttcccttcccttcccygctgtgggtgggaattagagggctagatgggaggctgggaggacttagatgccttcccctgtgaccgtcgcgagtccacactcccagccacacgtgaccgtggatccatcccgtatctccatcaaactgtggttggcccaaaccccccatcgacacagctggcaaggagctagaatatgtctgctcactgtcactggaaagaagacacaagcagcaaaaagaaactgctttgggggacaggaggccccttctaggctgaaccttgtgtgactagtgagagtttcagtacagatttggggggccgacagagctaggcttgaatgctgaagtcatgtcactctggcaagcactgaagctctctgagtctgatttcacctccggggctgtgccctcattcctagaggggttttgtgagaaggaaagtggatgacatttgtcatttgcagaacacacacagtaagagtttttttttgtttgtttgtttgttttgagatggagtcttactctgtcattcaggctggagtgcagtggtgcaatctcagctcactgcaggctccgcctcctggattcacaccattttcctgcctcagcctcctgagtagctgggacaacaggtgcccgccaccatgcacggctaatttttttctatttttaatagagacggggtttcactgtgttagccagaatggtctcgatctcctgaccttgtgatccgcccgcctcagcctcccaaagtgctgggattacagacgtgagccaccgcacccggccaacggttcttattcttaacaggtttttgcatattacagcttctaaggaatggcccagtttattaataaccatcacttgcctaggattttatagtcagcaaatcattcttaggtacctcatcccagctgcgcctcacagtcgctcagtgaagtaggcattgtcaccagtttagcaatgagaaaactgatgcttggtaacttaacccaggttcctcaactgcaaataaggtcatctggactctagaacctgtggtcttgccagtattccaagctctctggaccctccgtcttctgcttgggaccagaatagtttcagctttcagtttgtttcggattttagaatatttgcgtgatacttcctggttgtgtgcccctaatccaaaatccagaatactccagtgagcatttcctttagcatcatgttggggctcaaaaagtcttggattttggggtgtttcagatctcggattttcagattagggatgctcaacctatataaaatgctgcgggaagaaaaaaaattcagtcaagaaaaaaatgaatcagtagcagctgaactgtctgtggaatctccagtgccatgttaggtctggcagagacacagaggagaagagaattaatattcattgagcaccttttatggtgcctaggactgtgctaggcacttgtgtaattattgtctcatttgtccagcccagagcaggcagatgccatctccctaatttgtagccaacaccacagggatgatgacaggcctgatgataagtcctgcctttgagcccagcttgcctctctccactgtctctctttgttttctaccaaacagcctccccttaagccaaagtcagcagcaggtagctctcagaattccccttcgaggcttgggatccaaggcgggcagggaatcttggaagccatgattcagggaaggatcattccccttggaaaaattcaagtattggagacagctacagtggactctgtgttgtctcactggtgtggggatctgtgcagattgcggggtgggctgccacatccattggcaactgaggactcgggagacagacgctgtgagagacacggagtagcagctgcctcaggcgctgagctaatgcaggaggtgactagcctggcgctagctttggctggacctcctgggttgatggcatgctgaagaggcaggatgcctaggagaaccagctctcctaggcttggaagtcagagaggcctgccctggtttgaattacagcttggccacttcctggctgtgcgaccttaggcaggatcctcacctctgagcattagtttcatcatctgtaaaatgggtttaacaataccacctggtaaaggtaatgaggttgtgtatgtatagcacctagcacagtccctggcatgtcccccgaacttacactgccaagcatcaccactaagaggccaatttgggagtcatagaagatttgtgctttctgggcccctaaggaccatttattctaaatgcatttatgcaagcatttccagtggacactgctacagactaggtgggaaccggggagactcggsatatggaacccacaagggcctcgaagagaacagcctaccaagctcccatgtcaggagccatcagcctccagtgtggctttgctgggtcacgtagccacaaactttccagacagaagtgcagccgttggcccagggtagcaggggctggggagggtctagccattcagcctttctggaaggagctttgtagcctggcacctgtggctggagttcagatgttacccgaagatttgggttttctttttaaaaagaagaaaaaagaaagagcagaagaaamccatgccagtgtctcctggacgaaggggcatgggttggggcctgccagggaaaggcaggctgccgtcggcctgcgtgtgaagcactttataagctctgtatttattatttcttgctcaccattaaaatcaaatgtactcagtgcttttgtattcaatacacatttaaccctgccgacttagatttctcaggttttaaatccagtggggaattggctggcttcccaagtttcccctccagtcccccttgaacagagctggaaatctctgtttagcattttctccccggacgcggctgggatcctcacaccggtggggccagtcactgttgtgtgtgcctgtgggtttcttccttcatcaccagtacccacccttcctaagcacccccgaaacatgggtgtgatcgctgaaatatgacaagacttgtctgcatcgtctgtgattcgggcttcattaaaccgttttgtctgtgtgtgtctgtgcctggttgtggtctgccaccgtgtgtgtgtgagggggtgtgtgtgtgagtgtgtgagtcatacgtgtgccttcacctcttgcgcgtgcctctgtgagtgtgtatttgtgagatagtgtgtacacggaagtctggaggcctcgatgtatctcgggatggtcaggtctgtgagtgtaattttgtgtctggctttgtccacactagtcaggtgtgtgtgactctgggtgggtcggcagccatgctggtgaccaaccgcctctgggtctggcgtgtctttctctccctccccagcctccgaggctccagctccgtgctccccacccccccgcccctccccccctgctctgtctgttttatcatccctaatgaagcagtctcctccaccgatcccgctgattgccaacccattccttttgtttgttggcgctgagccattcagcggcactctgacagctcagctcgtctaattagctctgttgttctttttccccatgtttcaccacgttgcaagttcagttgaagttgccacaaacttaatccccccatttcagccacaagttcacattcttaacccgcctttattgtagcaaggagcagccctgtgcaaggatgagctgacaggccttaaagtctgacctttcctgaaagctctgccccggggccccgcggggcaggggcagaactgctccttcaccctacccacactcctgcttttgtgggcagaagttgggggtggggatcattccagccaggtgaccctgttgaccagctgccagagctggggaaaccagtgcagagtcagaaggggtgcagggatacccacttgtttattcagcacgtgttgactgaatgtgagctgtgtggcaggcccagctctaatcacgatgatactcgcagcgtcattatgcacttctcagattccgagcagcaacattcattcgtttctaaaaatcttgctgagcgaccatgacataccaggcagtccacagaatgcgaggcaggggtaagagaatcctaaaactcatcttctaattcagagacacccactcatcgtcttccttttgttgttgacaagaagggacatccaggtcacagaggagcaggatgagcatttattgagcccccattgtgtaccagaccccttggggggactttccctgtatccgggcttcacaatcaccccacagatgaagacagccagtttggtggaatgcctttggtgtttaccacatccctgatatgccaaacctgtctgagatcagactggccactccacaggaaaaactttggttagatcagacgtgcgcagacctgagggcttgacaagactctgtaaagacttgtcttttatgcagccagcttctatcatctgtgtccctaagccaccgtgccgtgtcacccacaagcttctggggggtggggggtacgatgttcaggaaaaagggtgggcaggaagtggagtgtgtgcctgcttcccttccctgtcttgtcctggaaactcaaagggtgggcaggaagtggagtgtgtgcctgcttcccttccctgtcttgtcctggaaactcaaagggtgggcaggaagtggagtgtgtgcctgcttcccttccctgtcttgtcctggaaactcaaagggtgggcaggargtggagtgtgtgcctgcttcccttccytrtcttgtcctggaaactcaaagggtaggcaggaagtggagtgtgtgcctgcttcccttccctgtcttgtcctggaaactcaaagggtgggcaggaagtggagtgtgtgcctgcttcccttccctgtcttgtcctggaaactcaaagggtgggcaggaagtggagtgtgtgcctgcttcccttccctgtcttgtcctggaaactcaaagggtgggcaggaagtggagtgtgtgcctgcttcccttccctgtcttgtcctggaaactcaaagggtgggcaggargtggagtgtgtgcctgcttcccttccctgtcttgtcctggaaactcaaagggtgggcaggaggtggagtgtgtgcctgcttcccttccctgtcttgtcctggaaactcagcagttgtggcatcccatccgtggagaaagcaagccccctgccccggcaggctcggttgtttttatcagcaatgaaattcagagatagactttctcagcttagctctcaacccatccctctcgggcactgggagtgtacagagatggccatgccaaatttaaagccatgtaatgtcgactggaccaaatgagtatccttctaagggcacctagaaattctcagcctaacatccatcacgaactctggcaggggatgagggtgtctttctctgtgggccctcatgttcgctttcagagacagcgggtcagaaaaacccatcccgctgctgcagcagctgtggggttaggaagttgggtccttcctgatgtgcccactgcagaccctcccactaggtctgctcagtgcatgtagctacacaagatgggcagcatccaggctgaaccctgctgggaggactagcacagggatgctctgggaagcagaaagacgatttgtagtggcactctctcatgcctctcttatttagagaggaaaataagcaccctgtgattctgttgtaaaaagagcaaactaagcatgttcaccctaaaaacaagtgtaagcgcaaccttttctttctacaaaaccagcttctgggcatcagaggaagatgagagggaattgtcattgataagggcctctttgttccgggtcctatgtagacatcatctcattggaccctcaccacagccctgcaaggaggccaatggarctatcctcatcttgcagatgaagaaaccgagctttccaggagcacccttctgatttgaataggccacagaattccagttaatgtgtctgtctgctgcctattagatggtgatgtttctgtgataggctgggcttttgtagcctgtagctttgaaaatccctaaacgttttttgggggggccgtttatccaaatgttcagaatgtacctgtatggcttttccaactcactccttcttggggctctccccctgtacctcctctaggtgcgcccacctcgtccacatgttgttaagagaccaaagagcaacatcgcagtggaaggccggaggacgtctgtgccgagccctgagcagtgagtattgtgcctctcccctctgtctgtaagaaccctgtgtctgcggagccagcactttgcgaagcccaagcgtgtagccccggcctttgtgaggcttccccggggctcccagcgggtgtttcacaaaggggtcattcagggaacaggacttgatcttttactcggtctggttgtcacaccagtgggaggccccagaggccagggagccgggcacttgggctggatttcgaggggtggggtccaaagcatactttgctgggttcagaagaaggtcctaggcctcttgtgctgaagatgccgagtcagtaggtgagggttagaacctggtgaaggaggccaagtgttgaactggatccacccaccttcctaggcctccatggccgagaacctatatacaggactgccctcatccactgccccagacccaccaggaccctttgcccacctgtgccggaggatttatgttactgtggtttttcttacccatctccctgagacgcggagctccctgggtgttatgcccagcacctcccgtaggactggcctagagtcacctgctcaggaggcgtggggtagatgaagtgaatgaggggggcagaaagacaagcagtggactgaagtggacctgcctgtggtggggtgaggcagaaggctgcagatagccccgagtccagaccagagccatctgcagaaggtagcactgcttccctttgtccgcaaaaggagcacagccctcagtctctatccagacaactcagcggctacacgctgacttcctgtgatgccttgaaaaagtgcatgagttcgtcttggtctaggattgttggaggagtcagaaaaactaccccagggatcctgaagtcctttgggtggaaagggggaggcccccatgtctgtctggctctcagaaaatgggaaagaaggtaagggacatggcaggtcccagtcagagttggagcaagaaggaaaaaaaatgatttcgagctgtcaagctggggcctaacccaagttgcagttcacttcagctctccaggattttctggttgatagcgagggtacggtctttaaggaaccagcccacccagacagccctcagactttgcccagaaagttccggaattatatgtgtgcgtgcgtgtgtgtgtgtgtgtgtgtgcacgtgtgcgcttgcacacaaggatgctcagttattagacatttggaagagaggactcctgaagctgggttaagtttaacttttgctctgcacaatagcctggtgggaacatgagggatggattatgattgcccccttatggagagaacgctgcatggcacctgagtgcctcggactaaagattcctccttaaggggatgaaatttgtcacatttctttgaagtcccctctttaaaactggactaaaccttttagacactgtaccaggatacagggtcacaggcctgttgatattgagatgtaaacccagaatattcttgcattacacagaaacaccattgcaacaccagctacactccacatcctacagaaaagcattacccattttgcggccaagttcccgacgagaggctggacctcttcatcacattgacttacgccgttgcttttccagactgggcagaggggctgacttcgcagtgtgtgccaaagagccggtgtctgataatcccattttcctgcttatcacctgaactgtgtcagtatcacttttagttttgttggttggttggtttgttgtttgtttaatatgccctgttttctacttctgttggaaaatatttggggttgaaataaaccagtgggagcatgggagccagtttggtggttggcaaactaccagtgatagaaaacaaatgacaggttttctgtgagcgtacgtcacagtggctcgggcccacaaggagacagaggggtacgtttcaggacatcattccaagggtttctgttcacgtttgtttaacgaggaaggggaagttgttctcccataataccagtggtatttctagtgcaacccgggtgtttttctacgcctcttcccatgctgcttccccacccccccactgtgctccgccccttccaaatgccatgtcacaacagcacttggatgtgtttttctcaactgtcatcagctccagctggcaggaccaacttcttgaaacacaggaagcatccagcggaaaatattttaataaaacagactcctcataaaatattgttcgggggagggggaagaaaccggctccaccaatctgtcggcattgtattgggagatgtgagaagccaggctggcagcaggggcccgatcctaatgggcctttgtcaggtggtggttccgtgttgggcacacggacttggtgcctggccctttaatctggcctgggttttcttgaatcacagatcttcatctccactgggaatatcaaagtgcttgggaaacttagaagactggggcagcagaaggggatgcaggatctttgaagtggagaggagagattcattcctcctgacttcttgccccaactctcacttccaattgcacattaaataatcccagcactttgggaggccaaggcgagcggatcacctgaggtcaggggttcgagaccagcctgggcaacatggcgaaaccccgtctctactaaaaatacaaaaattagccgagtgtggtggcgcacccctgtaattccagctactcgggaggctgaggcatgagaatcacttgaacccaggaggcggaggctgccgtgagctgagatcacaccaccacactccagcctgtgcaacagagtgagactctgtctcaaaaataaaataaccagctttgtggacagcaagatggggctgattaagagtaagactgtctcctggagtagctgagcatcctgggactcatcagggcccagaaacactagccagccactctctggccagtccacccctgaagttcatttcttccttcccagctgatgtccatccctccatcattccatctgtccattcgtgcattcattcattcagcaagtatctttgaaaacctactaggcgcaagcacggacgatttttttaaaggaggccttaaaagggagtccccatgctgactcttggttgacttgcattttcccaaaatgaaattttcctgtgtcaaattttctttctgaatcaatgataggtttcctagtcccttaaaactggccgttggcaattggaagaagacttttttgaagatttgtgggggaaacattccctttacttttcaggtaacattacttggttaatattcagttactaaatctcttcaagaagtactggctacttccattactattcagagcacagctgatgtgacgcccaggggcttccgtggggcagggatcggggtaggagggatcctgcatgagaggctgtgggtcagacaccagtcagcagggggcgcggtggagcacccattgatttctaggycctcttgggctagcatcgtttcttcccgagtgggagctcaggcccagaatgtggatttgaccagtcttcccaaggtcacccagttgaaaagtggccaggccagcattcagaattcttgatttcattctctccatgacattctgatgctgtccttggaacggggcccttcagggttcatctttagtctggctttgcccagagagacagctccacatcctaaaatgagatgatggcctgcccagcaggccacccttcctctctggctccctgaaggctggagttgggaaccggatctgttcagtcttctcaccgccaaagaaaccatgtgcactggtgcctgagtgtttcttcttggggaaggaaagaggaatgacattcaccaacatcccttaaggttgtcagaggtattagccgggcatggtggcgtgtacctgtagtcccagctagtcgggaggctgaggcatgagaattgcatgagccctggggagttgaaggttgcagtgagctgagatcatgacactgcacaccaccctgggcctcagagcgagaccctatctcaaaaaataaaataaaaaagattgtcaaaggtaggtggtagctttcccattgaacagacagaaaaactgaggctcagagagactttcataacttgcccaaggtttctcagggccagaaaatggtaggatcggctgtctgatgacagaagcctggtccattcttctctactctccaggctttttgttaagacctaattatcctcacgtgcttctctgactggtggggacgacggctacggcagtgagcacagtgaggttcacagctcccctcctattaaaagcaggccacggccgggcgcggtggctcacacctgtaatcccagcaccttgggaggccsaggcgggcgggtcacttgaggtcaggagttcaagaccagcctggctaacatggcgaaaccccgtctctactaaaaacacaaaaaattagctgggtgtggtgatacatgcttgtaatcccagttactagggaggctgaggcaggagaatcgcttgaacctaggaggtggagcttgcagtgagccgagatcacaccattgcactccagcctgagtaacagaacgagactctgtctccaaaaaaaaaaaaaaatgctgtgtggtggtttccatggggtgcgcacagctgcgaggccccaagttatcttccttttggtctgccaggtataggtaaattgcccatccaactgggtgcwtagaaagagccaatggtggccgggcgcggtggctcacgcctgttatcccagcactttgggaggccgaggcgggcggatcacgagrtcaggagatcragaccatcctggctaacacagtgaaaccccgtctctactaaaaaaaatacaaaaaattagccgggcatggtggtggatccctgtagtcccagctactcaggaggctgaggcaggagaatggcgtgaacccgggaggtggagctggcagtgagccgagatcgcaccactgcactctagcctgggtgacagagtgagacgccgtctcaaataaaaaagaaaaagaaaaaaaaaagccaatggcaggctctgaaaggcagcactgtggtctgagccgccgggcccctcatgatggcacactgtgtgcagactaaggccaaggcagggagtgacacactgatcccggggtgcatctctctgccaggcagctagtcatttgttccctgctgggaagtggcagtaggggctggggcactggccctcacagagttgctgagagtatggagggagataattacaggcatctgccacctgtttaatcttcacagcccagatgtagggctgtcttctgagtcttaagggttaaggggcttgcagctggttgtggatctgaggtgcccctcctgacaacctgcatgcagagccaagtgctttcgactgcacaccttgtctcctaatgggtgagacactgaacactctccagtcacacgagggtcttgactggctgcatcctggttatttgaagttccactgtactaagtaagaagggtccaaactcagccaccagggcccagggctgctgcccagctcacttctctggccagatccgtgcaaaatctgctcttttcaggtaatttttggtttgtaaaaattacccggtagcctgatagacaatctggaatgttagggaaaagagacaaattcattctgaatcccattactttcattccactacatattagcattcctggagatccatgcccagtctttatcctgcatgtcttttatagagctgcaacttccttgcaatatgccagcatgtggacttgttccgtgtgtctctgtaacccctattgtctgtgactgcagaggatctcattgtgtgtatgctcatggtctgcctaactattgccctcatactggatctttagatcctttccaggttttcattaatataaaaaatgccagggtaaatatccttattctaggctgggcacggtggctcatgcttgtatcccagtactttgggaggccaaggtgggtggatcacttgaggtcaggagttcgacaccagcctggccaacatggcaaaactccgtctctactaaacatacaaaaatcagccggtcttggttgcacacacttataatctcagctactcggaagcctgaggcaggagaatcatttgaacccaggaggcagagtttgcagggaacagagatcatgccactgccctccagcctgggcaacagagtgagactctaaaaaaaaagaaaaaggaaacggaattattgacaactcccattaactgggaatgtgctaagcactttacatacaccatttcattgaatcctcacaagaaatatgtagggggaggtcttatgagatctattttatagaaatagctgagacttcaagagattgtcactgcccttggtcacacagctagttagtagcagacctgagcctcaaacatgccttgttaagaccaaaagcctttacccttaaccagttgtaagaagatttctgctccatattgctatataactttctgaagaattgtaccaccttataccctcaccagaactggactcccggacatctgattctgagggacccagagaaacatgtgactggcattcaaacatgtgtccgaatccttctggacaaggaaaacttctgtaggccatgctagctaggtagacagtctctaccccaaatgcctgacccttgctgcctaggaattggagtgtctgatcctctgaattgcactgcgtgaccccagcaccaaagccccagaagattaaaataagatcagaagaagctgccagaagcatttagtgagaaaaccccgcccgaagcccaggtctcagaacactttgcaagggactctggacactcacacacatgctctggcaaaagctggcgtgccgcttgtgcacgttcaacggccttgccctcctcgagcctagactcagcatagcctcagcagatcagttgctcccagctgtggatcacacaggggtagagcactttccctcctgcacagccccactgctgccctgggggcgtgggcccatcatttggatggcggcctggtgcatgggcagagctctggcatccaacaggcctgagtcagcctcctggcccaccaggcaccagcctggaggctatgggcatgtctcctggtcctcctttcttaacatgatgcctattaacatctccaggagcgtggctggggaaaaggcccacagtaggcactggcatcctgagtgagcagagcgcgtggcctccctcctggccttatctcagcactccgacaccccaacacctcccccacgaaccacccactctcctccctcccacgcccacaatcccctgtgcgtctcctgatctggcggtgaccggccatgttgtagctttctctttgtctcacacgcgcgcacacacacacacacacaccaggcacaccagtagtctgtgagctcttcctcagctttgactctccaactcctggaccacatccgagcccagacctctgctctgagatgtttcctgggtgaatgaacaaaggaatctgaaggcagagtgcggcttgcagtcaagcacctgggaggcggggtaggggcgtccggtaacaaccacaaacaggtaaagagcacctactgtgtgccaggtgtgattaggacgtgcgtatgaagctgccagtgcatccccagccctctaagagccaggaactgtgctcagccccaggagcaagtctccaagatgccagctgggccctcggccccagggggtaggggcagctgtctgggctctaccccctggcaggctgccagggcccactcccttagcagccagctatgcaaacacatgagcagaaggtcacagacccaattagcagggctagaggcctctcactctcactctctctctctctctctgtcacacacacacacacacacacacacagagagagagagagagtagattctgggccctggagacaaaaccaagcctaaagccagccgtggagcctgagcctaaactggaagagcaggaagtgccaagaatacctcacttctgcccacccaggatccccccaaggatctgcagcagccccggaagacacgggacccatttgtctgtcgcctcttctgcctggcaaatcagagggaaggacttttcccaggagctgtcaccacagggagttaactggaaaccaagccttggggatgctttaggaacaggggcctcatcctcaagacatgactgatttcagtcacccctgaaaggctttgccttcccacctagccctctgcctcttccagatgccacatcgccatttctcaactgcctgtttkgtgcccagcaatttcacacgtgttgtcttggctaagctccctgctccccaaaaaatcttcgcagcctgggcattcagccatgagggagccacggctgtagccagtggaatgacgtaccctcagtccaggatgtgcacccgggcagccaggtcccacagccactactttcttgcccccaccactgctcccacagttcccagaactcagtctccagatctgggctccaggatgcagaggctgtcctcagggtgaggggcaggtgttctgcacagtgcctcttccctgcagaggaaagtgcccccaaggcattcccagccccatcttccctccaccgcagagcctgaagcccacatcctgtgctggggccactgcctatgtgagtgtccagccagtggtcgtggaagggcttctcgggcatgctggggcacrggtatggatgtgtgaaattggcattcatgatttttgttgaaagaaggaaggagtgaacctacagactgagaagtaatcaaataaatgcccgaataaaggctgaagaagccaagggcataacccaagagagggggatgggcagccaggcatgcttcctgcttgactgcagccaccccaaggccttgcaccacccccagacttgcacgtcacctctcatccttgcgctggctccaggccctccacgacctggtccctgccaacctccagcctcttctcttgaactccccacccggacatggagttccctgtgcctgcccctctcggagatgcctccaggtcattatgatcctctcccatgctcaggattaaaagtccagctctggccaggcgctttgggaggccgaggcggatggattgcctaagtttaggagttcaagaccagcctaggcaacatggtgaaaccccatctctactaaaataaaaaataaaaaaaatagccaggcatggtagcacatgcctatagtcccagctactctggaggctgaggcaggagaatcgcttgaacacatgaggcggaggttgcagtgagccgagattgtgccactgcactccagcctgggcaacagagtgagactccgtctcaaaaaaaaaaaaaagtctggctcccacatcacctcccaaatggagccttgtccaagagcccttgagccaggcacgcccccaccattgtcctccggcaaagcaagtccccagtggggcgggaaggacctggtatctcacactcacccatctctcccacctcccctaaaccagttcactggacaggcagaacaggcagascatgctggtgatcgtgacttgtggcaacaagaattcttatcgtcgttgcttttaagtagatattcacctgcaactgagtttacaggttcctatgtacagtagcttcctctgtctccattgcttcctccctgagaacagtcctagcccttatcctgggtcgcacagagaacagctccagtctaattccagagtttcttctatggggcgtgtgccactgtgtacccccagagaccctgcagtcttggttcagagccaccttcttttttttttttttatttttttaagatgmggtctagctgtgttgcccaggctggcctggaactcctgggctgaagcaatcctcccacctcagcctcttgagtagctggaacttcagagattcctttgctgtggaatctctggcaggagacgggggttcccagatgattctgatgtgctgacatacattcagctgaggaccactaaccatgcctggaaagttctgggaaggcagggactgccttactcatccttgaacacctaggaaagacccygcacaggakacagatgcccagaatctacttgttggcaggtgaatgtggcatgtggacagtagtggattagtcactgtgtgctcagcaccatgcaaagccctttacgaatacgtgcatttaagttttcccataagactctcaggagggctacagaatctccattttacagataagaaaataaggttgcaaagatgtggaaccagcccaaaggcccatcaatcagcaagtggataaagaaactgtggtatatctatgatggaatactactcagtcataaaaaggaatgaattaatggcatccacagcaacctggatgggattggagactcttattctcagtgaagtaactcaggaatggaaaaccaaacatcatatgttctcactcataagtgggaactaagctttgaggatgcaaaggcgtaagaatgacataagggactctggggcctcggcagggaaagggtaggaagggggtgagggataaaagattacaaattgggttcagtgtacactgctcgggcgatgggtgcaccaaaatctcacaaatcacagctgaagaaattactcatgtatccgaataccacctgttccccaaaaacctatggaaatagaaaattaaacaagaaagttaggttcagggagatgaagtgacttttccaaggtagcctgactaggaaggggagggtagtggatggttagacagactggcacccaccggacaggcaggacctagcctcaccctgggggctgtccctgctcgtcagcacctgcccactggagccaygtgacagagggacacagcgtagccaagacatttacaaagcgaggatcctttgtgcctgagtgaagtgatcctttcaaaaatgatcaccagctccccttcaccacctccggagaccaagtcctggctgatttttccccgtctttatctcaagtacatttaaatgtcaattaaatttgaaatatctacatttgtcagcatttcattttgggccagcgtgacgtgctgctgatttgtccacgcgatgtgacacatraaaaaaactcccgagatgcagatcttcctcattaaaaaataagccggtgcgatcccggcgcggcagagagcatggagcacgtccctgcttcctgacgccgtgtctctgacatggtatttaaaaaggaacagcctcgcctgtcaccactgtcacacgcgcgcgctaaccrgcgacacgttaaaccaaacattagaaggggttcgggaagtcatctgcatgggaactccacgcggagacaaggtgggcagaggcgggagcagccgtgggggatgatggggtctgatccatgacggacggccagcctttcttctgcaccaagactctggcagccctcgctgggcagccaagtttgccgcaacctgccttttcacagacagctctttgtgtgtaataaaatccaggcaagtggtgggtggcagaccgcaggggagtagctgaattgggttaatgagggaaaaggtgctttttttttttttttttttyycatattctgccttaagctaataaaaartttaagcctggacgttttcgatggttcatcctttatctctgacaaatatctgactgtatgtttcatgggagaacatgggyagctgaatttaagtaagtttattttgaaacctcacctttcattaaaagtaaaagaggaaacaccctatctcttatttcgttgtttctgacccagaaaactgaagaggcaagatcccgtagtggttgaaagttggcaaatccacattcagttcctagctctaccttkagctgctgtgtgaccctgggcaagtgactccccctctctgagccttggctactttgtctgcaaaatggggttgcagtaaagaattcatgagaaattgtatggacagcatttcgcccaaggcttgtaagtatygccatccatgtggcctggactcgacaaagctctgatctgaccacatcagatgacaaacttctcacctggatgtaccctgccactttcaagagacaggtggtgtattctggagacagctaggcctcctgtggaaatcactgcccaaccagcctggctcagccagtacatccaactggagaaggaaagtggctcctgaactggaaactgcggttccctctcttcccccgcccaccacagtcacaccagtgtggaagcccccagccccctccaccatcacagcagtgtgggcagcgctggattgtgacagtggcctgaactgcggcagytggatttagcaaagccagggcayagcccagcgcagaggttcctcgctcctgggtgaagccggaaattcctggcaggttcagtggcgttgcaccaacgtgtcaagctgtgatctgtgctctcttgtcagagccagaggtgggggcccgtgcttggataggtgtcggaaaggcaaccaaggtggacgtgagggcgactggagagcctccctccatttggcccgagccggggctggtgtcccctcgtgtgcatctactccgagccccgctcacaggagagggtgaggcccctgggggtggaccatccgggctgcagtccctgttctccacttcttggccacgtggtcacctcttcaccagtgatgccccagtgcacagctagcctgggtctgctcacaccargtaggctcaaagcgcctcttggttgggtgcacagatggacagatggatgggtggactcatgaagccctcaccctctagaaaatcagtattgcgacaccttcttgttaggctcttgtgaggggtagaagtggcctctataaagcacggtacctgcttgttgatatcattttaaacactttctgcctgcccctacctacctgacaccctcaccttcaaacatcgtcccattcttcacatcttagcatctcagaacagatgggagcccagagggggagcacttttgtaccacagccacagtctggggaaaggggacagtgtggtgcagctccaggaagatggtaaagtgggggttcccccagcaggctggctttcattcattcgcaaacttccacagcattcatgctgtaccccagctggggagaaagagaagaacaaggcaggccctgcccttgaggaacttgactcagaaacagagtgrcaagaggttaaatggtatctatgaagtgcgaagaggcacagccagggagctctcctagcctccagtgggcttcgtagaagtcccgctgagctgagtcttcaagacggcagagcagtcagtgctccaagcaaaggtgacagggagggggaatatccagggcccagtgtggtcaaagayggtaagcatggccgcaggggaggccaggagagggccacagaggtaggtagagccaacacacagcatggagactgccctgctcggagctcggcacggccgctcagcagtgcatcccacgagctccccagagtgcagcagaagcccacggcctgcgcaccctctgcccctcacctgctcaggagagcagtcagtgctgcagagtgagagtgggctccccctcactttgaaacaagtccctgcaaatgtctgaacattattattcctaaccctttgctccacagatttatttactcaccataccaccaactgcagcaagatcacaattcagaatggcagatttataggttttagcaggagagtgacaagtgtgggtttgtgattgaaagagactctggtggctgtatggagggtagcctttctgctctgtcttctttgctgtggaagtggcaggagccaggtggtgccctggccccgagattcctgcaagtcaggtcttcctgacctgtccactgaggcgggaaaatgccccctggaccagagccccctcgagtccaggaagggctgagttgtgtcttgccccgacagccagcaaggcagcctgggagcagagaaaagcccagcactgggactcgctgcctcctgttgtgtaaccctgggctactggcttcccctcctgagcctcaacctccactgcagttcgaggacaaaactctttgcctggccagcctctgggaggaagtgagcgttctgatgtgcaagtgctgggatgggcaccagccctggcggattgcagcaaagtgcaggcacaggccacctgccccgtccccctgcgcagccactgtctctcactcaccctccagctgtggttctcatgtcctttttttggacacgttgccctttcctgaaataaaccctcaaaagaattctagcatacagagcagagaagggagacggctttagctgggggctggggggtgaggggagaggaggtagcccatgccagcccccgtgccccacattctccccagacttcactcgcctcagagcaagccagcccacagaatggggcaggggtgtggaacaccccgggtctgctcacaccaagcaggctcaaagtgcctcttggtggggtgcacagagacacctactccccagcacaagggccgggatttgaacccagatctgcctggtccagctcgcccctgctgagcacatggcctctggtgggccctggtcagtatataattcatgggagccgggcgtggagtttctccaggctgtgtatgtgttggtgtttatagaggtagagctcacaggtggctgacaagggagatgcattttttataacaatgaatatttaatttccacatcacagatgaaaaagactctctgaagaggcatctgagggaagctccagagagcagcygctaatcagaaaagggccttctcgcgagagctcttccgcacggctcacttttttcttgaacttttttattttttatttcttcctgcttattggaatagatatgctcattgtagaaaatgtataagacacagaaaaataaaaagcagcagaggggaaagaaatcacccatgattccactggctgttattgacgtttagccatgaacctttccagtcttttttctatgaatttttccataagcagatgacagcgaatgtggtgtgattgcagttctgcatcctgatctttaaatttgtcttcataaacattacgtttcatgggaggacaagattcagccactgcaccagctagttgttgctgacagtgtaggttgttccatgttttaatattataaacagcagtgatgacaatcttccagtgtgattctttgccaactttgagggttaaccaaatggaagtggaattactaggtcctatgtgatggatcatgagtttaaggctctggacacgtggcaaatttagtttcttttctatctggaacgagcttcctctcctgagagcccccaccccaggctggcacacagaggcagggccaggcgtggagcccagaggcctgcttcccgcctgcacgtgaagttctgagggcgcccctaactgcctgttctcttctcttttgtcttcctctgccccagcctggtaaagcccttgcgacactatgcggtcttcctctccgaagactcctctgatgatgaatgccagcgggaagagggcccgagctctggcttcaccgagagctttttcttctccgctccctttgaatggtctctccttccttcttccatttccctgagctcggcttggtgactctgcggggctgcatggcgaaagcggggggctggtgctgcttgcctttgtgtcggggggagggtgtctggagctgctgcctgccggtgccccagtgccaacatgcagggtggacaccacctctgcgtgccacctctcagggcatccgttttgccagctccacagaggctgtgacaatagagaggtgacagggtgatacgcgagcattggtccccttagagatgaaatgtgcttgattgctagtggaactggtgactacaattagcctggttgttgatctccaagtccttctttatctcagcacatcttggaaagccatggagatgggaatcagagtttaagttaaaaaagaaaacgttcctcatatgaaatgtgtatattaaatgccagcctatccaagtgttctgatctgcctgactttttaaagataatttaatcattattatttatagcctaagcctcataccaattacaagtagcgatttttaaaagtttcacccaccatccagccacccctaagattaagctgctgtcgccctccttcctttacccgttcttgcccctccacccacaagtgtttcagagctggcattgagcagagagacagcttttgtctgtctgcccttgttaacacggttatgtgtttttaatgggagcctttaagggaatggaaactgccctttgcgggatgcccgtggtgcccacagcaaccttccagggggcacgttaatcgttttggtcattgcacagaagagagatgcctttccctccctctccctcatgtcccctgcaccctctccctgttcccaaaccccagcatcaggtccctccccctgggatggcctgtgggttcctctggggaccttataaaccccaggctgcttggccctctgtcattgaccccacagggtcagagggtcctgatcctttcctgccagcaggtcactggggacccagacaagtcactcccctcccagtgtcctcacttagaaagtagtggccttgccaagcgcagtggctcacacctgtaatcccagcactttgggaggccaaagcgggcrgatcacttgaagccaggagttcgagaccagcctggccaacatggtgaaaccccatcattacttaaaaactacaaaaattagctgggcatggtggctcacacctgtaatcccagctactcaggaggctgaggcacgagaatcacttgaacccgggaggtggaggttgcagtgagccgagatcacactgctgtactccaacctgggtgacagaacgagactctgcctttaaaaaaaaaaaaaaaaagaaagaaaagaaagtagtggcctaagctggtgtcatccaagcatcacacgtcacttttgctgtatgtcaaatctttgtttcgattttttttcaaaagattttaaaattagccttctcctaagcaataatatctatgatgtcataggcgtaatgtattagttattatttctgttgctaattagaacaaaaagagaacctttagcataagaaatgttcatctatgtgtcaatttaaaacaccttttgggaaaaggcaccctgctcccagccaggagtccaccaggtcatgtccaaggcccagctccatcatatcgtctctgaactaactgrcgccttaattatttaaataacggcgagggctcgcttccttagcccatgaccttagaagtcagtacaggcctttgtgtgtgtgtttgaaaagaaactagcccatcctaactcaaaatgggctcaaaagaacactatttcctgaagttccagaagcacactgactgactttaaccctttcattgtgctcatctttattaaagggtctctaattccttggtcagggtgagtgagggacgtttgaagcctctcaagcttggcttccatttccacctcttgcgggtgctgtgtgacataggtgagttatttaacatctctgagcttcattcctcatccataaggtgggggtgtaagtccgacttcctggcctgcttgcattgcttcagcgagagagtacatgatggagtccctgcccatcactgggactgtttgatgagccctcccatgtcccccaccctggtgccttcactgtgatcctacccttgaccgccaggtggtgcccttcccccactttaccagtgccacgggcaccatctccgcctgacgtagggccaccaccagccccagacttggggttagaagaggtgagatgtggccaggcgcaatggctcacacctgtaatctcagcactttgggaggctgaggcgggcagatcacgaggtcaggagttcgagaccagcctggccaacatagtgaaaccccgtctctactaaaaatacaaaaaattagccaggcaaaaggcaggagcctgtaattccagctactcaggaggctaaggcaagagaattgcttgaacctgggaggcagaggttgcagtgagccgagactgcgccattgcactccagcctgggagacaagagtgaaactccgtctgaaaaataaaaatataaaaaasgctagatgcacttcccactggggctccactagaggtaagggttgacccaggcgctgcctctccatctacccagtggtgccctgggactcaggtccatgggaagggaaggcaagtggaaccctttgttaactatacttggatcagctgcaaagtagtggtgtggggttttttgtttgtttttttgttttgttttgttttttgcttttttgttttgagacagggtctcgctctgtcgcctaggctggagtgcagtgttgtgatcttggctcactgcaacctccacctcccaggttcaagcaattcccatgcctcagccacccgagtagctgagactacaggcacgcaccaccacaccccgcaaatttttgtgtttttaatagagacagggtttcaccatgttggtcaggctggtctcgaactcctgaactcaagtgatccgcccgcctcggcctcccaaagtgctgggattacaggcgtgagccaccgtgcccagccaatgactgcaaggttttgaatgtgtaaaagtacagaaagctgctagcagaagagcctgtgtgacagccgtgctcactggtgggcgatggatgctgtaaccaacccgtgcgtgtctgctgtgtgccgggcaccgcatttgctcatgtaaccaccaccaccacctgagcacctgaggctcagagagttaagtgacctgccaaaggtcccacagcaagaaatagcatgaccagaggtggaaccaaggttagcagggcaagcttaggcccagacagctcccctggagagcttccccagcccagttccccatgggctgttcacagaacctgactgtggctgtgcctaggccaccaaacaaacagcagagcagggcgggagcaagaggagcatgactgctggcctgtgagcccccttccagtcctgtctgttcctcacaccttgtctgaatggctcacaagcccagtagccagttttatgaaaggacctgtagtttggggggcactaaatgggtcccctgagtgcaagtgagagccaaagcgagttgccctggttcacagccccaggcccatcggcatgcccagcttgcaccctcgcagcctcccagactcctgccctcacggagaccccgggacactctcctgtcccgcaggcccctgcgtgcacccctcaagccctcaatgtgcttgggctggagtccgcttgctcctcccctgaaggcctgggtgggagagtgcagcctgctctgtccccsacaggccgcagccgtatcggacactcagggagtcagacagcgcggaaggcgacgaggcrgagagtccagagcagcaagtgcggaagtccacaggccctgtcccagctccccctgaccgggctgccagcatcgaccttctggaagacgtcttcagcaacctggacatggaggccgcactgcagccactgggccaggccaagagcttagaggaccttcgtgcccccaaagacctgagggagcagccagggacctttgactatcaggtatggcatgggcaagggagggtatckgccgggggccggcactgtccgcacacgaggtgggatccccatgtgacagtggaagagactaagggagaaacagtgactttccaagaccctcagccaatgctcagggtcagtgtgactgtaaacacctcccagggtgccggggcccacaccaccctaacagtgacggtaggagaagatgctagagcccgatggaaacttgccccactctgtgtgtgcatcagacgggggggcgggtgctgccagccactctcctcgcacccccaggcagggctgcagcccctgctggaaccgggattgcgtccatccctgccagggctccttggcagagcctgtggatgcaagttcttggctctgcattatgaatgcaaatcagtgtgtaattcccactgtgacgtctaatccatcacatccccgctcggtgcctcagtttcctcacttgcaagtggggtcttctgactttgcatcactgggtcacaccgtggggttcacagagctccagtcattcatgagtgttccctgctgggaacgaggacctgggccaggagaaagggactggcacccgggccgtgtggcttgcaagtggcagagccaggactccaacttggcctcctccttcctccccagccaaggtgcctcctaccaggccctgagtctcactcgcgcccccgggcttacaggtgattgcgggtgcctgcgatctaaaaagtaaaaagggccagccggtagctggagtcactttcctaaaactccttggcaaccgccactggcataaagggacgagagctttgtcttgagttcccggagcacaggcttggagtcccagcacacgtgggtcctctgctggtaacctgggggagccctcagctgttccaagtccgaggagctgatcagccacacaactaggmccagcacacattcagcacacagaagtggtgtgggaatgggcacacatatgtcccaactcagcccgtggtcactgccgccctccttccctcccaacagaggctggatctgggcgggagtgagaggagccgcggggtgacagtggccttgaagcttacccacccgtacaacaagctctggagcctgggccaggacgacatggccatccccagcaagcccccagctgcctcccctgagaagccctcrgccctgctcggraactccctggccctgcctcgaaggccccagaaccgggacagcatcctgaaccccagtgacaaggaggaggtgcccacccctactctgggcagcatcaccatcccccggccccaaggcaggaagaccccagagctgggcatcgtgcctccaccgcccattccccgcccggccaagctccaggctgccggcgccgcacttggtgacgtctcagagcggctgcagacggatcgggacaggcgagctgccctgagtccagggctcctgcctggtgttgtcccccaaggccccactgaactgctccagccgctcagccctggccccggggctgcaggcacgagcagtgacgccctgctcgccctcctggacccgctcagcacagcctggtcaggcagcaccctcccgtcacgccccgccaccccgaatgtagccaccccattcaccccccaattcagcttcccccctgcagggacacccaccccattcccacagccaccactcaacccctttgtcccatccatgccagcagccccacccaccctgcccctggtctccacaccagccgggcctttcggggcccctccagcttccctggggccggcttttgcgtccggcctcctgctgtccagtgctggcttctgtgcccctcacaggtctcagcccaacctctccgccctctccatgcccaacctctttggccagatgcccatgggcacccacacgagccccctacagccgctgggtcccccagcagttgccccgtcgaggatccgaacgttgcccctggcccgctcaagtgccagggctgctgagaccaagcaggggctggccctgaggcctggagaccccccgcttctgcctcccaggccccctcaaggcctggagccaacactgcagccctctgctcctcaacaggccagagacccctttgaggatttgttacagaaaaccaagcaagacgtgagcccgagtccggccctggccccggccccagactcggtggagcagctcaggaagcagtgggagaccttcgagtgagccgggccctgagggtgggggatgcaccgaggcccgagggtccgtccaytgctgcggttccgaggctcccccgccactctctctctgcccaggttctgctggtgggaagggatgggacccctctctgctgccccctcctcccctccacactgcccatctctgatgtctggccctggggaatggcaccagttccagcctgggaatcaacccagttcctgagtgcccatcccaccccgcggttgcctctcctcggcacccttgattgggttttgcactaaagaggtcagctgggccaatgatattgctccagaccgagtcctacccaccttcccccggaagtgtcccaagaggctccgaaggcctcccctccgagcccagctctcctgtctcctccacagccaggccctgcacgcccacctcctcggacacaggtgacagggttaccctccagtttgagctcatctgcacgagacacaggtagcttggggttgaagttaggactcctcctgggctggaggatttacctggtggggcacttccagactgtttctagcaatatacacacacgttctttcctgtgtcttcaccccaaaacttcagttgattctgacctgggaggatctggggaccagggggtcttgggctgccttgtgatacacagccccagccaccctgcacgggggctgcgagcaccagcaactttgatttatagaaggaaaatggaaacccccatctgagtattttgggaggagcccccagccctcatccagctctggcacgctgatacctccaggtactcccctcactgtcaaagctggggctcagcctcttgtcatctggagctttgtgggcaaagctgagaagctgcaacccagatttcaacccaaaaaggtcaagctgaatgcctcagactgatgtggaaggcagctggccttcctgggttggaacgaggcagtggccctgagccccttctccagggccaggtagaaaggacaaacttggtctctgcctcggggaagcaggaggagggctagaagccagtccctccccacctgcccagagctccaggccagcacagaaattcctgaggccaacgtcaccaaagttagattgaatgtttattatctttctttttcctttttaccttattgatttgatgaatcttgaaatggattcatttccataaaccaagttaaagtatggcccgaccatttaagaaaacaaccatctgagacacgcaggaaattgtgagcatttcgacccgagctctcatttcctatttgtgaagggtcagacacagtctacccaggggtgtctgggggacaagggggtctctggagatgtcacccagggagccccctctatgtctgagaggctgccactgctgcacatgctcagtgaggcttggcggccatcctggcacatggctcttcctgggtcaaccgtgacctgtctggctcaggaatgggctctggctkctgggggagccgtgtcactcctgggccatgggggcacctcctgggcacttaggtgtttcagcatagattccagtttcgcaccctgggcagacccccaggccccatccgggatagggcagaggaggtgctggcggccccagggaaggagggtgtgtaccccaaggccccctggctgtgctgaggggctggggtgagcgctccatgttcacatgagcactgctgcctcttcacttgtgggactttttgcaaacccaaggatgaactttgtgtgcattcaataaaatcatcttggggaagaggctggcatccccgtgtccttgaagcttttgggtcggggaggccccacacgggcccggagccatcctcaccacctgctcctgtagaggcaggggccaggcgcagagcagttagggaaggagtcaactccccgcaccctcccaagccggtgcccactcagggctctaagccagctcatgctctgcccctcacagaccaggcacggggytgggctggcaacaggcctgctcagccctgcgggggccatggggcagactgcaggcctccaacgacgttgagggcacccaggagccaggaaagagttcaaggggacacctggcaagtcgcccccacaggtctctcattagcaagaacagagcctgggactctgcctctgttggacgctggtgtttgcggggaggcgggcgggggaatgcagaccaatcgaccaccccatagtgagcgtggaacatgcccagtcacaccacccaccccctccgactcgcccatcatctgaccatgcccccacttgcaggactgactgacaggctgaaaacgacaggcacgcgggccgggcgcggtggctcacacctgtcatcccacacctataatcccaacattttgggaggccggggcaggtggatcacgaggtcggtcaggagttcaagaccagcctggccaagatggtgaagccccgtctctactaaaagcaggcacctgtaatcccagctactccagaggctgaggcagggaattgcttgaacctgggaggcggaggttgcagtgagccgagatctcgccactgcactccagcctgggtgacagaactagactccatctcaaaaaaaaaaaaaaaaaaaaaaaaaaamaaaaacaggcmcccgaacccacaggagccaggaagaggacaggggacagccagctttcatctgcatgttaggttccacataaaatatcctaggagttacagctgacacaggttttccaaatctctaacttagtaaactgaccctggaaccagccgcctcctccccacgctcccaagggttgtagagaaagttcagggaaaggtggtcccacctcctacaggataaggaccaagcaagcccctgagcctggtgttcagggccctctctatcccagcgtctgctgacttcccagtcccatgtcccagtcccccacgttgtcaygtggctccccacattggactggacacccatgcctctgggacccgccaaaaccaaaaggaaaagctgactgtcgacccaaaagtgtaaacggatctactggcctgggaagcaggaaggatgaaagggcacatctccaggtccatgaagctggaaggaggccaggccctcaggcaggtgcccttcagggatgggaggtcacagtgtgatgggcatcgccggggaaggggctgggagcaagcagcagagtctcctctgagtcggcctctgcaggcccagccccgactcagaggcagcgccagtgttcactgagcccctgtactcagcagacaacccagagggcttccttcaagtcctctcgccgagtctgtgtagaggcagccagtcatcaggggaaggagtgagctcaccaggctgctaggaaggaccggagctggagaaccagaggtrgtcaggtgagctgggggggttcagggcaggagaagggttgctctgtcatcctcatcccagaaggacacccagacggtccttcccatcagacggcagttgaagacttccagattctttccccactgtcgtcctctctgatcctcacaacagccctgtgaggtaggcagtgggtgccttccccctttgacaaatgaccacagcagggtgggaagctccaggcagcccctcctctgctccctcgggctgctccggctgagggggcgggtgggtctgtggttccctcgcatgactggctctggcttctggcagacagacctgcctgaagggacatttgttctaggagccagaagcccactcagcctctgctagtggccttccctgacttcccagctgcctccacagcaggagcagcccccagaggcggggaaggaggtgcctgggcaaccccggcctggcctcctggagaacatgcagccttgggccgcccctgccctaggactgtaatggttgaccccatggcgcagccgccacctcctgggatcagctacacccatcacagtcatagacacacagtaaacacggcagacacgccctggagccatgtcaggacacactcacactagcatctgcagactaacacaggcccaggtacacactcacacacacactcctccagatacacacactcctgaacacactgtgaacccacgtgtgccctcccacgcacagccgtacacctgccaaggcggaaccccgagggtgggatggagaagtccgcagcctctctaggcctctgtttccctgagttgctcccctcgtcctccatccaggatggggcagaggcagaggcagaggctgccagccaaggggacacttccgtagcaatgtcccgagccctggaagcagcttccttgggtctccaggtagaaaccattcaggacctccaggtgctggtgccagcagccaggctggcctagatgagtctctcctccggtggcaccttgaggacactgtccatctccagccgggccccagccacctcctgctggcttgggctgtaggtgccctcagactggcggcgctttcgggctgccaggatccctgaaaggaggcccaggaggaggaggaggaggcaggcacaggctgcaggtacggccacctccagcagtgggaatggcagcggcaggggcaggcccttctgcaagagacacgacaccgaggcctaagaccgcagagaaggggaggacgccggggccctcagagagcagagagcgcagcacaaggacctactcagagaaaatcagagctgggagcaggctgccctgggagcagtgaagacccagccccaggggtgtgcaggcaagtgccaggaaaccacctgtcacagccactgctcggggaggcctatacaacaaaggagttctggctagaaggacagagatgggcgtttattgaacacccggcaggagctaagcagggtgcatgggtttcacagaagcctacgagggtctcatgaggcagagcaggagcaggggcaggctgagcggccccctgccacaatagcaaggtcagaatccactggggcccacctgcgggggcagggtggcaggggggccgaggggctgttatgacagcttgtccctgcgagcctcggcccaggcttcggggagcccagcaaacctccctggtgtctccagtcacaggctcccaggattccccatcaaagcctctacatgcctgggactctgtagtcccaggatgcgaggattccagaggcatgggctctgggactcaccagcctccctctgtacctccaggcttcccagcccactgtgacctgggtcctaaaacttgacaggaaagttcctctggtcctgagagggtcctgccagcctccaccgttggacattttgagggaggagctgtaaagccatttcctccccctgccctggggaggtggctgggtagggaagccagaggctgtaaaagttcaacttgaaaggaaacattccccgtaagcggaggggatttgtggtttatgacccaggctgccagaagcctgtggagatcaaggctgctccccagacttcccttccaagcctctcctcgccagcacccactccccccaccccgccccaggaaggggtgtggcggggaggttcacagctccagcgcctgctgccttcgtctgtccaggctcctcctgggctgagccacccggggttggggccagcctgcacagcgggccgagcctgctccagtgcggactcccaggccccctgcccctccgtgtcttcctactcaggacactggctcagaaacccctggagatgagtctcctggattcaccaacctaaatcccagaacaccaacatggccctgagtcctggttggattggcagagaccatctgtcctcactgccactgccctgggcactctgaggaagccsctgacccagctaggagctttgtgctcttgtcaatagacggtgacagcccccaaagctctccctgcagtggaaatacctcttgtgtggggggtgtggaagggacctgaggctcctctcactgccccaccccatgacagagtggcccaggaacagccccatggtgctgcgctctctccccagcagcatctcgccaagggcccagcaggccacgtccacggcccctcacccctgacaacactcaccgccacttcacagaactggccggagaatctggcattgcagatacattcagacacccctccagctgcccggcaggtgcccccattcaagcaggggttggcttcacaggggagagtggggacctgacacctggagagggaggggggctgagaaagcggcttcccccatggctgcctcttgtgctcccagctgctctgctgcccatccccacttcagcaagcatcagagcttatccatccactgtccccatgcgctgctcctgcccagctgggccctgccaggtgaccacctgagcagccgtcactgagaaggactctcatcccattagggtgacgggagcctgtgtgaaggcaggtgccccagacgctgacgccactgtctgcagggcccagaatctgcacttttatggtctcccacaggcgggctgaggctgggtttccagaactgccaccaggcaaccactgcccagcagcagtctgtatcacagaggatggtcttgcgagtcatggaaggaaactcaagtgacaatggtgactgtgataccagggaggggtgagaaggtgggcgaggacccccgccccaccctggctggaggaacagccctccacattcattggacctcctcacagttcccaggcccccagacccacctctggccagcaagaccctccaggcagctgcagttggcagcgggagagccaccctcacatgggctgccatcgaggcaggtgacattcaggctgcactccttggatgggacaggcaacctggggagagagcagaggctggagtgggtgcaggacacctgggacctgccctccccagcgctgtgaccgtgggccacctgagcttgtgttctcatgtatggaactcagggccttcctctattgggcatgggattgaggtccctgatgggagggaagggacacagggttgtcactcgctttccagagtctcagaggactcaggacaacaaagtgtaaggactctgaacaaaagcaggtcctaaacacaacgcctggacattccttgaggggagagggaggggtcaggccacagccagatccccttccacacgctgggctcccgggagagccactgccagatgaataagggaagcgccaaagcctgaccccctccctccaccccaaccagccaccaatagggatgaacctccgtgtaagcggcaggcggctcccagccccagaccacagcgctgtttatctgaaattccaggctaactggttgtgttttgatctgtattttatcaggaaatttatcaaattaaactgtcctcctcatgtcacagataaggacatgaggaccagggaagggaagcgactcatccacagacctggcagacttctctgccccaccatagccccagggggcattcgcagcccacccccctgcccagccatcccacctgcagcgcgggcccccgaagccaggcgggcagcggcactcgaagcggccgtcggggtgcgtgtgacagcggccacgggcgcagggggcggagtgacaggggtcgacgtgggcttcgcagcgcgggccttcccaccccgggccgcaggcgcaggcaaaggcgtcgaagaggtcacggcaggcaccgtcgtgcagacagggcgagggcgcacacacgggcgcgccgcggcagccgaggatcggggccggcgtcccaggccaags

SEQ ID NO: 5683 - DNA, 35126 bp, Homo sapiens
ccaaatctcatcttgaattataataatcaccatgtgtcaagggtggtgccaggtagagattattgaatcatgcgggcagtttcccctatcctattctggtaatagtgaataagtctcatgagatctgatggttttataaatgggagttccccgtacatggtctcttgcctgccaccatgtaagacgtcccttgctcttatgccatgattgtgaggcacccccagccatgtggagctgtgagtccattaaacctctttcctttataaattacccagtcttagatatgtctttatcagcagcaggagaacagactagcacagttatattttttaaacctgataaaatttactttaagacaaaaagcaccaccagagatagattggcaggcattcccggtgtgactcaacgtgtccaaattccctctttttctgaggacaccaccctaatggccaaattgcaacttaaccatcactttaaggaccttatctccaaatattattacattctgaggtaccagggattaaggcttccgattcatgaattttgtggggacacaatcaacctataattggtaattatagtaactcatggaaaatgctaatcttattagcttgaaaatcacagcagataagtaacagtcagtttttactattttatattatatgacaaaagtccccaagctccctgttgtttatagcacaaccttgtgtgtctgtggttccatggctctgttccatgtgtcttcttattctaggaacagatgagggaagagcttttagctgggattgccattcccacacaaaggggaaagagtggggaaaatgtggtgcatgattttaggagtttctgcttggaggtagcatacccatcactatcattactgcttacttggccaaagcaatcccgtggctcaacactaacacttaacaattggctattctgggcaggtgtggtggcccatgcctgtaatcccagaacattaggaagccgagactggaggattgctcgagcccgggagtttgagaccactctgggcaacatagtgagactccctccagcccaccccctgaccccatcccacccccacccatctttacaaaaaacttaaaagttagtcagacatggtaacacatgcctgtggtcccaactagtagagagggtgaggtgggagaactgcttgagcctgggcgatggaggctacagtgagctgtgatcacaccactgcactccggtctgggcgacagagcgagattctgtccccccaccctgcaaaaaaagccaaaaaaaattggctattccttcaacagggaagcactgcaagtcaatttcaacagctgtggctatagaatcccattacagagaagtaggaagcaattaactgacagcaataatataatcagccaccgcaaggtcatggatttacaggaatttgctattcatccacgttataaaagcaaagacaaaaaatgtgagtaacaaaatgtttgccatgcttgcaagagacaacaggagctattagcaaaatacatcgattaattttctactttaagattacttgttactagtgaaccagaaagcatgcaatagttgctgtctacgaagaggatttgcttgaaggtttatctaggactgattcaccaaaaagtatttaattataggttcagaaaacttaatgttttcagatacttagaaaatgtttgactgacaacaacacaaaatgagtaagatacaggataattaacagagccaacccttgctaaaacgatgaaagtgaactagccatccacctacccacctcctagccctaccccccaacttctcctcccatctctactcccagcctttattctctcctgacttcttctcaagtttagtgtcatttcctgccttctctaggcatgggcacagaccactccccaatctcttcttatcaaatgtgtcaggttgatttttgtttttgtttttgtttactttatattgaagtattggtacttgtgacccctcctagtctctgatcttccatactgccaaggtaacgactatcctaacttctaacaccatagatttgctttgcctgtttttgtatgtgttctttagtttctggtttctttcactcaacattagatttgtggtagtagattactcatccagctgatgtatagaagtccatcgtgtgaatataccacaatatatttacctattctacccttgatggacatttggatagattccagtttgacgctattatgaatggagtcactgtgaacattctagttcatgtctcttggggaacttaatttatagatttctttagattgaaacctaggactggaatggctgggtcggagggcatatggacatttagctataatcattttccaaagtggtgggaccatcctacagatgtttaataaggattcacattcattcataaaaacctgaatagtctgcacagtattttcaaaagaagcagatctagaacccagttctgattccaagcctagtgcattttccatccagtagattccaggttcttctatcctactttcttctcctcaatactatgctgccttttccctctaaagactcaagaatgaatagctagtcattcacggggcattctccccaaggtacttgttgccttaaagagggtcagtggtaactccaaagagctctaattgtgggactttcaggtttcataaaagatcaatctgtagaaaggaactagagaggagagagagggagataacttcagtcacaggaaagtacttaacagagtcaatcaaatccaagagggccattgatctgaatagagccatttgtgatgaaacacaatagaagataggaagctcatcttttatcatgtgaacctcagggcaaacatgctagaaagctattgaaccctggcctcctcaaattgatacacaggaacaaaagggaagcctcagatgtcaaattctcatgtctgcgcccaggcggccagaagcaggaaccggctcctggtttcttgagggtggcctgcatgtgagcccagggtgtgacaaaatgtagcagaaaagactgagaaggatgacgacgaaaatgaagctccagcctcctgactacccctctcaggtgtgcatctgtttccaattccgtattacaattaaagagaatgattttttattttttttaattttattattattttactttaagttttagggtacatgtgcacaatgtgcaggttagttacatatgtatacatgtgccatgctggtgtgctgcacccattaactcgtcatttagcattaggtatatctcctaaagctatccctcccccctccccccaccccacaacagtccccagagtgtgatgttccccttcctgtgtccatgtgatctcattgttcaattcccacctatgagtgagaatatgcggtgtttggttttttgttcttgcgatagtttactgagaatgatgatttccaatttcatccacgtccctacaaaggacatgaactcatcattttgtatggctgcatagtattccatggtgtatatgtgccacattttcttaatccagtctatcattgttggacatttgggctggttccaagtctttgctattgtgaatagtgctgccataaacttacgtgtgtatgtgtctttatagcagcatgatttatagtcctttgggtatatacccagtaaaatgggatggctgggtcaaatggtatttctagttctagatccctgaggaatcgccacactgacttccacaatggttgaactagtttacagtcccaccaacagtgtaaaagtgttcctatttctccacatcctctccagcacctgttgtttcctgagaatgatttttatatatttagatactttcagtgtctggatttgaatatagctgaagttaagggtactaattaattgtgaatcattccgatacttgaatataaaacctctcaagcctaatgtgcaaatttatgtaaaaacaatgtgaaattagaaatgcattggcacttttttttaagcagaactgtagcactctgtctagtcaaacagactgctcatttgcaagttgtctatatgcaaagcattctgcccctgggagcctaaaatctccttagaaagtcatctgaaatttgagaagagctttgttctgaacctgctttctgctcccttcacttttcttccctgcttccagcactgtgagcaaaaagcctaagtatggatcacacctggccaacccagaagcagccatggcccaaaacaggaggcctgccctgggaaacccatttgagttcaaaggagggtgtctaaatatgcttgtcttgagccctgtgcattgggccttgcactgcagccttccaactttaagagaaatttcagaatccaaatccttcccgcctgcagggctcaaattttcctttgcagatcagacctggtgaagaggctatttgccgttcaatcctaggctagctttctgcctttcacctaatgtttgaggttaagagaaatcagaaaagagagaccgtaaactgatcaccactgcatgggcatctgcctcacccacctttgggagttgggggaagagccagccacaggtgctcaggtgcaggtgcccaggtgtgagcggctaggtgcagatgctcaggtgtggcagcagggagtgcacttggctcatctgccctggggagggccagctcccracagaagtaggccagaggtcagtcccaggaaatgcttggagcagccagcagggtagggccaagtcatgatacacctaggagtgggaggggaggcctctttggatattacctggtttatcatttagctgttggggtggggaaggaggtgggaaagacagaaggctctcccaggaattggcaggcagccaggtcagggacaatggcagcccccacttgtgctagaaaggcaggcaggacgtgaccactcagatagccacatcaacaagtacaaatcacggttgccctggaaggaaatggctcaggtttttcccagtagctcaatgcctaggcacccccacctgtggtttgggcatttcactctattagctcttctgctcagtggcccattctgctagccacagctcacatttactccagttatgaaaaaggttaattttcccatattgagtttctctgcaaaagctgctttcagttgtgaccggtaagttccgttgtcaccaatatgggtacaactgttgtcactctgctattctgaagccatgatactaaaagtgtgaccccagatcagtgtcatcgccatcaactacaagcttgctagaaagaaaactctccctagacttccagaatcagaatttgcattttaacaaggcccccaggggaatcctgttcacactgagttttgagaagctctgttctaagatattactccaatccccagcaagccaaaccgaccactttcttcacataatcagaacgctcggttccagtatttccagataccagccataggaaaacacgttgttctctcatttccctttaaccttatctaaagcactcaatttcctcaacccttaagtcgtcatctgtaaaatgggagtgctaatcctacttaatttaagatgattaagttgaataataaattagaatttgtcctacaaattgtgaatcatgatcggaatattcaattttattattactctgtgtcctaactcaataactgggttataaactcctgaaaacaggacaatctcttctctacctctttctttatcttccctgtatactgaaatacagcgttctgcccagcatgaggtcgactatttgacatttacaaaaatctctcttggaatccccctgccaaaaaaaaaaaaatcgaatttcaatttatgactccaagcacaaagagatcctgtcactttgacctaattctctgaggttcatccctctaaataattgtattgtctccatctataaagtactctgttactatgacaacgcacacataattgcatgtgtaagtagttgagggtggctgtgcaagtcagactcctttccaccaggaaacacagaaaacattctatcttcccaaatgttactctctcagatttgcaccaagaccctagaagtttcttaaatttccatatactttatggacactacaaagcaattccaggaaacactgatacagtagcaaaactactgggagtggaaattggatggagatctgggtcccagttcagagtctgacacctgatttgcaacataattaggcacagggcactcaactattcagggccctaaacccttctattgaaagggaaatgggagaacaatatgtgttcctatggctcagtccctataagattctgtactattcagagttgattttaagtgtcacttaactgaaattatccaacaaaccttcatggcatgaaacattaacacagctctttttatatggcatggttcctatggctcaatccctataagattctgtactattcagagttgattttaaaagtcacttaactgaaattatccaacaaaccctcgaggacattaaacattaacgtggctctttttatatggcatggttcattatcatgccaataaatgattaatcgtaactctctgtcttgaccaataattttgctggacttttgtgattcacaacgtgytctgtgttgtaatgctacctcttgaaactgacatcctagctttattgttttttattacttccctaaggtggctttcaaaagagacaccaagtgacatatttttaggaggggtttaaaagtttgatggggtagaagtaaacgttgcttaactcaaccagcagcagagccagggcccagggaccagcgcttctgtggacttggcctttcsagcagcagacccagcaatgaatgatccgaacagctgtgtggacaatgcaacagtttgctctggtgcatcctgtgtggtacctgagagcaatttcaataacatcctaagtgtggtcctaagtacggtgctgaccatcctgttggcyttggtgatgttctccatgggatgcaacgtggaaatcaagaaatttctagggcacataaagcggccgtggggcatttgtgttggcttcctctgtcagtttggaatcatgcccctcacaggattcatcctgtcggtggcctttgacatcctcccgctccaggccrtagtggtgctcattataggatgctgccctggaggaactgcctccaatatcttggcctattgggtcgatggcgacatggacctgaggtaagattatcyatacctctaactactgcaatcaccttggagtaatccttccagaagcctatggcattctgaatgtccaactgatttgccacgcatctaaagtatgacyaaggaatcaaacaggagagaataaatgcattcccgtgccttctagcacagctgcttagctattggaattgggggatttatattttgtgtttgtgtttttaaatctaactcagttaacagggagttgcataattgctgttgatctctaggaaaagattcaaagcttttttaaaaaagtaatcttttccaaaccacaagctgcagctgaggaggtttatcctgttggtagcaggaaaaaaaaagcaaaatacactttytttgtaatgatgaggagctctgggtgcaatcataaaataaaactgtttgtcaaacattagaacctgtagtgagacagtggtcaactccatcaaatatagccagttctttgggcaaacattttcctggtataaaacctaaggaagaatttgtaaatttgcttcacctctactggcattaaaagtgggggaaaaagcctatagcagcttttttaaaattatgcttaccttactacaaaataaacagaaaacgttttctccacttcctacagagtaatctaaattgcaatgtttgcccatttcatcccgtgccagtctgaactagcactggaaaaaaaaactaatagaaataagatgaagcattaatgtgactagattgagaaatttaatgctaaaagttgaatagacaaatgtctttttccttagctcacaattcctcatttcccttgaaaggtatgcatttccttctgcaaaccatccaggtgctaatgcaacgtgtgcttattaaatactgtacagtaggcaattagctctgttcatccccagctactattggcagaggagagaagcacaaagtgtagaattgtaaacactggattgatagagtacccagtgatcaattaggaacctgctgtctcatttcaactggtgctggtttctccagaagctttagaaaagtcatacaaaccctataccttcatatggyttagtctttcacataagaaaacacatgatatccaccttgcaattgctttttttttttaaggaaagccctataaaacaacataggatggcaagtgctattcaggtttagttaatctgtgaaccacgatatagcaataaggtctttttagacctcaatttagtttgacctggacacaggtacacagaagtgagaattctaaatgccagcacctgttacactgagaaaagtgaactacttggaacattgggccttgacccccaataaacagctttctcataatatttgtaacttttagtgcagaggagttttgtacctcaatgtaataccacatatggaacccttttataagacagaaaaaaaacgtgtgtggtactggactattaggttgttgaaatgaattctcttctgtgagctaaaaacagtaagatctaacctaaaagctccaagttacatttttctgtggttttaaggaaatcttatttctcttgaaacaggagatgattatgtaatcctgtccacctagcataacaattcctataaattattttttttaataagaactaaaagtagaatatgaagctttggtagaaacctccagctaaatccgtgcaaatgaatccttccagcaagtcaaaataagccctgtaacgcaacatggagcaacctcacctatccagagctcaacaagacccaataaaagacactgcacacccaaaataaatttcacttaatctcataaatgctcctcatgcgggaccgacttaactatttttattttaaagttctgttgtgctatttcccagaaataagaagcggggaaggaagcagagtgttaggaagggcaaaagagaagatcaaatgcctgcaaagcaaagcagacactgacaacacacagccatctctctatcatttatcctctatcacttattctctctatcacatattctctcttaattatcaattattctctctggtttctgtagcacttattccagtctctggtctctgtatcacttactcttctacaaacacaagaagatgtcacggtattttagaacaaccgataatcatgtttatcatgatcggtcttaatcattgagaagaggttaaattatactgctatgtaagatgatgacattatgcattgtgtgttaggaaaacaatattccaatatttctttaatacaaattaattaaaagggtaaaacctgagctattgcgtaacagttttccaaaactttttattcttctggattaagaactggataactaaagtctcctgataatttacttagatacaatcctatctaacatttatatttccagttgtgtacacttagaattttaccttctccatctccacttgaactccagcaatggcatgaagacatgactgtttatgttaacaggcagctacactaattgagctaatgccacacaatgccagcaaaaccattccacctggttttaactctcttggttatggttcttgggagaagaaaccaaaacatttctctctcactctgtcatctcttatgaacctggaaagccaccgcattttgcaatctctagtgactttgaaaaacaaaaaaaaaatagacaatagtccttgatcattggaatccagcaagtactatttcagctccttctctgaccactcccagcctggagtttgtgaatctgattggtgcacatatattttcacctaagttgcagctgtgccatggacatcacatgcacaaaaagcatcagggagaagagatggtgacttttcaggtgaatctgcttgtggccaaaacccatagttgagaggacacagaaacatcctatctcctttktgtctgctctctccccagacacaggcaaatatccggtgtcttcatccttcttaatggcctcagcgacaccatgcaaggacttctcatttcctttctttggcttcctctttggggaatccattcttatgcatccttctcccagttgcccccagttccttccctgccacctactttctacattcctttttattattttacagactttcctaccacatcctttgttctttgggcaaatgctgttagatttttcagcttccagtgcagcattcattgatattttagatattcaagaaatctcaccctgtagcttaccacaaattcacagcaatcaatccttcctatgtcaaccccataaatgtccttctcttctctactctgggagacctaacccaaaaccattcggctttttcctttattctccctaaaagtaaccaaacattgtttctctccagtagcactgattttactagctaatatttattaaacactagtatatgccatgcacagtgctaagtactcaaaataagttggtatatttcatcctcccaagaatcctctaaagttagtactattattttctgcatttggcagataatgaagttaagattcataaccttgaccaaggtcattgagtcaatgtatgcctgagtcagaattggaatcacccaggtctacccactaccactttgcaggctcataagctttctctacactgcttctatcacttttcacttctccagtttctagcactgcctatatacgctacgttagagccttcaaacttggtattttacttctaatatgattacaatcttttacattgcttaacactgatttcactgaattcctcaacattcactaaatttacatttattctttcttttatttccatacacacaaaagaaaatctccctggcagttaatagagctgaagtcaaaattaagaccaagattttttttttatttttcttatactttactcttttctgtcagtctaatataaattcaaggcagtgtatgtattttttatatacatgccttttatagaacttcagattttttcgtgtaagataatattttcttttgctaatttaggctyctatattatttcttaaaattcgttatctgtgaattgttttaaatctcattttgagtggtttgattttgttcttacattcattcaaatagcatcaacttccagctacctattcgtctgttcatctgcaaggtctcttcgtcagtgctgctcacaagtctaaacctttccttctccaaaccctcttttgtccctcatcacgatccttaagaaactgctctcaccaaactcaaaattatgatacaacgtcatagattgtcttagcaatattcagaattaaaggttttgcaaggatctttgaaaaaaaaacaaagacagaaaaagacttccttcttaaacattttctcacattttaaaacaaaaattctcagacttctcttcactggaacccagttaataaatcctcctcacttccccaccagattcccaccacactctagaaaaaaatattggatgcacagaaaaaaaaagtgattttattatagggacaactttaaatccattctaatatattttttaaaataaaataaaaaaaaagagaacactgaaagaagagaggaaggaacagagaaaaaaattaccttcaaactccagtactttcattataagtaggacaaagtactattaataacaaattaacttgtttgtctggtgtacaattctgccttagcatctatttcatgcctaaatttacctataaccagaatagattgaactgcttaaagttttaaatacatccacattatttgttactgttgtaatattttagctctactaaaacaagtatttttatctaaattatttaagcctattttaaatgaggtcattctggttaaaaataaatatattattagagaagttaagctctctgatgaactttgtcccaccctgtattttgccaaactgtgcaaatttaactgtgccttgaaacaaaatttctcattgttagctcctttcttagtatagtgtgttgttgttgttgttgttttggggggcaggtaatataaatatttaacattttctttcaagtacacccataatacccttaagaaattactactcttgacaacctcaatgacgacctgttgagagaagggcctttcagagaaatttctcatttctctaagtttccygattctatttggtggaacacaagatacaaaaacatggtaacataaatgatcacagcagagagatgcagggtgcggtggctcccgcctgtaatcccagcactttggaaggcctaggcgagcggatcacctgagcccaggagtttgagaccagcctggacaacatggtgaaacyccatctctacaaaaaatttaaaaattagcctggcatggtggctcatgcctgtattcccagctactcgggaggctgaggtgcaaagatcacttgagcccaggcttcagtgagccaagttggtgaccctgtactctggcctgggtgacagagagagaccctatttaaaaaaaaaaaaaaaaaaaaatggtagtagcaaccagctcttaatagagtgctttgcattggtctaagtgccggacaccattggctcattctatccttacagccattttagataaggaaactggtaaagagaagtcaactaaattactcaaattaacacactaagtggcaccgcctgctttcagcccagacagtgtgtggctttagagctcaggctttaaaggcagagaatgtacgctgtgtacagatcccttygaagaggacccggaagactcactccccaaaaatctttctttgacccactgtcctagtactagagatagcatcatttggcattaatgtctccatgtagatagcctactcagccagaccctcttattaaaatgcaaacactctgagcagggatgataccagacactagttcttctgaacacacatttgccarattgccaataacttactcagtgctaagaatttatgtctaccctgccgcttgcatgctttcttttgatttttaagtcagcttccgcttcttgtcccaagctagggtcacttgggcagtaatttttctgctttatggcaacacagcgaggcctcctccctcggacatgcattctattccaggggcccagggaggcccattccatctcagcatggtcagacacatgcagccttggtggtgtcagctgctttaaatgtgtttgctgttctttgattgaatgtttgaaggatggcacacccagcgaaccttatacattatttaatgatgactttaacccatcgtttaatactgtttctgacccttaagaataaaaggggagggaaggacggcacaaggcaaagtggaaagacaccaaatatggcccattttgctcaaggccaggccctgaatacactcaggcacataggcacatgtatattactgttcatcacaccagacgatgctacaggttgagacagattcttgcaggactttcttatcatgaatcgaaaataaaaattttctcccattcgggaggttgtttgtctactctgctkatagtttcctttgctgtgcagaagctctttagtttaattagattccaagaaaacaatgaacaaacccattaaaaagtgggcaaatgacatgaacggatgcttctcaaaagaagtcacacatgcagccaacaatcatatgaaaaaaagttcaacatcactgatcattagagaaatgcaaatcaaaaccacaatgaaatgccatatcacatcagtcagaatggctattattaaaaaggcaaaaattaacagatgctggcgaggttacagagaaaaaggaatacttatcttctgttggtgggagtgtaaattagttcatccattgcggaaagcagtgtggcaattcctcaaagacctaaaaacagaaatacactcaacccatcaatcccattactgggtatatacccaaaagaatacaaatcgttctattataaagacacatgcacacatatgtccaccgcagcactatttacaatggcatacatatggaatcaacctaattgcccatcaatgatagactggataaagaaaatgtggtacatacacaccatggaatactatgcagccataaaaatggactagatcaagtcttttgcaggaacatggatggagctggaggccattatccttagcaaagtaacacaaggacagaaaaccaaatactgcatgttctcacttataagtgggagctaaatgatgagaacgcatggacacatagaggggaacacagacactggggcctattagagggtggagggtgggaggaaagagaggatcaggaaacataactaatgggtactaggcttaatacctaggcaatgaaataatctgtacaacaaacccccatgacacaagttgacctatataacaaacatgcacrtatacccctaaacttaaaataaaagttaaattaaaaaataaaaataaaacagcatcttccctagaacaccacaggtggatgtatcaatctgcccattgcctttcagcgtcagcatgaccacatgctccacactgcttgccctcggaatgatgccrctgtgcctccttatctataccaaaatgtgggtcgactctgggagcatcrtaattccctatgataacataggtaagtcatccatctgtaagactgttgactgttaccctcaaaytctctgcttaccccctgctaggctctcagaccaggctcacacctgaccgttattgccctagtaggagtttttgcctgatttcattataaagtcacccctgcgtttggagagtgatggcagaatgtaaattccaaaccttgaccttatgggagaacctgtcttttcttcaatttgaatcaccagggaaaggagccccctccccagccctcagtctggactgaggaggcttaagctttggggacatgggagcttgcacctattccttaacccagagtgtcactagttaatggtcataggattttgcatccagacacttgaattgaagaaaytttttttttttttgagatggagtctcactctgccacccagcctggagtgcaggggcgtgatctcggctcactgcaaatttcaccccctgggttcaagcaattctcctgcctcagcctccctagtagctggaattacaagcatgcactaccacgcctggctaatttttgtatttttaatagggacggggtttctccatgttggtcaggctggtctcaaactcctgacctcaagtgatctgccggcctcagcctcccaaagtgggataacatgcatgagccaccacgcccagcctgaagaaattttttaaaatcacataatggtttcaaaatagagcactgagtaagcaatccagagtgttacaacagaaaactgctagacgaaacacactgtttctaacactcgactgtgagccacaycttgacccaaaagttgatttaatggcaaagtcatgctccaggagtcaaatttactagtaatgactctgtctcatttcaccctcatcccaaaaaccttattttctgtttctggggaaacaaattatagtgggagattaagttattgttgtaacttagggatgagggtcaaaggaagaacaagagagttcctggtataccaggaataggcatttcccacagaactatcacgaacaaaagacaagatgtgggcaaaatagtaaatcagtaacaatcaccaggtacactatatgccccaaatacctgggtttttttccccactgaccttggaaaaaaatcccaatgagctgcctcagaaaggtgtgggtttcccattgaagaaagcatccaagcaaaggctaaatgataagccacctggatgcttgtaaaagggactcctattgggataggaagctgggctgaaatgccttccatttctgagaaagactgcttctgtgatttagggtgattgagggaatatacaactgaattagaataaactttgtgaatactaattggggatgatctgtattacaatgtttgtagcctcttctctctctcctactcttaccattaccattagaccaaaaaaaaaattgtcctccttgacatgccctattcagtatgggyttttgatatacaagattcttcagactccaggagagaaccttaatatcatatataacctcctgacaagagactttagggtgaccctccactaccacctgcttttgccttcatgctgcttgactctctggctgctctgtcagcggacgccttccatagagctaaaaaccatagtttaygtgagtggtgaccattatatccctctcaaagaacctgtctgctgagtgaggaattttgattccacaatactcactgtaataatttaataatttaagccataaaatattctccttttgatatacattcccttctgagaaatgactcatggaaatactgaataattctaactgcagtgtgaatgacttataccatattctgtgatgtgaataaattttgaaataaggagaaaatgaaaaatcaattagcacttcaatggaggaaaaggtcatcataagaggtcaagagtgaaaagaaaagaaaaataggaaaagagaaaagaaaacggaaaaagagagaagtttgaaaaacaaagatattgttatatgtaaaatatttattcagaaacagaatacttgttcctcagtaccacaaggaaaaatgagcattcagacaaaaagttttctcagcaaggcaattttactttctgcagaaagagtgctcctcacagatggcacaatggtgacagcacacctgaacaatggagggaagtaattcrtatcccttatgcagcttgtccctgctactgtgtcctgtctccattggctggagccagacatcacaatctaagctaaaacctgactggctaataatttaaaacttttctaaataggtatrggcaatagacaacaaaggaaaagaggacrttgcttgtgaaaggacttagaaaagtaataatatttccaaataaggaaggggcataggctgcaagctggaatgtacctgtgagcatgttcagcataaatrtcttggttaaagtacaaggacatagaatgtacttattcctttatatctaacmgctacatagaatagggcttaacaaagagttactagcacaaagtaagggggcttgaagraagttagtctttaaaagaaatkattatttctaatgtttattattattattattttcctttaacaasaagggacactttgaagaggaaactttttactttctacagatattaaccctgctcaccatgtttgcccaggcctccaagctcacctttttgctgttggtttttctagttctttaacatagaaaataaatgaactgactgcttcacaagatgttatcactgctttctaaattgtggctcagggtgattatttgcccaaggtcaccaggaagctggaatagcccacagtctattctctacacagctctatgggcagacgtgtttggtacaacttcatgctccagtgattcagtaaacacctgtgagccccctcagatgctgacatctggatcgagaggaggcagaccatgcagctggtaccactaaaataaaaccactgctgcaaattgttgtacttactcctctctaccccacatttttaagtgtcttgtgccaagaagtttatagccatttcatcatttaattctcacaacagcactgtaaggcagacataactccacccattttacaaatgaggaaacaaaagctcagaggggttcaatgatttgcacagttcccacagtttgggaatacagaaaggttcagttccaaatctatctggctcccagtcccaccacatgaatccattcaccaccactctctttcattctcattcttctttctacctttctttcctctgatatctactgtgtaaacttgattaaagaccaagttatggattcaatgtgtaaccatgagtggwtgctttttcatctacatagacaggcactttacagagagaacatgggcatatraggcatacgtaaaacaaacagagcatggggaaagaaaagagcaagatcaccagcccactggagaycaaagttacaacatccacctctacaagcagaagccacacactgtgggtgtaaagaaaracagagtccctttcccagtcaaccccaggtccctgaaaaacttcatctggcctcatctggtcaggaaagaaaagcaattctgccatggatttcrgcaggtggtgctgcttatgtgttawcccgttggcttgggctgcctcaaaaagatgaatactcttagcaggaggggccaaacagattcagcacattaaaatataggaccaaaacctaaccacactaacattccaagcacaggacttgcagctagatttaagctaccacatcacaaacaagtcatatatccagatggttttaagacctacaaacttcaaaaacttaggcaatggtctaaagacccaggagagggagtttccttcttgtattcatctgttctctcattgctataaagaattacctgagactggataatttataaagaaaagaagtttagttggctcacagttccacagactgtacaggaagcatggcagggraggcctcaggaaacktacaatcatggcagaaggggaaggggaagcaggcagcttctacatggctggagcagaggaagagagcaaagaaggaggtgtgcacacttatagacaaccagatcacatgagaactcactatcacaagaacaacaagggggaagtctgccccccacaattcaatcacctcccaccaggcccctcctccaacagacccgtcctttagttgtaatcctccaactggggattataattcaacatgagatatgggtggggacagagagccaaaccatatcactcccaaaacagcaggatgcaaggatacccaaggggggtttttctggggcatctcagcagtacrtgtgtcaacgccactctttcacatctttttttccattattccctccttactccccctcatttatctttttttttcctactcttagtacccttagtcattatttaattctgctaagtaatttctgggcaaaagtcatcactgacccttatattgccaggagggctagaagactacaaggaaattatgttttcatcattattgcattcactttaaattaatatctatagccttggattccagaatctgttttctagtcctagttcaatctacctagttaatcaatactaagcaacatccactctcagaatttcaccgttcaatatcactttcttatactgctttaaaaggatgtttgaaaaagaaacaacctatgaaaagttagaagttgttggtgctaaattatatgaaatcagctattggamaaatgagtgttaaataacatggagaaacaaaccacatgtcgcaaaaacagcagtaaatttaacatggtgaaattgaagtatgactcttttatctggccaggtgagcatgttactgcaaagaactataattacatgagagttcgtcaaatatattatctcatggaaaatttaaagcacgctttctcaacttttgttctcacctctctgctgtaaatttgaatagctaaagctagttttaaccaaaagtcagatgtcagaatacctggtgatcttgagctaattttggacattttctttcattttaaaatattttaaaattattttttatttctactaccatgaactagcagacaaatgtaaaatgtcatctttgtatgccatacacacacacacacacacacacacacacacacacacaccttggtgagctatttttcctagagatataaagatccaaagactaaagaagccaagattctgacaaattaaaactaaygtatgctggcaaaataagaaactctaaaaaattaatgcagaatttagtgaaagaatttacagcattgatattatcaattatctaccaataatattaaattatttactggagtgggtgaagaagttgagtgagtgtgtgtgtgcatgtgtgtgtgtgtaattctgtattctgttttgtgtattcaagaaggaagactgaaataccacctaatctttcttcaggctgcttgttcttctgtttttctctttcctgtgtcacctgttctgctgatcacattgcccttctgtcatctttaggtacatctytggttkctctcgttgttcctgtttccattggaatgtttgttaatcacaaatggccccaaaaagcaaagatcatacttaaagtaagtatcccagttcacaccattaaatattccactgtgacaatcaaaaccatagggttttccatccatgaaatggtttcattctcattatatgattactgttgagtgggggcctgaagtcattagccatgcagtcttctcytttagaatgtccttctttatatgtgtgtagagagagagaggtgggatctcactatgttgctaatgctgttcttgaactcctgtgctcaagtgatccttccaaagtgctgggattacaggtatgagacactgcgcccagcctagcatgcccttctttattgcagtcacaggaaaaatttctacccattctttaagacactccactgaactatcacctcttggktttactctattctgtcctcagggcatattactgttatctctgttatgtgagtttgtgttatacaatatatctaaatggctttcttagaaaatagaacatatctttcttatgtctgtatscayatggccatttcattgcctggcaatcccattcactaactatattctagctagatgatctggatatgtatgtagataatatagatagattctgctgctcggggcaaagtaagtccattgtattccttgcttctcttgacaaaaaatgtttataatctccaaattttgttttaaatgtgaaaaggagaaaaaaataacaacagtggttttcatttgcttataccttttttaaagttgtatagagttctatacccattttctcattatcgtaacaatcataaagggaagctggggcgacattttatccccaattacaaataaagaaactacagttcagaaagttcctgatttactgaaggaaacagaataggagtagttgaatcyggaagccaaatcttccaggctgtcatygaaatgggttgtctttttgttctgacaaggataattttcaagtcagaaaatcttcagactaattgcaaatggttgctacatgtcctattgtgttcttaaagcttaaagcatgggacaagcgtcagtatttccagtgggctgattgcagcctcctggcttggagtacatagaaagacaactttatcatcacttcccccagggacaaggagactgctgaggttttgtctctgacaaacatacttggatttgctttgactcatgattgctgggttcacttattcctttttttttcagattgggtccatcgcgggcgccatcctcattgtgctcatagctgtggttggaggaatattgtaccaaagcgcctggatcattgctcccaaactgtggattataggaacaatatttcctgtggcgggttactccctggggtttcttctggctagaattgctggtctaccctggtacaggtatggcatttagtaaatcacattgggaattttaatctgtaatatctgttgtattcctttgctagaggtgccataagacagaaccacaaactgagtggcttaaacaacagacacttattgtctcayggtttcagagactagaagtgaaaatgaaggtgtcactgaattgattctttctaagggctatgatggagggatcccttactggccttcctcgtggcttgcagacatccatcttcttcctgtgtctttcctcagtgcacctctctgtggcctggctccccttttgataaggacaccagtcattggataagggcctcctctaatgaactcatcttaactaattatatctgcaatgaccctgttcccacataatgtcacatcctgaggtgcggagtgttaggacttcaacatatgaatttgggggaaagggagacataatcaayccataacagctgcaaacactgaagacaggatcaaaatccttagcccttcatcaatcacattcatcctatttctgaatatgtcattctaaataggcccattcattcygaagtcatgcaagtccccagaaagaaaatactgactgcctcttttttgctcaaagtcttctggaccattcggcttacaaggcagatggggctcttccattgctaagtattcttattctctgagtggaatgacattaatgaaagcagttgggctgccttggaatagacaagcgttcctccagctggcagcagggtgagctcatcctccaaaggcgccgaatattaaaatgggtttcacacttctggatttggtaccgggcaaaaacaattctttttgactaatccatcgaatccacaggcagagagaacacaggtgtagggacagatgcatgtatgaagttgggaaagagaggagtgggtatgggcagcaagaagagcgcagtgtttgagtcaggcagacctgggcttgccttccaatccgaccacacactgcccgggggacctcaggcccagcattcactctttctctgagttttatcatctgtagaatggggacaataatttctaccttatagactttctgtcaagatttaaacacaacaattttttatttttatgagacagggtctcattctgtcgcccaggctggagtccagtggcacaatcatagctcactgaagccttggctcaagtgatcctcctgccttagcctcccgaggagctgggactacaagcccacaccaccttgcctggctaatttttttgttttgttttgttgttttagaaacagggtctcattatgtggcccagtctggtcttgaactcctggacacctgggctcaagaaatcctcccacttcagcctcccaaagtgctgagattactggtgtgagccacctgtttagcccagcctaaacaaaacaaattaaacaataaaacagcgacaacaaataccatatcttgagcattttctgagctgctgccctgtgctctacactgttaccaaaatcataattgaaaagggtgaaatgaaccctcttggccacttacctaacactgtggtaaatgagccaactcttcatatgcacatattaaatatatttatttatattatatacaataggtgagatgatgtataatatacattaataagtattacacttattccatagaaagttatatattgaataagcctatcttaaatacatgcattaaaagcagagacataatgcatatatatgtacttattattatatctgcttttcatgtttcacaataacaaaactactaaaacatgtgctctcttaacatcttctttaggtgccgaacggttgcttttgaaacggggatgcagaacacgcagctatgttccaccatcgttcagctctccttcactcctgaggagctcaatgtcgtattcaccttcycgctcatctacagcattttccagctcgcctttgccgcaatattcttaggatgtaaggaatcatgccaatcccatttcatgataatctttgaaaaatcctggagttgctaaaacaacatttttttaaaactccccgttcctggtggtgaattgtacaaatatatgagaggaaaaagccaccgtcatattatcatgactttccaattgctgatgaaaagatggtagttttaccaaaagattctagcaaagattatttttgagtgaaaagtaatggaggccgattctctccaatgactttcttttcctcagtaataaggaaggcagaggaacctgttgggaccattttattgtgcgccttctggcattcgcccaggaactcaggatttggtgatctttttcaaaacattgtcttgatatgctttataaatataggatatttatcagaaaactggtatacaaagaaaatttaccaggctaacttacaaggaagatgtgtgtgtgcatatgtgtatatgcatgtatatatatattttaaatacccatataattgaagtggttgaagcaaaaatgttccttatgtaaagtactaggtgtagtttaagtaattcttacttctcctgtcctgtggcatgaagctcccagcgtttcccatcaggccccaccgcccactggccttcacctagttgaaaattctttctacattttcctttccaagggctgataatatttaacctctatttttacattctattttttttaataaaaaagctagtttttaaagcctcatgacattgtaatgaggaatataaagtgaaggcacgcaasaaaactaatgtaaatgttaggtcacaaaatgtccagagatatagtttggttttgtttggttttgcttttctctctctctctcttttctttttttcttttcttttctttttttttcttttttttttgagacagcccctcactctgtcgtccaggcaggattgcagtggtgtgatctctgctcactgcaagctctgcctcctgggttcacgccattctcccacctcagcctcccaagtagctgggactacaggtgcccgccaccaygacaggctaattttgtttttgtatttttagtagagacggggttccgaggcgggcagatcatgaggtcaggagatcgagaccatcctggctaacacggtgaaaccccatctctactaaaaatatggttttgctttacttttctgcttagcttcatcagctcttcaacttgccctgtgatgctgatctcctctgcactactgtcttgaatgtcattctcaaagcagaggcttcctttccagaacagaatactctgaatccactgaaaacattccatggatttatcactgctccaggaagcaggagtccaggcctaattaccttgttttctgtataataacgttgtttgatctgcccaatttggcacacagtgggatttttccaaataattacttaatgatgtctactagataagccagagaaagtggactggttgatagaacaattaagtaatgcactagttgaacactaaccccaaagaggttgattaataaaaaattaagttgaaggaatgaggaaaagggagcactcaactcggtcttgaaatttcccagttacatcagtatgtataaaaataagggaggaatctttgttaagtgtatacaatacctggaaacatattttggtggtaaggctaggattctaaatttttttttggaaaaaggagaggaggggaagaaagaaaaagggaaaaaaggaaggatgggggagggagagagggagggagggagggaggaaggcagggagagaagggagggaaagaaaaagggataaacaagaggtatagtttggttaaatgaaatcattggcataagtttaagctgagggactctcagctcaaaacagtttataataagtggcggatcttcaaattgaccacaagctcaattaaattcaatagtgtggttcagtggctttgaaaataatatatgactagaagttcagggaccaatctaaaggaaatattgatcttgagttaataagatctttgaagcaagtcattatctctctcagctgtgtatcataatgaacgttaacatttattgagcatttactattcttcacagaccatgttaggcatttaattttatctcatttaatgttcacaattgccctatgaggtagctaatattattatggccattttatatgtgaggtattagaattcgaggggtcctataaggagtattttctgtcctcctcttgcctttgtgaccaattgagaagtagaagaaaaatcagatattcagataacagaatagcactttaactatggataaaacttaattggaaaacatgacttgaatctgcaaccaaatgggcttgttgaaaccaccctttcctccactgcctcacacatgtgcagacatgtactcacacatgcatagacaytgcaggtcttgcctcgcagggcagagcctaccctgatgagctgacattaaaaataagctgagaaatgcttgctatcagagaccagcagctccacagaaaagaggaatkctgatcacccatcagccgagtctcttctctccgggggaaagattgaatgaaggcagggagggaatgggaacgttgttctagttcaagtccttctacagaggaccatcaaacccatgtcctggaggttgcactgcaccatgtgtatatttattaagaactagcacattaactgggatatggcggtacagaataaatcctccctattgttcttatcattgttgagtaccacgtgcagggctgaatgcctgaagaagcttgtggctgccctgagcaaatgtctcctaaagatttatgctaggtcttcctgaagtgcagtcatccctctcgccatgaktagccatagaactaagaatggtgatttctttctctaagcagcctccagtctacagaaaatgtgatctgccatgtgaatcataggttataatctctatgcaaagtaattttgcagtttattattataaaatttacttaactrtctgtgtattgttttctagtttatgtggcatacaagaaatgtcatggaaaaaacaaggcagaaattccagagagcaaagaaaatggaacggagccagagtcatcgttttataaggcaaatggaggatttcaacctgacgaaaagtagacatcaagtggacaaaacagacgagttccaaattacgttcttaaaccgtaactatatttaattatttgttttggtaggacagttggcagaaaagagttaaagtgaaaattggaatttcaytggaattcatgtattggtttcagtaccaagtgactggtggcccaattctttaatgggacaaatattgtttcctatatatatgtrtatgttttatatatgtatgtatactcatatagatatattgtcattgaaatattcccccaaaatattctcagactaaacctgacatagggaacaccgagaatgaaaacatckttaacaccaaaactgaattcttatgcagaatttcctagcccatagatgacaacctgastttctgtatgttaaagtagatgtaatgaattattattattacagtggtcacgattttcttcagtgtttatgattataaaaattgacatgaacatctttcactgacattttaatcattattttaaaagctttgcaacctatatatttatataactttgtaatataacatgggcaaatatctgacttctgtatttttaaaaagttgccttctccagtggcagtccaaaagcagaaatgagaggaaattattacaaaatagaattcaataaccatattggatgcaggctcttaactcagcagggatatcgtacatctattgctctacctcaggggtccagtgatacccactagatcttccaaggaaaaacataattctttcaaayggtgtgtatttggcaaagagctcttcaaatctgggagagggacttcctcaaggttttcctgtgtgcagtggatccacatagctaatatgacagctagtcagttgacagggaccacccacagtaagcaccatggtcagggaggtggcaggaggtgcaaagacagaagtattgagagaaacaccaagactctagtggaggaattaattcaatgggagatagtataaaatacatagaaaacacaagtaacagaaacctggttgaaatgctwractagagtcaattagatgtgcaggagtaagtagtataagaagaatcaagtccgagagtgatcaggaaatgagtattaaacagtatttgaaacagagaacgtgtcccagggcccaaaagtcagaagggccccaccagccaggaaagttgtttcaatgctgtaagtaggtgtagccaagggaagccaggactatctgatatacggtagcaggggtttacggctgccaggggaaaataactcatcaagtgttggactttcaattataagatcgaatttaatttcctttccctcattctgcagcaatcagaatacacaatcttaaccactcggtccttagtggttttgttccattttgcattgggtattttcactgcctcatagagtctatttcaagtgttttggctgaaagggctttttgcatttgcatgttctgagttcagattctgctggtgcacccaagcattatgggaacrggaactcaacttagctcttccagtagaggggtgagggattctgcttttcaaattcataacattgatctttttatgcaagatttccatttacagttgaataagtacttcatatttttccatcattagacaaatacaaaatggactaaataattttaagagatagtggaggagagggggtacagacttccttcttagagagtgtcagagaatatgctcccaatggtggaaaggaagatttacagtctagcggctaagtacctcctacacatttcccatcaatcagaaaatagacaggtacactaaagggaccctgagaactcctcttgtaatttcaacacacccaaaatcaagggcctggatgccagcagctgcagcaagcaggtttttcctccctgttgagcaagacaggtgagcaagataggacttggctttcttacatgatgcggtaacttgtgacttgagtctttttccctaatttgctagtgggaagaaaaatagctgagctttctaaaatgatagctctctatttttaaatgaatttgaaaagtcgattaaattatgtattttattgcctctgagtatcatattaaatgaatattttattttaaaggcttaaataaatgaaaatgatttttgtaatgtttggtctagttgaatctttgtgacttgtgtcaagattttctcactgctcagttctagagatacaaataaggtggagtttctcagatattaaattgttctttgaaaggtgcctgaaagaaactcttaattaaacactctcataattcggtctcccactgatactgactgggattttcctccagaaaatcatacagggggaacattaattaaatactcttaaaaatagtttgacaatgatagctgatttaaaataataatgaaagtatttcatgaacttacaaatgaagccaccatcttctacgaaatggtgatgtatatacatatatatacacgtgtgtgtatatttacacacatacacaatgatagcctatttaaaataataaaagtatttcacgaacttacaaataaagctttcacctcctacaaaatggtgataaatgatatatgtatattatacatatgacatatatataatattatatatgtcacatatattatacatatgacatatattatatatatgtcatatgtataatatacacatacacacacaaagaattatggagctcttgcattaaaatctctcataaatgagacttgaagaaattcaggtcatcaacctcatttgactcctcctcaaagacatcattctcttttcaatctaggaaactctcactctcttccagtaggaaacaatttatctccttggaatatttggtatcccattgcttctcaatccttcaccttttcaaaaaccacataagtttagaacaaccgtcttcaaactgtggtgtggttacccctgggagttcatgaaattgttcaaagggtatgcaggcatggttagggagtaagtttccatttcttcaacttccagatgtataccttccccaaactgccctgcctgaaatgcccagtgtttgagttgtcctgggttctccatgtccacctcctctctcatggtcaggccttattctcaggcctaatcttactatggtacattggtcaagggtaggaacactttttaacaccaagcaaacaattcaaaatattggtatctgagaaaagcttatctttcccaatcgtatagatatgtatttaatgatttagaaatgaagtatgtgggcccatgttggaatatttgtataggtatgtatttcatgatttagaaatgaagtatttgggcttgtgttggaacattttgaatatataaatattataaagtggtctaggggagaagacaattttccattaacatgccagcacttccatcccaatatttacccacaaaagccatcacccttgagagtaaaactgtgagagcaaacaaaggagcactggttagagacattgaaagaggacacagggttttttttcctccaagagataccaaactataacaaatgtctgagccttatctatctttcttaagttggaattcagatgtgaaatggtcaacacagaggcccatgtcgctatattgttaagattgaaaagagaagtcaaaaaaatttttctgacaaaaagtctgatgtaattgactggtttctctgctaattaagaaatataaaagacatttcttgtaaattacatgagctcgatctgcagctctaaggtttaaaaaatatatttaaaacatatgaaaagcacattataaaataattgatctaaaatatataaagaactcttgaaactcaataataagaagtcaaggaacccaactgaaaaataagcagaagaatttgaatagacacttcagcaaaaaatggtactaaaagcaaataagcacatggcaatgggaggtacattcatgagaagatactcaacacgacaatattagataaatccaaattaaaaccacaataaggtaccactgcatgctcaataaaataactaaaaagaaaaaagtgctgacaataacaagtgttgacaagaatgtagattgctaagcggtacaaccaccttcgaaaacgtgttgcagcttctcataaacctacactaaccatgggacccagcagtctccctcctaggtatttacccaaggtaaccagaagtgaaagggtgacagaaagccaatcaggcatcaagcatctggggaggcaattactgcaaaaagatatgatgtaccatgtggaagtgacagaaatgttctatatcataactttggtggtggatccacaactttatacatttgtccaaattcacagaactgtacttttgaaattagtgactcttattctatgtaaatgttattataataaagctgatcaaatatttttttgcccaagatgtagcaggaaatgtatctaatatttttatcttctccacccttttgtgagaatagagttaaatgtggagactgtaagtggaagaataacagagtctagagctcttagatacatcttgcaatgcctttggtagcacactttccagaaattgagatggcaaatgacttcagttcaagaaacattttgaaagatgggtaattccaattctttactttcaagaaaactggaagaggatcccatcaagttgttaatccttgtattttaaaaaagttttgctgatagaccactatgtggtattgtttttgcgtgtaacttggaaatttgagggacaatatataccaaaaatcctctcgttatcatcttcctttttatgtaaacaaggtttataagcacttaaacccataaaaaagaggcacaaaatagttgttgctgtgtctcagtctaacgataacaggacagtgtatattgcattccaggctttcgtctaagttctttacacatgtgaactcatttagtcctcacaatcactctgtgggatatgtaatatttctcccacttttacaattgagggaacttaggcacagaatgattaagtaactttcccaatgtcacttagctggcaaagggtgaaacttgaactccagaagtttagctgkatattctgttctgttgaccacagcactcaagtacataatatttatccaaaaatacacagtgtcaaaattctcataaatacatcacattagaataaaattctataatggaaaaaggattacataagttcaagtcaaaagaaaaacaatgtaaaattctcaaaaacgaaggcagaacttctcattttttaaaaatcagtaataaatatctatgaggtgtgtagatttcaatggatatatttaaaagtgatgtatcactttaattttaaattttcatttttaccaaattgtattttcagcttttgtcagaaattgaacttgtaattatttaaccttatgataacaaatgttaaatatcaactaagaatgtataaagtatacatcagttttaaaaattgtttggagttatataatcaagtttcttttttttctaaattccagtggtttgaccttctattaatttgctaagtggtacatttaaaaacctgttcggtgttataaagctggtagagaaaaattaattctaagaaatcatcattgcctttgctgggaataagtacacgccaacaaatatacatgtaagtaataagagagacagtatcattatttaaaattaaaaatagtagtttaggatgtttaagtacaaagattacttacatgtcaaaccagcagggttttcagctgcttgattgatttatacaatataagtcaattcttaagtcattgtggttactgttctcaaatcagaagaattttaaaagaatagctttgaaaaataacaaatatgattctgtccttttgctactgggacataatgactctttcatgcctcatggcataagaaacataaggctaagtcttctaagctgtatcactaatgtcaatcctttaaaggagtcagtgaagacaatacagacattcattaagaacaaaatgagacagagaaggaaaagggttatgaaatcacgttaagtgaaaaaagcaaattggtaattaattatatttatattgcaatccttgcaaatgatagggaataaaaaggaggggaaacattaaagggttttttaaggaaatgagaccatgaggttgctttttcaatattttcctttactatcatatgatatatgagacaacaaaatcaagagaaagaaatattaaaagtggcttcaagggttaacatggcttccccggggtcaatgtacaggtctggtgagtatggatggagtggagagaaatgaacctctccattggtcttgcagtttctgccatttgtaccttcttccttcccactggccctaagaatctctgcccctcaccagtaaggcacaggcttttcaggtgtagcagatactattgtctggttaacccagcactcatttccaaccccctctccgattcccacctcaactaaaaactcacatgtcaaccttcatttgcagctaggtagccatgtgacacctttctagacaattacatagaagcagaaatctcttcaggaagattctagcaaagcctttggtaattttttgttgatgttgctatcgaggtaatagagacacctgtcattgacccttctcccacctcctgctgccttaaagacaaagggttgcctggtactgcaacagcgactatagaacagcacagaaccagctctagcagtgttgagccactgaagcaaagccaatagctgccagcctgtaaacttgacacctaagcaaaacaaacacctacttacttaatctgttgttacccagatatgttatcacttgcagctggaaggattcctaatttatagacctgaggatccctgtcactggaattgccttaggtataaggtactcacaaaaatgcctgaggaatcagtgatggtgaacaacagaaaacttaaaaggctaacaggaatatcaaggcagtctctccatacagcatttggcttggggcacaataaggtggaaagttccataaagacaatgactataacatttgatttgccatatctctcattatcacaaaggaaacttattgcctacttatattcatattggctctgaatcggaatatttaaaacgttgctcatttccaagccaaaagaatcttccccatagacttaaatttaaaagtaataaacatagaagttgcagagatagagaataaaaattacttgttaaatttccaaatagttactgccaagctatgtgttaaaaatatttcatttgtacacagtgcaattataatgatttttattaattctccaccagaccattacaaatttctttaaaggataattacactatttatttgcagtaataaaaataaagtcctgccatatagcaattaggtggggatagagggcagaaaacaaaataaaaattatgtaattctaatgtgtagtgatggtttttaaagcttttgaatacatatttattacattgggcttccaactgcacatagaatcatcactcataccatcctaagacttttgagtaaatatgcattaggcgagttttaagcactcattattaactcagtcaaccagaacaaattcattaactgtaagcttatctagtttatcaagtgaatctagactgagttcatgggaatgtacttaaactttaaatatttattcgttagaccttgctagaatcctagagtaatatattcattatgccagggatttttaatgtgctgtgtcaaattatgttctcccaaatgctcaagtgatataattaactttatagcctgggtgttaattcttatgatataaaggaccatgaatgaatcaccagcattgcagggctttgctgcctttggtcacgagatcccccatatgttgtctcttccaacattttcagctctcgcctctctgctcgtactaggatatttgatttctttcttcttcgcctgaaaagtctactgttgaactgagaaattccctcaagccaaacactgatacctcccccaggacgtatcttattgatactcaataaggtcctgtgcttaaagttgccgctaaatccagcctcccttcaaaagaatctctcacctccctaggg

SEQ ID NO: 5684 - DNA, 55689 bp, Homo sapiens
ccctcagaggctgtacctggggaggaggtacctctcttcctccatttgacccaattctaaaccccctgtagcagtgacgtctgtcttcgtctcattccagtgcactttgtgaattctagagggctttcccagaaccaaggaaggctgctctgcccacagcaggccttgggaatttaacctccctgggagcagcctcaatgagtgatgctctggaactgctgggtcagtagcccagcccctggccccttggatgggatcatttgaagccctgttttctgcaccatttttcaagttccctggtggggctgagtctggttgcaaatcgtgaaagctgccctatagtacttttaccagctgcctccctttctctgtctcacttcctcattcccctcctgatgtcccctgcacttcccagatacactacttgcccctgaatcttgccccttgaaccatcacaccctgggactaccccaggtgccactctgtttgttgtttctccgcctagaaggacgggcacccaggaagcaaaacgggagggcagggaagggagggtgttctggggaggcttgacaagaaacgaggcttttaaaagaaacagcagcaaagtgccaggcctgcaccagccagcttgagtcacactccagggactcagcaaagcttgtccaccttcctggtccaccctgggcctgtccatcctggagtgaccaccgggcgtttccagtaaaaatcccttcacttcacttccgtcatctccgagtcaggcaaggtggtggaaaccggggaagacctcagcttcggagctgctggaatttgtgtgactcacgccctccagtggtcacttgacaaatgacatagggctcacggtctggggacttgagcttgttagggcctcagaaccgggagggtcccaggaatgcctcttctcaatgccttcctttgacagctgagtggagtgaaggccccacaggacacgtgactcgccacgggacatgcacacacacaaatagagagtaagagccacgcccctgtgtttccttcacgtcccacctttatcatttgtgtcacatctgcatgcacctatactgttatttgcttaaacattttaccttaaactggctctctttaaaccttaaatatatttctaaaataaaatttttatcactttctgtgaggcggggcacacagtaggaactccgtctcctccttccatggccttgcacagagctggcaccagacactgacatggaggggagaacattcaaccccaggtaatcctcagctcctaccttgatctcagtttcccactctctcattgtcacctctccttgcccctgggtgtactcacctgtagcaaaatgggtaagcacacagtgggcgcacaagtggggtccagtcaaggtctcagacctgggtcagtcctcagctttgccacttacaaactgagtgacattgagctggtcgctcaaactttctgtgtctcggtttccttattggtgaattggggatagtattataatagtacctgccacacaacgttgttggaggattaactgagataataaatggaaagcccagggcctggctgtatttatggagcaagcaccagagcaagtgcaagctgggactccagggttgtagccctgccaccacctgactgtgtggtcttggacaagtcatttggctttgcttagcctcaatttccccatctataaaatggggctagtgatcattcccaccccataggactgttgtgtggattaaatgcttggtatgtttaagtgccttgctcagtaaacgttagctctgatcaattgtttttgtagaaaagccttcaaagttgctaacttccgagggctaactggatctgaaccatcttcacagcctggcatagaaacagatcaaatcaatccagtggaaaatcaattccaggataatgagcccaagacattcccgtgctgattgctgtcagcatggtgcctaggacagcctgggaaggcagggaggagggcatttctccacagcagcctcggaacctctatcgccaccctccggggggcccacctgtcccccgcctgcccttcaaggtgctctttgatttctccccagmagaattcacctgctgcatccatcatcagaagaggccaggaatgyggcctgctgggtgggcagggccaagaagaaggcagccgtgcaggcccaggaagccgtaggagacttgccaacctccaggagggggccagccctggaccctgcagacaggcgctctggggagggtaccagaagctcactgtttgtcccggcttgaaggctgtttgctgtgtgaccttggtgagtctcctaacctctgtgtatcatcacaatcattatcactatttttactctcctcctcttcctatttgccggttaagagaggattgggatagtggtcatggttatacaacattgtgaatattctaaaaaccattgcattttacactttaaaatagttaattggtaattttatgttatgtgaaatttattccaattaaaaattaaaaatacatacatgaatttaatgttacaaagggagagagaggaccgggaatttaaaagcaggtgtttgtggtgggacggggacctgtctgaggaaggatacttcagaaggcaagtcctggcatccacttgctctttgtcaaaagggaaattgttactctctgactcccagcaaggataataaattcttacttggctgactttttgctcaatggctcaaagcattttcttgtatctcgtttatttacttttatttttatcaccttttgtcacgagaaaagtcaggcccagagagaagtggcttttccaagatcacatggtaggtcagcagtgaagctgtgcctcgaacctgggacctttcaggctaaaggaaaccagaacatgccacgcccagatatgccgatatggcatcctgattatctccagctgaaggcatttgagaaagagcagctagagagagggctatctgaactgccctgtcctgcctgcagcaagccataaacattccttggagaaagatgctttcccagcatcaagatgagaagataacttttatcagctcagagatggcaccagagccatctacaaatacaaacaaaccttgctatcctactccttagctcacttccacatgtttaccttctcacagcttgccacccctggaagcctacaactgcattcgtcttgtcacctttctcttctttctttctttctctctttcctttcctttcttttcctttcctttcctttcctttcctttcctttcctttcctttcctttcctttcctttcctttcctttcctttcctcctttccctcttttttttccttttttttttgagacaggctagggtgcagtggcgcgaccatagctctctgcagcctctaactcccagactcaattgatcctcccacctgatcctcctgagtagctaggactacagtagctgggcatgccagcatacccagctaatttattttcaatttttctgtagagattggatctcactatgttgcccaggctggtctcgaactcctggcctcaagcaatctgcccacctcagcctcccaaattgctgggattccaggcatgaaccaccgtgcccagccatcttgtcactttctaaaatgcattgctcttcatggcagatgctccataagccagagttctaagccgcagcattgagttactttcactgaggcttctcctgcgtggtgtgcatcacagacattaacaaacttgcttttttttctctattattaatctgtcttttgttacagtgtctttcccaacaaataacttaagatgattgaggagaaattatatttccttcccagctggctaattccaaatgtgtcctcaagcctggtgcttggactcaaaccctgccacaggtcaagaatgccacaccaagcagacgctgtgttagaggggcacctgaggtgacatgtttgacagatcacataactgaataactgcattttctgaaggaaaatcaacgaagtgctttgaggccaagtagatgggattcttgaggattccatgaatagcaaatagtagtatccccctcagaggctcttgggtgggggcattaaatgtgttaatacatgtgtttgctgcaggtatagccagaatatgtgaaagcagctacagggaatagagtgtagcaaactcctaatcatccctcaaaaccctgccctggtgtcctctcccttgtaaactttccttgaacaaggcagaaccagctacatcagcaccataccatccctccatcactacagatatcactctgtactataattatccatttatttttctaggccttgcactccctaaggccaggattctgactctttccctgagtgctgtttacctgaactgaaccggcatgaaccaccacgcccggccatcttgtcactttctaaaatgcattgctcttcgtggcagatgctccataagccagagctctaagccgcagcattgagccgcagcattgagctgaagcctgaagggaagatggctttgatatgttaaaactcattccagtttactcctatttttcattcattcatccacacattcactcaacaaagatccttgagctctgatatccatgtcttttttgtggctcttagtttatctttgacaaagttaatatattatgctgaatttaacttgggaaagacaagaaggaaatgagtggacagtggtagcaaagtgttgggacggtgagatcaagggtgactttttttccctttgcttctcaacttctccctaatgtagttgttattttacttttatgatggaaaaatgcatatgtatgggaatactgtatttcaggcattataaggaatgaaattataggccgggcatggtggctaacccttgtaatcctagcactttgagaggctgaagtgggcagatcacttgagcttcagagttcgagaccagcatggacaacatggtgaaacccagtctctaccaaaaacacaaaaatattagctgggtgtggtggtgcatgcctgtagtcccagctactcaggaggctgaggtgggaggatcgcttgagcctgggaggcagaagttgcaatgagcagagatcgtgccactccgctccagtcttggtgacagaatgagactccatctcaaaaataaataaataaataaaataaatgaaatgaaattataagaaattaccactttttcatgtaagaagtgatcatttccattataagggaaggaatttaatcctacctgccattccaccaaagcttacctagtgctaaaggatgaggtgttagtaagaccaacatctcagaggcctctctgtgccaatagccttccttcctttcccttccaaaaacctcaagtgactagttcagaggcctgtctggaataatggcatcatctaatatcactggccttctggaacctgggcattttccagtgtgttccatactgtcaatattcccccagcttcctggactcctgtcacaagctggaaaagtgagaggatggacagggattaaccagagagctccctgctgaggaaaaaatctcccagatgctgaaagtgaggccatgtggcttggccaaataaaacctggctccgtggtgcctctatcttagcagccaccctgctgatgaactgccaccttggacttgggaccagaaagaggtgggttgggtgaagaggcaccacacagagtgatgtaacagcaagatcaggtcacccacaggccctggcagtcacagtcataaattagctaactgtacacaagctggggacactccctttggaaaccaaaaaaaaaaaaaaaaaaaagagacctttatgcaaaaacaactctctggatggcatggggtgagtataaatacttcttggctgccagtgtgttcataactttgtagcgagtcgaaaactgaggctccggccgcagagaactcagcctcattcctgctttaaaatctctcggccacctttgatgaggggactgggcagttctagacagtcccgaagttctcaaggcacaggtctcttcctggtttgactgtccttaccccggggaggcagtgcagccagctgcaaggtgagttgccttcatttctggggaagcggctgttttgagagggttttgtttcttcctctttgagaaggctcagaaaattgtgggaattttctgcctacagagagaaggtgttggaaagtctaggtaaaaaaatgccgacatgaggtttggtcatttgaacatggcatcttggtcagatttcttttctgcaaatattagctgtggttgttacatgacaaggaaaaactttctgaaaagttcaaaatgggagtttgtatctgctaagaattttttttaacagagattatcttatcagtccttataacatgtaacctccccacaaatcctggtaagatggatatattaaacccattttatggatgaataaatgagtttcagttaaataacttgatccaggacacataactggtagagctaggattccaggatttgaacccaggtctatggggctataagttcttttctttctttccctctttccttcctttccttcctgtcctttcctcccttcccctcccttcccttccctttctttcttttttttttttggaaacagccttgactgcccagcctcaagcaatccttctgcctcagcctcccgagtagctgggactacaggcacaagacaccatgcctgcctggctaatttttcaattttttgtagtcaaggtctccctatgttgcccaggctgaactcgaactcttggactcaagcgatcctcctgcctcggtctcccgaaatgctgggattacaggcgtgagccactgcacttggcctaaaattcttacatggactatattcactacactgtcttctaaagacagagtttttgcctctttgatcttcctcttgtctgtttcaaaggagatgatctcagatttcgagggatgagtgcatttttcacaaatatttcctccccacataataaaagaggagcaagtaataatgctgagttagaacaacaactgcaaaatctttaaaagaaaggtagctacagcttgagtgctttccccagtaayagacctaaaactacagttgataatgagagctgctgggaagtgtctttcagggtcaggcaaaggcacccctgtttcaacgacctccgggctcttcctcaccctgcctgtggccagtgatgaagcctggctgggtctggtgggccagcaggtcccgctaaggaggctcatggtgcatacagtttgtccttgttaagtggcgatggggatgggggggttcattgtttttccttaagattattaggtggctttacagaattgaagtctgtgtccgaaggctccccattccaaccccgaaatagagacagaggttgcaaagcattgatgaaggggctcatgctggcgttcatatcgattccccagtgagccaaccccactgagaagccctgttctgtaaactcttcttcaaccttccctcacctctgcttcycttcttcagccccacagtgaagaacatctgagctcaaatccagataagtgacataagtgacctgctttgtaaagccatagagatggcctgtccttggaaatttctgttcaagaccaaattccaccagtatgcaatgaatggggaaaaagacatcaacaacaatgtggagaaagcyccctgtgccacctccaggtgagttttccctgggggaacctcctgcttgtctccttgggcacccatgccctgtcggcaccgatgactcagaattcctctctctgctcctcctctctcacctgaggtctgatctcctcattgcttcttgaaagtccctgttggaattcaatgcagccgctgattattgggcacctcgctgtgcctgacggtatgtgaagaaggaagggacatggtgcggggctggccctgaagaagcttggaatctttggggaagaatatgggaaggagcttggcctgagaatgggaggcagtagagcctcgtggtgggcaccatggcggaggggtgggggtggagggtcagcatcctggcctgcgtccattccaattcaccgcttgctagatgctttgaatatcatcctggtgaagggcatcaggatgttagacaaactagttccaagccctgtgctggccgcactagttgccgggtgctgcctctagccagctgtgtgacgcagggtaagttaacctctctgaaacttagtgctcacctgtggtatgaggaacccaagggggccctcaccatagtgtgctgaggatgaaatgagatctacagcactcagcactgtgcccacacagaacagacacttagtccacatcagggttcatcaccatctactgagtacctgcccttgccagagctacacaggccacttgacagactttgcatctcaactgatctctgtggcggctctttgaagttcatatgattgactcatttcacagataaggaaatagaagctctaataggattatgacttcccccagcctgaatgaccggtaattacagagtttacagagttggaacttgagcccagatttggattcttcatgtccctcctccccgggcccatccttcctcccagggcagaaccaagagaatgagtcagttaatgaacaagtcaagggacaggcttgaggctcgctcaggtggaaagacaaagcaatctgcaataacgcaatagtgcaactgaaaccaaagcccccrtctacacaagaccaccacatagccacacaaccccaccgccccagaggagcctttcccatggactacaaagggtagggcgccccctggatgtgtrragcatgacggccctgagtgtatctgtcagaggcggcaaaaaatgccagtggctaagaggatgggcttggggatgagcaagtggctttgccactcagtagccctgtaacctttggcaagtcccctagcctctgagcctcaatttcctcctctataagaagagggtaacaatggtgatttcctggagttggaggaaggagtaaatgagctttcccatgtgagcaacttagcacagggcctggcctggagtaagtgctcagcaaatggcactgttggcattgctatcattagcggtggtgttggcagttaggaggtgatggagcaaaattgaacagagttccctctaggggcttcacagaagtcaggtggactctgtggcctttgaagtatgggtagaatgtagacaggtgcagaggagtagcaaggacattcaggaagaggggagaggtgagcagaggctcagaggcagaaatgagcctgactgtgcttggccaggagtgggctgggggctgggataggcaaagccaggccagagcacaagggcttgaatgcagggtaggagatttggactcgctctccctggcagtagggagccattgtaggttcttgagcaggacagtctagctgtggtgtggtaggtgaattggaggagaggactttgaaaccaggcagtctgggctatggcaactgaggtggctaagagaccaagaggtgagaacacagagttgatggcctctagatgtccagattctaagggctgtagaggggcagtggcttcgccccttccttctcttcatctcatcattgcagccgctgccagctgacctccctgactccagctccccacactggctctgagctctctcttgccaactggacttctagcaagtcacgcccctattctagagcctgcagtggctccccattgcctgtcaccacattaaagcttccacagagttctgagcgagcaccctacccaaatggagagcccatcccacctgcccatcccagccttcctcagctccccagtgcctgtgcatagcacattcctccctcagctcatccagacccaactcatcccctatttttttcttttctatttttattttttattattattatttttagacagggtctcactctgttgcccagacttcagtgtagtggctccatttcagctcactgcactgcaacctccacctgccaggttcaagcgattctcccacctcagcctcctgagtagctgggactacaggcatgtgccaccacgcctggttaatttttgtatttttagtagagacggtgtttcaccatattggccaggctggtctcgaacccctgacctcaagcaattctcctgccttggcctcccaaagtgctattacaggtgtgagccaccgcacctaggcttcttttttctttccttttcttttctctctttctctctctcttttaaagctgagaatcttgctctgttgtccaggctgccctcgaactctgggccctagtgatctatctgctgtctttccggatcaccctgaatctcccaaaacccttacggtgttggctgcagcctttaaccctcatccccacaccctctaatagcattgccagttatccctatgtctttgggggctgacttgtgtctttggaccattcaggaaatatgagttcagactccagggagggccctgagctgcagtggacatgtgacaaaccagctaacttgaccatgtttttccccctcctcttcatgctggggtgggctggcggaaaggatccagtcagatagaagaggggatgaagaaaaaaatatcacacatcaattcattcaactctcccaacgatccacaaggaaggaattttagytatcccattttaaagatgaggaccctgaagcccagaaagttaaagtaattttcaagatctcataattagcaaatgacagagctgggattcagatccaggcagtccagagggacccctgcatggggctgccacctttgtgtcctgggcatgtcacattccattgacgagtacatgcagatgcccactcccctggctctgtgctgggagttaagatatcaatgaaacccttctgctcatcagtgaattgtttgagccacttattacttacatacaccactgctaaaaacaatagataacatttataaggtccttagtactgtgtcaataatgagacaggaactattatccttgttttacaagattgagtgacttactggaggtcaattcctggaaaatagtggagctaaggtttgagtcaagtccaaactcataacatctacactatctgtgctctcccagagggcctactgtgtgctgcactgttcaagagacagagaaaaatgacccagttcctgctgtcaggaaggaaacggggaaacggatgtcttcctcgctggtttgggagacgtacatgaagaatgcgagttggagaaattgtgtcaggagtaggtgggatggagtgtagacaggaggtcgtagttgtgggtgtactgggaccgtgctagaggcctctgctggggagactgcagaggtgcctgggcaggctgtagtgtggggaggagttggggggaggaggtgggtccacccagagtgcaacatccactcaggtgagggaggggtgatgttactggaagaggaagcagccgtgcaaagggratttcatcctgaaagcaatgagagccaatgaatatattttgattttaaaaagtaattttctaatctgttcaggtgtcatgaaaccaagagcctattctaagtgactggtgattctataccttcgtaaacaattaggaaatgagcatggtgtgtgtgtgtgtgtgtgtgtgtgtgtgtgtgcgcgtgtgtgtgtacgcatgtgtgtattttagggacaaaggcaaatgtgggagcatctaggtgaagacacatggaattcagaaccaagtcgagctatgtgttgcttgctgggctgcagttggctagaaataaatatgtgccctctttcattctgctttaactggggttcgggatttaatgtgcttgcatactgccagaagggccccctgcatgttgaggtccagggctgctgccccatctgggtctggaccctacctgttatcttgcttgagataaggagcaccttacaggcggagcaaagtcaggaggctctgcgcagtccaggtagcaaggacaaggggcctgcaaggcaccggaaggggcttacgatccctcctgcaatattcctactagaagtcacccctaacccagtgctttctttggtttcttttctggaatcgcacagaacatgctgtatgtaacaagtaatataacacttcccgggacagccttgtgaggtggtgtgagcttaggctgggctgtggtcctggggctgctgtgtggccctggacaagatccttaatctctctggccccagctaatgcctcaataaagtggagatgacaacgtagagctgtctgcttaacgagactggacgaaatgacagaaaggaaatttgctctgtaaactagaaagcaccgcgcaatggtggtaattatcataagctttattgcgattttatggggaataaacaaacacgaggcccaacacgacccgggcatcttagcccagacacagtccagtgccatccaaactccgcggcagacgccggctgcgggcccctgggtgcttgggtcccgggatcgccggggaaggcagggaaggaggggcagctcggcccgggacatcgcgtgggtgaagagcccccgccgctgctcggctcgccccgcccccggggcgggggctgcaggctccgagcgataaagcgcgggcgctgggaggcgcgtggagccagcggagctgcgcctaaggagccgggccatgcgcgaggggctgggcgcggcgtgcgaggccgccgggccccggctgtgcaggctgctctgcaggatcctccggccgaagcctgactgctgcccgcgcagagccaggtaccccgcgggccgaagtccgccctgggagggaagcggtgggctccgagcccgggcggggccccatctctctctgggagaaatcsgagggcggggatgtgcgctctgtgggattcctgagggtttactaaaagcgttttcctcttttagaacgcttgagaggtcgcaattcaggagcccaggcggcccagagaaaccccccatgcactatgagaggcgtctatgcgggttcagttgcgctgcgaatgtttcagcacttgggagcttttgaaatttttcagcactggggttgaaagttgctacactctttggatcaaatatggttaagagagcaaggaggttcttgtttcacaaatgagatccatttcccagggcgccatcccccccaccctccccatctgtccccaccaccactcttggtgtaaggcgaggtaaacaggcagggaggcgtcggaaccgcaggggaatctggcccccaggtcagcccaggcaagccacagtctgcagctgtgaccggctcggctggtcaagggcttgtagaaagttctgggtctaagcaagccaccacactcacagcactccccacgcccccgacccctttttttgatagggtctcactctgtcacccaggcgacagtggcgccgtctcggttcaccgtagcctccacctccagggctcaggtgatcctcccaccttagcctcctgagtagctgggactacaggcgcgcatcaccacacacttggcaccttttttttttttttttttttttttgtagagatagggtttcaccatgttgcccaggctggtcttgaactcctgggctcgagtgatccgcccacctcggccttccaaagtgctgagatgacaggtgtcagccaccgcgcccagctgccagcactctctttgaatgcaggtccttgagggtcctcaggaccccgcacagctgtgggtttagtcaaattgcacgagcgtctgcggggtcagaatcaacaatgtgataatttggaaagaagtgtccagattctgaaggtgctcacctggagtctggtcaccctgtcaccctgtctcccagcagccagccagaagaaatggtgtgggaggggacttgggcaaaactttgtttattcatttttcaaatttaaagaattgtccaattatgaaaggaattcattgtcactgtaaaaagttggaagatgtggaaaagtataagaaaagttaaattgcctatgatcttatcacttaatgctagtcactgttaacatttactaacattccctcgaggtgtttttctgtgcttgtacgmacacacacacacacagccagcatcagactgtgtatacagtttaaggcattatttatatgagggcaaaactagacacagtctaacatccagccatggacaatgggaccaggctaatcgtggcccatctgtagagtggatttttagccaacttttaaaagtgatactttttaatatatggggtaaaatgattatgttaaatgtacaaagacattgcttctcaatctaaacagtactgtagatgtttctggtctgaagcttctgaaattgtccaactctacttccagaagtaagtgagaggaagcaagaatgggtgcagggtgggtgctggggtgagggggaatggcaaaagagcaagaggggcagttgtcccctggggaccccatcccccatacatcttcctattgaagcagccccatggtgactgctcagccatggcttatctgttctgaatatccagattgccatatatatatatatttttgttttgttttgttttgttttgttttgtttttttctggcaggccacaccagtctagaccaggtgtgttaaagaaaaaagtattcaatgatacttgttaaagaacagtatggaagtctttatttaggaccatctcaataggtacagggacctactgcagtggggtctggcagtggaggagagagattgggcccaaatccaaatacagcaggagcaagtgggaatttatagccaaggatcagggtggggtctgtggatggaaaattaccaagaaaaacttcaggcatagggggaattctgcctcacccaayctaacaggattcttgcttaggacaggctaaggtgatcagacatcgcctgggggaggatggaggatgaggaccctgatcagatggggaggacgacaagctatcaaggatggagggttcttgttaaactgactaagtagggattcttttgctaaaactgcatttttacaaggaaatgcttggatgggccccgcagaagattcagaagtctgagtaaagtttggctaagcaaagcatctttgccagttggcaatggttggtcacatggaaggccctttacagggttgtggaatcccttgattcagatataagttgctttctgatacatacttacatcctcttttaagacagtatctctttatagtaaaaaatcacttactgctactatgtaatgtatataattaatgatataatggtaacatatagtcatttttttctataataaaagcaatacatggtcatttatcgcatttcaacatcatagatacatatcaagtagaaaatgtgagaccctcataatagtctctaaccacctctccctcagatgcacaagcatgcataccctggaaaatactgccaagaacatggaacacaatatgctttcaaaccaaggtgccctggtgggatgattcttcctaggggaggcatgtgtgagtggtgactattcagttcgccggaatgaacctgaaatcccaaaccaggacaaacggtttctgaccggtttcagaatactgaatttttaagtaatctttaatttaaaaaattactttaagtaatgtttaatttaatttgtaagtaatctgtaatttaatgctaatttttacaatacttgtttttaccttggtgaaggtaagttgacatcttagatttgttttaaaataatgatgggggcagggaaggtataggtgaaacaagatcggccgtggattgatcactgttgaattgggttgaatctgggtgaagggcccatggaaggttattagactattctctctacttttgtacacttaacattttctgtaatagaaatgtagaataagtaaataaaccaagataaatcacgtgttttaaataaagcttaagtcatgaaaaacaagtggctggggctgggcgcggyggctcctgcctgtaatcccagcactttgggaggctaaggtgggaggatcacttgaggccaggagtttgaggccagcctgggcaacatggtgaaaccccatctctaccaaaaatacagaaattagccaggtgtggtggtgtgcgcctgtagtcccagctacccaagaggctgaggtgggaggttcacttgaacctgagaagtggaggttgcagagagctgagatcatgccactgcactccagcctggatgacagtgcaaggctctgtttcaaaaaatataaatcaatcagtcaatcagtcaaccaatccaagtggctgctgggcagtgctgctagtctgggaggcagagttgttggagccattctctgcccacccagcccctgtgccacgtttgtacttggcttttccagagggtgaaggagcattttccagatcctctatgggctgctgtttgggccagtagctttggctcagctctgctcatgcccttttggctctgcgggaggaagaakataagaggaagagggaagatggggatggggaggcagttggtcagaccraccatgaacaattcactcccaccctctggactcagtttccctatttgtcaaatgaggttactggcagagggaactccaagatgcccctccacccttggataccgcatctcatgctagctgtttcctttcacagtccagtgacacaggatgaccttcagtatcacaacctcagcaagcagcagaatgagtccccgcagcccctcgtggagacgggaaaggtcagtgagtcacatgggtgtgggaagccccttcctccctggtccaggcagatgcagacatagcagcctgttagagctgggctggagagggcaggaagccagggtttggatggagagtggagagtcccagacccggggtgttggggggaacaggtgggaatgaggaagggctttgggagagtgagacaacccccagtggtcgggagtggtggcccccaaggtgcactgacagctagcttctatctcctgggttccataccattctagagaggtgggcagagaaatgggtaggagtgggagagagggtggcttatatgtccttacatgctcccagggaaggaatgcagtggtgcctttctgttctcagtagtattggctctgacagtcatccttctcacctccaacttagtctttagtccctcctacagcagttcctctgaggaagcatttggcaaggccctgggtgaggagaggaccctggccagtggcccaggcacctggagctcttagcaggcactggcccaggtcgcccgggggctggaaacagaggagggacgtggagggacaccctgccctgtgtggccacccatagatccttccccactctaagacaaggcagggcctggggtctaggagagacctgagagaaaaccctgttttttccccttgcagaagtctccrgaatctctggtcaagctggatgcaaccccattgtcctccccacggcatgtgaggatcaaaaactggggcagcgggatgactttccaagacacacttcaccataaggccaaaggggtaagtctggggcttcagggagaaccacctttgtcccaagctggtgaagctgccagggctttgtggatcaaacaggtgtccccctgggcaaaccaaacaatcatctgcttgggcaaaggggtctaggaacagagacattcctcacagattacagtaggaagtaaatgatgccaactccctgttaaccaccccagtaaataatggataatccagaaggtcaaataaatgattgcagaaacaaattcatatctttcttagccggatttcaggataatgtcagggagaattttctaacagaactgctcagagctggactgtattacatcaggaggtagtgagctccctgtcactggaaggatttaaatgcaatttgatagattgcagaggggttcaagtatcctgtgagtggttggactaaatgtcttttcaggcttctttctgtcatgtaagtttttaattctaacttcaggatacattctatggttgtaaagtgggaaagaatggacaatttcaggaccatgaaagcaaaattatttcccacatgcccccaaaccaccacagttaacattcgggtgtacttcattcgtgtgtgtgtgtgtgtgtgtgtgtgtgtgtgtgcacgcgtgtgccttcctatgtctcatttcagtttgttttggccaaataccaatatcatgttcccataggagccatattggattgactttgctctggatctggagctggctggggagcagggccagagactgagtccggagtagggagaaaaacctgactcacacccactggggttcagccagtggaagagaggagatctaggtgggagaaagccaggtggwccccaaggaggaggtgccacaggggtggagaagaggtgcagggagccggagcagccagagaggagccaggtggccaggagagctggccccagaggagggtggcaagaggccgaatggcccaccctcaccacctgcctctctctttccagattttaacttgcaggtccaaatcttgcctggggtccattatgactcccaaaagtttgaccagaggacccagggacaagcctacccctccagatgagcttctacctcaagctatcgaatttgtcaaccaatattacggctccttcaaagagtaaggcttgcctcctgcagggtcgctgcctcctgcccttcctcctgctctcctgtctctacccatcaccctctgatcctagctagatcccttttctttccagatttgtggtgttaaatcactatgattttgcagagcgaaaatcacggttttctaggggagaagaccctggagcaggttctcataattgtgggataacgttgtacatagcaataccagttaaaagtgactgaattcgaaccctggctcccgcattgtgtctgaacgtcctcatcatattaatggcaaaaactgcaactacttttgcaccaacctaatataaaatggggataataacagaaggtggctcatgagatttttgtgaggattcagtaagttcagaacagtgtcctggcatccagagaccttgattgtgaattaatatggaccctttaattatgaaatgtttgagacagaaaggatctctgagaccacctagtcaggcccctactcctacaggtgtgaacatggaagctggtgacatacctgaagtcacctcattccagctagaagccaggccacctgactaggagagggcaggccattgctctttgccctgaccctggtggggttctacatttctggagttctcttcttttttctacccagtgaggcttccctgaggaccatgctagacatccttcatttctatggccaattggtcatttggttgacagacacacatcaggcactgagtatgcctcagccttgtgtcagacactggaatacaaagatttttaattgtcatttgccaattttattgccaacgtatacaattttaatcatccaaagagaggttgtatagcattgtggccttcccaggttcaaatcctagctgtgccccttacgagctgagtaaccctgggcaagttactttgtctctctatgccttgattttcttaccgaaaatggtgataataatagtacccaccttgcaggaggagggtagttggcgggagtttataaagatgaaaggagttaaagaatatagagctaggaacaatgcctgggccacagtaagcacgacataagtattagccattttcatgtttttagaacactgcgttgtccaaataaaatatgtggctatgtaatttaggcccctttaaaacttttaaaacaaaaatgcatgaagagattgtaagaaagaatgtctgaaagaaatggattgttttctttttgtttgtttgtttgtttttatttttgttttttgagatggagttttgctcttgttgcccaggctggagtgcagtggcacgatcttggctcacttcaacctctgcctcccgggtttaagcgattctcctgcctcggcctcctgagtagctgggactataggtgtgtgccactacacctggctaattttttttttttatttttagttgagatggggtttcatcatgttggccaggctgatctcaatcccctgaccttgtgatccacccacctcagcctcccaaagtgctgggattacaggcgtgagccaccgagcccggcccagaaatggattgttttctaggctggaaggggagtgttgctattaggggagagcctcacacagcactgcaccacacaaagtgagccacagacatgtacctgggactccctggcggaaagagtggcttctggtggtaccacctccacttttctttggcttttttttttttttttttttttttttgagactcggtcttgctctgtctcccaggctggagtgcagtggcacaatctctgctcactgcagcctcgatctcctggatcaagtaatcctcccaccacagcttcctgaggagctgggaccacaggtgtgcaccactatgcttagctaattttttaaatttttagtagagacagggtctcactatgttgcccaggctggtcttgaactcctgagctcaagcgatcctcctgccttggcctcccaaagtgctgggattacaggtgtgtgccgctgcacctggcccacctccagttttctacaaccctagaatgtctgagctgggagggaccgtgagtcttcagaagaggccctcatcttccagggtcggtggtcctcaaccctggctgcacagtagacttacctggaaagcctgcaaaattctgatggcagggtcccttgagccaagggcagcagaatctggggagatggggatgaggcagacatgtgtgtgcttcaaaagctccccaggtgattctaatgcacagcctggattgagcagcctgttaggggctgcctgcttcctgactgcaaacttcacaagatccttggcctttcagctcggttgttaattaatgagcctttcggggtccagggattttcctggatgggtttcattgggccacagtacttatgttatttatttatttatttagcataaagcacgtgtgcaccatgacactatgagattggtattattgttatcctcatcttacagacaaggcaactgaaatccacagaagagatgtaccttgctcaaagtcacacccttcgaagccccagagtggggattcgaacctaggcagctggtgcctgagcccttgcttttcccatcaatgctctagtacctagctgtgtggccttgcaggttcccaactctattctggacgtgggaggccttgctgttgtgtggaaggcaattgggcgggtgttcagaagcccagcagggctacagggccatgcttggtggtgttggaacccatttgcttctcccagaggaaaattgtatttttccaagtcacaagtacataccttgaacccctgcttccctgagcaagagawcctgggggtgtgaacggggaatggcagcctctcctcacagggaccctggcaatctaagacatgaccagctgagcaggttcagtggccttttgtatctgaagaatcatagcatatttagagattgtgacttgctgcatgttacatttaaatctgttcactgatgatgaaagccactcctttttttcagagctcatagacatcatagcatttctaatgccttagaaaatgactatatgaaaatggctatcacatctaaaactctgaaggaattggatgtgaatgtaaaaaataatcctttcttgcatatgcacgtgctgaccaccatgtgtgttggtggtgtgggtgttatggtgatcattactgttgtcatgctcaggtgcagaggggggaatattgctggaagctttgtttggggagggaggtctcccagcagtggggtggttcccacctcacccagyagctccttatggcaggggtgtccttggggataaatatcatcagtgttttgtctttgtgctttttttctctaatcaaggaaaagttgtcgagacactcttcatccacagaaaggccattttgttcagagttacccactctccttaatcaggagttcattctttaaatagttttgatgctgtttcaaaaggctttggtgctgaytggaaatctcaaggttgttgttgttgktgktggtggtrgtgtgtgtgtgtgtgtgtgtgtgtgtgtttcaaagcctttctgactgagtccctccctccctttgggatatttttgaagtctgggaggggaggagagaagcaagtttagaattgcatatggagtgactgaatgagcaattctgaggctgaggaacagcacggtttagagagactatgacgtgggcagctcttttctggccaggccctgggaccctgcagactgagctccgatagccaggtcccagtcctggcttgaccaggctcctgagaagggtgggcaggccctcaacatctttgggcttactgtccccgtagggtggaagatggaaggtcacgttgctgacagttaagaacctgggcttggcatcagggcracctgggtctgagtcctgactttgctctttcctgtacttatgttcctgggcctggtrcttaacctcctagagccttgagatccttggctataaaatagatgcaaaaatacctccctcccagactcagtgagaccctgcctgtgggttgcttcacccagtgcctggctcatgtgggtacccagtacaccggagctgccacggagggactggctcatctctcagtcatggcaaggaaggagggcactctactaactaatggagaggcaggacattgctatggctggatgggacactcctcccaggcttgcaagtgtctgagaaggattgcaccccttactgagatgaatatgattaaagaaaaagcacctgaaaataagcagtgttcccatgggctcaggactggctaggtagtatttataggactcaatgtaaaaatgaaaatgtgggctctttattttaaaatgattaagaatttcaagatggggacagcagagcattgagcgtggggtgcttctaggctaagtgtgaggtccccaaagccagccctggagggagctgtctctggtgagaggcatcttgcccttctgatgtcctatttcagttcctgcttctgtggattgaattaatccccrtgtaaggccatctcattgttgatcttcctgctgtcttcctgtcccccagggcaaaaatagaggaacatctggccagggtggaagcggtaacaaaggagatagaaacaacaggaacctaccaactgacgggagatgagctcatcttcgccaccaagcaggcctggcgcaatgccccacgctgcattgggaggatccagtggtccaacctgcaggtgaacttccttagacttgagcgggagagagctggaggcggccaggccctgagcagatggcttggaacagccacacagagctgtgcccaggcctcctgggactgaagccatggccctggatcctctcttacattcccaaatgttgagatggggcacctagggtccctctctagaagccttgaatcctgtttcagcaccagggtttctagctgcccattctctattgtgttaaattcaggagactaaatgccatcattagagtaaaccacgaccttgtttttattacacttgaggccgtggtgctgcaagatgtgttgttttcctccaatgcttgaattcttggctccaagagaacattttatttagcctagcctcctaggccatctttttgttggggartcatttgttgcaggataatatcaaaagcacttggacagagaaatcgattagaactgccagtgaaaccaactctggctgtgtagtatgtgctggtgtgggaaaggacctagcctggggctgtggcaatcccgattcatggtgctttcaagtcagrttttcttggaattctgggtttgctggggtcttctgagtggggttgcctgtgctcccctagagggcagccatgaaatgggagcggtggtgcagatgggaggctgaattcttctgcatggtgttgagtggcaggtgcagattggaggctgcactcttcggcatggtgttgagtgtttgtgtgttgagtgtttcggctgcactattgattcccagtgacttctgatcagcctcaaagcctctgtctacccagtctttgatgggcatggtctggatgggctgttgcaggtcttcgatgcccgcagctgttccactgccygggaaatgtttgaacacatctgcagacacgtgcgttactccaccaacaatggcaacatcaggtyggtgcacrtttcccagggctgcagaggggcttgccttgcctgagaatcttagccaaaagatgcagcacttgggtctaggggaggcatctccagctccaggagaaaccagggagaaagaaaaaagagaaagactcaggcttcttcggggacttccagtagtgagcccagcccctgtgagctcagctcccatcggcaacccatgcccttggtttccttctgatgtggagccacttggaggggatggaggatctttaagaagtaactgcttcactattcagggttggggctcccattttttagaaggcatgggacattaagaggttaccttcctctcccaaccaacgaggtcaaagctaataggactgaacagctcatttggtcattcattcatctttttgttcagcaaacactcagtgcctacctaatgcaactcaacacaggacaaggctgggagagcagggggaagatggggtatgggggggtaggaggaagagtgactaggaccctaagatgctgctccagctggtgtgagcctatgacctgcactagacaggcaaccagctaactcaactgcaaggacggagacataggcagtgagggaaagactggcagatcagctaaccctgcctgatggatgggaaggcccccttgagggggtggaccctgggtcttgagggagggcagcaggagaaggcatgtcaggaggctggctcagtcagcttgggatcaggggctgcagagcaggtagggtggagagggaggtagggccagtgcaggatggctgggcccccaccagggctaggtggtaaacagtactgttcctgtcctgggaaggtcggccatcaccgtgttcccccagcggagtgatggcaagcacgacttccgggtgtggaatgctcagctcatccgctatgctggctaccagatgccagatggcagcatcagaggggaccctgccaacgtggaattcactcaggtacccggcccagcctcagccrcyggccattggggcggggagccccrtggtgagcgagtgacagagtggagcccagaggagacacgcagcccgggcttacagactcacagggcccgtcttgttccccagctgtgcatcgacctgggctggaagcccaagtacggccgcttcgatgtggtccccctggtcctgcaggccaatggccgtgaccctgagctcttygaaatcccacctgaccttgtgcttgaggtggccatggaacatcccaagtaagtaggctgagggtgctgggggcaagggcgagtcaacacacagcccttctcctttcctaagtgcggctccagccttccccataccttccctaaagcccagccagcagcaggtgacactcagggggctggccttcaaggactcttttgtcactgttgcattctgcagccattctgcactggcacctcgggcctcagacaggtggatgtgttgatgctgaggggaagcagaggcttaggcggatggggccccaggagcttgagaagcagtgactgcaggagaggaatgcattgagattctagaaaggagcagcccaggcctcttctgccctcctgccaatgctcttagctgtccctctcctgtcgggatcatatagggctgcagtgacttcaaragtcctactggcccagcccctgctctaggcagttctcataattgcaaaaatacctctgcgtattgagatttactctgtagcagacattgggctgggctcttcttcctggccgttgaatgaaccaaattcagtcctgactcacagcctttgtaytccctgttccctttgcatgacatgccttttcctcagaatttttctaggctcatttcttcttgtcaaaaggtatttcctataatgtcacctcctctgagaaggctctctgaccactcaagctagaggaggcccccttaccctcagtctaacacatcatcttgtttttatttcttatatatttgtttacccatttataatctagagtctagacattagactacaagttccttgagggtggagatcttttcttttctgttcacaatgtatacccaacagctagcagagtgcctggcacatagtaggtgctcagttataaatatttgtggaataactgaatatacaagtgaatgatattactagctttataataattccatgaatttgatgctatgtttctattctgataatggggatgttgaggctcagagaggctaaaaaacatcccaagttcacactgctagtcagaggcagaacttgaaccccagctttctgacactggagtccttaattgctctgttgtgttgcattctcagcatttagcacagagcctggcacatacttgaagcttaayataggtttgcatgaatgaatgagtgcatgaatgcataatttaataaatggcatcctatgtgtccaatacgtctctctggctgggattaactcagaatcaactcttggaaaggagttttcttgtttgactctttctgaagcttttttcttggtgggcaggtggggggtcagtgggaggccaaaggtgcaaaagtgaagcccccagcgccagacaaggtagttcacacctgtaattccagcactttgggaggctgaggcaggaggattacttgaggccagtagttcgagaccagcctgggcaacatagtgagactctataaaataataataataataataataataataataataaggaaaaaaattagctgagcaagatggcacatgcctgcagtcctagctacttgggaggctgaggcaggaggatcgcttgggcccaggagttaaaggctgcagtgagttatgattgtgccactgcactgcactccagcatgagcaacagagcaagaccaagtcactaaaaaaaaaataataataaaataaaaataaggaaggccccagttaaattgtgtctacctttttgccagatacgagtggtttcgggaactggagctaaagtggtacgccctgcctgcagtggccaacatgctgcttgaggtgggcggcctggagttcccagggtgccccttcaatggctggtacatgggcacagagatcggagtccgggacttctgtgaygtccagcgctacaacatcctggaggtaacccagccagcccagctggccagatgaaggtgtgggcctgggggtggcttcagggaccgactygccgctatcactctgcctctgtaggaagtgggcaggagaatgggcctggaaacgcacaagctggcctcgctctggaaagaccaggctgtcgttgagatcaacattgctgtgctccatagtttccaggtatgtctggagttttgtgagtctgaagactttttggtgagaagcttaactgatccagtgacttatgtgatgcttaatttataagtaagcccccttgctcactctagaggtccagcaacaggcagctcctcacctcccaagactgttcaatccctgtacttgagcactgaattctgtcctctctcaatcgctcaaggactttactcccaaaaattttcctcttctctctctgtatcatcaatgtctctctctctgctgagtcattcccagcagtgtacagacaggctctcttagccccatttcaaagaaagaaatgaatagctaaccacataactcctgccaaacctcaggctccctccagccactgcctcacccttctgctcctttctacagcaaaactatggagagatctcattgtgcttcctcatcccccaactgcttcagcctggctgggcgacagagcaagactccgctcaaaaaaaaaagaaggcctccctgaccgtgccatgtaaaatgacgccctcaccccactgccaacctgtctctctgtgttagtcctttaaccattttatttttcttcaaaatacttcctcatacagttcctggcattatataggacatcgactttcttctttcttttcctttttttttttttgagacatcatctcactcggtcacccaggctggaatgcagtggcatgatcactgcagccttgacctcctgggctcaagtgatcctcccaccttagcctgccgagtagctgggactacaggtgcataccacgcttgcctaatttttatatttttagtagagatggtgtttttccatgttgcccaggttggttccgaactcctggcctcaagtgatccgcttgcctcagcctcccaaagcrctgggattataggcataagccacggtgccgggccagctttctttattgtttggtttcctccactagaatgtaagctccatggggcagggaccttgtctgtctgtttgctgctgcacctctggcctagaagagtgtctggcacatggtagatgctaaaataatttgtctttgaagaatgaatgatgagggccacatccgcgatctggcctggcacaaactgggtcttcagtccttgtctgacgtgtgcatgaatgagtgatgctgggaggggacctatgagctgtggctgctcttgcttgctgtgcgaggatgacaacctccacctcctcttaagcccacacacagccgctgggctcctgtgtagggctaagccctcaggcccatccgctgctcttactcatagaaacacttcccttccctgtgggaaggaggcctgagatgtaggaagatactactttagaagccacagccattgccacaaagctgacagatgccctggagaccccaccactggtcagtcattcattcattcagcagtgttttactcagcatttgcctggtgctgggcactaggctgggccaaggatgtgagtggtgaacagagtacagatgagcacacactgttccccatgactgggtcaccccataggcagatcaggcctgtgcttgacgggggaggggaagatggaacaggaagagccccccggtgtttsgggaagggctggctttgcaccacacatcctgactcctggggactcccagcaccagccctgatgctggcaggatgtggatacgtcccagaaaatctgtgagcctytgctgtctcctcaccrtggctgactgtgtccttccactgcctgagcgtctccaggacttcctcaccaccctccttcagggtaaacttcaaaagatgggcccttgtttcctcctctgtaaaatggggataatagtgcctccctcatctgaggattataagagttaagtaaaaatgcatgcaaaatgtttagctgcactgcctggcccatagacaacactcagtaagcaatgattttcttactgtttattatgttgtcatcatgatcgtggctaccactgagtttttttttttttttttttcctttggagatgaactctccctccattgcctaggctggagtgcatggtgtgatctcggctcactgcaacctccgcctcctgggttcaagcaattctcctgcctcagcctcccaagtagctgggattacaggattgcaccaccatacccggctaatttttgtaattttagtagagatagggtttcaccatgttggccaggctggtctcaaactcctggcctcaagtgatccacctgtctctgcctcccaaagtgctgggattacaggtgtgagccactgcacccatcctgtagctaccactgagcttagaactgatctggctcccaggagttgctgtgtcttggaagaataagtgaatgagagcccacgtccacaagagtggtggccggacttttatatacacatatataacttatgtatgtctattgaatttacaaggcatggctggccttcccaggcctgacaccagctggatcctctcatgcctccctgccttgactcatgcagtgccccactcaactaacttgcacccctctcacaagtctcccttcctctcaggagctgctcccgaaattcgccaactcaccctgggcctctgtctggcgttgtatcctctcytctgcccttccccagcacctttgcctgcctccatcagagtttctatcaggccrtgtgaaaatgactgattttccttggcttccccacccagttagactagactctaatgcagagaaagggctgtgtctttcccttctataacgccgatgccttatgcagtgcctggcagatggagattataagagcagctaatatttattaagcacttactatgctttgcttattccagcttattgcatcctttcaacaacctcatgatgtaagaactttttttttggagacaaggtcttgttttgtcacccagactggagtgcagtggcccaatcatggctcactgcagccttgacctcctgggctcaagcaatgctcttaccacatcagcctcccacatatctgagaacactggcatgtgccaccaaacctggctaatttttaaatttttttgtttttgttttttttaagacagagtctcgctctgtcacccaggctggagtgcagtggtgcgatctcggctcactgcaacctccgcctcccgggttcaagcgattgtccttctttagccttctgagtagctgggattacaggtgtgtgcctccaccatgcctggctaattattatattttttagtagagacggggtttcaccatgttggtcaggctggtctcaaactcccgacctcaggtgatctccccgtctcgccctcccaaagtgctgggattataggtgtaagccccgacagctggcctactaatttttaaatttttatagagacagggtctcaccatgtttcctaggctgatttcaaactcctgggctcaagcagtcctcccacctcggcctcccaaagtgctaggattacaggcatgagccactgcacctggccattataggaattcatatcactcccatttcacagatgagaaaacttaaagaactaattgctcaaggtcacatggcaaataaaaagccagagtttgaaccactgtgttaaacaaatgtctcttgactgaatgggttgccacagacatagaggccagtggctgccttgctggaccattccatggggtcagaccccacagcccgtaatttcagactgtgagtgattcgtctcccatacactacagttctcccaatgcttcagacctccccacggaggggtctggctccttcttggctgaggaggctacaaccccatggaagtgactcttagaactctccaccataaatggctgggatggtatttcctttacctgccaaaaggtgctgtggtttaagttatgcagatccagagagagccatttgctgggagtctggggagacctgtgggcatgagaggctggatattgccctcaaagacttaagggaggcccccatgggacctgtgggctgaccctgactaatgtgctttcttgggctctgtcagaggctccacaagcgccttccatttgggtgtttattttcagcaggcaaggagagggccaggagttgctctcccgtgttacagattgccaggccttcccaggcactctctgggagccctgcggccaaccggcccctctcctgattcccccacccttatctccactccctatcttgccttctgatacagaagcagaatgtgaccatcatggaccaccactcggctgcagaatccttcatgaagtacatgcagaatgaataccggtcccgtgggggctgcccggcagactggatttggctggtccctcccatgtctgggagcatcacccccgtgtttcaccaggagatgctgaactacgtcctgtcccctttctactactatcaggttaggggccttcctcttctctccttcctgggggctcagatgtggytgtatgtgtgtgtgtgtgtgtgcacctcattgttacacatgtagggcacgacgggaagcaggagtatgttgttagagctttccaggccccactcaaggatgctgagcagcctttgtgcatttccacggagagtggcactgaaggaagtggcttccactgcaccgctagtggcctgtggctcagatggggggtctgtcattacacctgcttccacgggagggcccggcaacagtcactcagcagagtgttgaggggattggcccctgagtcagacgctattgattctgccacttcctagcaatagggtcttgggtgggtcctttcacctttctgagccctgatcttctcatctctaaaagggatgggcttcactccacgacggggggttgtgtggatcacaaagctggtgtatggaacagctcagcccagtgcccaatgcagaatgcattcagtaaccatgagctattgagaagagttcattttgtgccaaaaaggacttgggttggattttaagagcttccttcatctaaaggaagagcttcctccatctacaggacctcacatgcagggtgacggcatgtcctggagtcttgcctgttgtagtagcagctcttcttgctctcaaaggtgtctcggttgggactgtacattatgtcatctgcctgctgataagatgctaaaagcaaaaggagtgcagcctgttccttccaggaggacactaatgagaataagggttagccgccccccctcgatgtgcaggctccatgccgggcagtggagaggcaactctgggggagaggcagccacggccctcccttgtgggagttcagtgacaggggtggggcgcaggccagccttctctcccaggctcatgatgggtgtgaagggtcctctaccactccagcatcygcgagcygagccaagccaggaccccgccctgccctcacatctcctttcttttctgaaggtagaggcctggaaaacccatgtctggcaggacgagaagcrgagacccaagagaagagagattccattgaaagtcttggtcaagtgagtggcagtggcagtggctagtagtgatgtgtgaactatmtctctcccttctagtcagcctctgcctccagtccttgaagggcaagaacacarggaatggttatgctttttgcttttgtttttgagacagggtcttactctgtcacccaggctggggtgtagtggtgccatcacagctcactgcagcctctgcttcccgagctcaagtgatcctcccacctgagcctcccaagtagctgggaccacaggtacaaacccacgcctgactaattttgtttgttttttttgtagagacggggtctcgcagtgttgcccaggttggtcttgaactcctgggctcaagcgatcttcctgctcagcctcccaaagtgctgggattacagatgtgagccacggcacccagcctgggaatgtatattcttcgtggaatttggctcccagaggtccagtcgccaattccaagggtcccctgctgccattgttccaaccttctctctcctcccttttcccaaaggggcctatagtagtgggtgaggggaggaaaagggtgagttgtcacggtacatggctggtgagaaacgtagcttgcttttccctcaacctgccccacattaaacgctgtcccctcccattcccctggtcccccattttcttctggaaggctgactcagcacacagcgcctgcctgtctgtctgtccccacagagctgtgctctttgcctgtatgctgatgcgcaagacaatggcgtcccgagtcagagtcaccatcctctttgcgacagagacaggaaaatcagaggcgctggcctgggacctgggggccttattcagctgtgccttcaaccccaaggtactggctyagtgggatggctgttgttttttctgcttgtgtgcaggggagtctaggaaaagttaaaacggtttccccactcctggatgtctcagagtcttggatgtggtaatgtgcatcattaatctggaagagaaggaaagacttgtgtgcagggattccmaaacttacacagtagatgagtttttcatggtgttctggagaacacagtttgagaaacactttcacaatgaatccaggcctcaacatacatcagctgctctggctgaactttattcaggctcactgaacacctgctctgcaggatgcagtgctgcatgtgaaagggggaagagatgagtaagcttcagataaacaaaaaaaggccgcagagggtctgtctaagctctatcccctgccttcagcactgatggataaaatccaactcttagggaatggtggccacgtgctggaccagccccgggctctgaggatctgacagtgggtggcgcagagccaggccttgcccttggggagctctccagcatacaccccaccctcccctcccagcgcyctgcaaagcaggcgtcaatgccattgttaatgcacagaggaggaacctgactgttagacaggttgatgggttttccagggtcgcacggcttctgggagatggatgtgactctgaggacagggcacaggccagtgtaatgccacgatgggatgagctgtggtctgtgccacgtagaggcttaggccaagggggcactgactgatgaccaggtcggccaggttgctgaaaacacctcttgggtccaagcctcacctgctggctcccaggagtctggaactgccaggagagtggtggcaggtcccccatcctccgctgggtgggcctggatagaacagcaagatgagggcacatttccccggccattccctccaggcacagctgtgacctgctcattccaattttgtggaaatatttccacacacacaaaattgcaaatagtagtggacatggtgagaggcatttagacatgggaaaggcagtatttttgggacagatcttccagggcttgccaatgtgttaaccatagggcttaagcggggaaggagaacagaggatgatgtgttcaaattggttcattcacgtcctctgtgccacgcctgtgccgggccctgggagagacagatgagcacaggagccgcagcctgggggcagtgtgggaggaagcccagggtgtctgcgcagggtagggagggccctactgggagccgagggctgatgtccacttgggtgccatccaggttgtctgcatggataagtacaggctgagctgcctggaggaggaacggctgctgttggtggtgaccagtacgtttggcaatggagactgccctggcaatggagaggtgggtggcttgaggtctggctggtctagggggtggtagggcacgggaggacccaggaaagggtctgggggatgcggcaggtcctacggaggacatttgggagtcagtgctcaggccactccgggtcactcaggtcatttgccggcctccattgtaattattgccatatgggagtgccacctttcctatgacatatttaatatatttctgtgaatggcctacctgtttgtatttacaaattcatatttaaaggaaacttgtatcactctcacaaatggaargcagcaaaacataaattcaatgaaaacaaaatgaagttaatgaattttagctagatactattccctggccaaggcctgctctttgtttgttttgtttgttttttggtttttggtgtgtgtttgtttatttatttatttatttacttaggtggagttttgcttttgttgcccagggtacagtgcaatggtgcgatctcagctcactgcaaactctgcctccctggttcaagtgattcttctgcctcagcctcccgagtagctgcgattacaggcacgcgccaccatgcctggccaattttgtattcttttttttaagtagagatggggtttctccatgttggtcaggctggtcttgaactcccaacctcaggtgatccgcccgcctcagcctcccaaagtgctgggattataggcgtgagccaccgtgctcagctatctttgtttttaaaaaagactaataggcaatgagagaggtattaaaggtctattagcaccaatatgagactgtctctccagtgctccgaagratgaaaatgtaattgaaggggaataactaaaaaataaattatgaaaagggagtaaatactcaccatgggatttgacgctagttctgctgggtcacatacctcctggaatcatcttggcttcctggaaagccagccttatttcagagactgtaggaccaattgttgttgcttctaccgggttccaaacagaatcacggcgcattcggagcccctctggagaaggcatgctaccaggcaggcccctctgccagggctggatgggtgggggcccagctgttccaggtcccccattaagaggcagggcctacacaagttgctacagtttagttggagtgagagacaagctaaacttgtcagctgacaaccaggtccttggccaggtagccccatatgtaaaccaacttccrtggtgggctgtgagccttctcctgcaagctgtggccaggtttccagaagaaaggaaaaaacagtgtttttattcatcctggcttgagaactctgtcattccctctctttctagaaactgaagaaatygctcttcatgctgaaagagctcaacaacaaattcaggtaaagctttttccgttgtcctactcctagccctgccctgtggacccaaagtctgggttcaggggatggaactgggtgtgcacagggkgtcttctcagaaccgtgcaggcacagagacctgggtctaaggtctgtactcagaatgtgtcgagggtcaaaccacagaaaccaagtccctctcacaggtctgcaggccaagcatggggtggtcatgggagttggtgacaaggctgggggatggagaggaccagaagggggtccagctccattctccagctggagggggagagtctggggctggctctccaggctgttggtgctgggtgctgggtgccaggtgctgcttgcatgggacatgtgtctctgtgtgtgtcctcgggcaggtacgctgtgtttggcctcggctccagcatgtaccctcggttctgcgcctttgctcatgacattgatcagaagctgtcccacctgggggcctctcagctcaccccgatgggagaaggggatgagctcagtgggcaggaggacgccttccgcagctgggccgtgcaaaccttcaaggtcakttcccagccagagctgccccacagcagggacatgacagggtgcattcatgcctaggacatctgtgctgggcgtcccaggtggcatgacctctgcctgtggtcctgtagatgtggtcccaggcatgggccagggccacaaacctgagggcttaggtcactgctgctctccctcagccccctagaagagctccaccttgtgcacacaactctgggggagaaggtggcacagatacccccctgcccttagggagcttctagtttaaggtckttcctccagtgactacctaggtcacctcttaactactgtgtctgtttcagtctcacagccatagagagcctggggacaggcaccacacaatggcggatccactttggatccactcagtatctccatagctctttattgctgtgattgccccagtcatttagggaactygtcactcatgcagagcgtcactcagcggtggtgcttaggagcatcagcttgcatcggggcaggcttggttccaaagcccaggcctcctccatgtggctccacaccaggaacataagagcaatcagacctcttccagtgtgggcatgaggatacaacaagatcatgtcaatattggcattcatartggtcgggcacagtggagcatgcctgcaatccaagcactttaggaggctgaggtgggcagattgcttgagcccaggagcttgaaactagcctgagtaacatgtgaaacctgcctctaccgaaaatacagaaaattggctgggcttggttgtgcgtacctgtagtctcagctacaggtacgggactgaggcgggaggattgcttgagcccaggtggttggggcttcagtgagctatgatggcaccactgtactccagcctgggygactgagtgagaccctgtctcaaaacaaaaacaaagcaatatttataatagtagcaatagctactatgtgccaagcccagacacctctttgagtccttgctgtcaccctatcaggtaagtgtgcttcgaagttacacgaaacmcacggctcagtgtttggcccatggtaagggcytaaaaagkggtagccccagtggtggggatgctgctgctgctgaccattaaccgcagtctgctccaccttcttccaggcagcctgtgagacgtttsatgtccgaggcaaacagcacattcagatccccaagctctacacctccaatgtgacctgggacccgcaccactacaggctcgtgcaggactcacagcctttggacctcagcaaaggtacctgcttctctgyagcacatggggcttgtttgtgttggggtctgagccctaagcccatggtcaaggagamccccaggtctttctgaacagagacagctggcctcggggcctccctctcactgcatgcaagagcctgttagggcataatactcaaggtgctgagggaggctgtttcaggagggagccccaggagggtggtggagacagaagggatcagcatccgccaagggcctactgtgtgtcagacactgtgcggggctcctggcccacatgggctaagtgagcctggacactcctcctgggagaaaggcacagatggagaaattgcagttcaaggaggtgaagcaagctgctagcctgtggccatgttggggtctgagccccagccttccagctgcgaaggcagccaagtgtcgtagagaaggtgtcacagaggcgattccaggctktagtggtgaactctccactctgcacccccaggtgctgtgccctgtgccctgtctaagatagtcctgaaggtttctgcatatttaagatatccccaatgtcaacaatgctctcctgtggatcccaagccatggagatgtcccgggactttccatttttaggttcctaaattgaatttcccaacacctagaagcaacacttagaagctgccctgtatcagatcaaggagcttttttttttttttttttttttttgagacggagtctcggtctgtcgtccaggctggagtgcagtggcgcgattcccgcttactgcaacctccgtctcctggcttcaagtgattctcgtgtagctgggactattggcactaccaccatgcctggtttcagtatgttggccagtctggtctcaaactcctgacctccagtaatccacccaccgcggcctccaaaagtgctgggattacaggcatgagccaccatgcccggyctggaccaaggatctttatttgtggaataaaaggaagaaaaagaaaaacccaacggccacctcagcaggatgccccaagggtggtgttcagatgtcactgactcagacatctgggggcttcccctacctacgctcaagaaccactttgccatttcaccgtctctgtgtcctccacagccctcagcagcatgcatgccaagaacgtgttcaccatgaggctcaaatctcggcagaatctacaaagtccgacatccaggtaagggaaagtgcagggcttcgtgggtgatactctgtcgattttattttaacgaatgaaagatcagaagaagtcagtctttgaagggagaggagaagagcatatgctggcattagcagccacactgtcggtaggaccggcccacctggtaacctgcggccacctgtgcttttacgtctactcttggttaaccacgagccacktttccagcttggactctragcatctgctccacttcctctccttcctcattgaactctttcactaaaaggagagtgcaagagagacttaaactgtttgattcattcttaagaactttcaggaaaagtgttggcagggaaggaaatttcccagctctgggaaagagccttgtggattatctgcaggtttcattgatctgtgctgtcctccccgcatgcattaggaaaactggccttggttctaataagaacagggtttgtcctggcaacaaggaaaggtttcttctgatatccatgtatgtccaaggcggatgctttctttaggcagaggctgtagccaagccctcggggrgctccaagggctgctgggaaggggtgggcccccctcctccccagagggaagctcctggggccctcttaagcacccctgcctgtggggatgcctcatcccaagctcagggtggtggcctagcttgtggaaccagccaggaaaatgaaaggagggcacatttcctggggaatctcgcctgcccatcaaggagccctggaggaaatcctgcaatgtcacctgaggcttcattttccttccccagccgtgccaccatcctggtggaactctcctgtgaggatggccaaggcctgaactacctgccgggggagcaccttggggtttgcccaggcaaccagccggccctggtccaaggyatcctggagcgagtggtggatggccccacaccccaccagacagtgcgcctggaggccctggatgagagtggtgagycccgggctagaaagccagtgctgcctggcaccctctggccgccccacctggctgaggggctgagcctgggcctgccggtgacagccatccctgtccttcctgctgagagggygggccaccaaagcttatgtgaaagcagctgtggaaacagtcccagcccataaggcatggccccctggccttagtttccctaatgataacatccccctcaatgcagtggccaaagtcagaaagtgggatgagctgggtgtggtggctcacgcctgtaatctcagcactttgggaggccgtggygggtggatcacttgaggtcaggagtctgagacaatcctggccaacatggcaaaaccccgtctctactaaaaatacaaaaataattagacaggaatggtggtacatgcctgttatcccaatcccagccactcgggaggctgaggcacaagaatcgcttgaagccaggaggtggaggttgcagtgatatgagatctcgccactacactccagcctgggtgacagaaactccatctcaaaaaaataaaaaagaaagtgggatcagagaaacagagcctggcagtgacccccactgtccaggagaaagtgagagaacctgagacgtggggacgacaagacagttgcccttgtgactgtagggtgaaggatgtggttcatcaggactctgttccagaggagagaatgtcaggctcttatttttacccagtgtttacaaagcatctgtgtaccaggcacggcaccaactattatggcacaatttcattcagtgctcatgccaacccagcaagataggttgtgctatcagatctgtttcacagggagggaagccaaggcccagaggcttcagtcacctcagaagtggggagccagggtttgaacccgtgtcttctggcaccagggtctgtgctgtgactgccctgcatgctgctccctgggacttccctttgggctcatctgctcacccagcacatcttggtacagcacccaggggactgcagtcatgggcttctctctaagtgaacaactggcctgtgaggtatccattagtctttggtggatttagtcattgtgagtctgtagatcaccagtgagtgtcttgctaaagttcaggtctgggccagagaaggacgtggttagtttatcaggaccacgccaacttactgcccctttgggggctggtgatcagccttccctggcagtcctttctccatgcgccaccttcttcctgccttttgctcttagagccaggtctttagagcctcctttcccctgcagctggagaatagagggtgtctgcctgggggcctcgctacctactgagaatcctgaatggggcctcttttccatcctgacaccttccttccccatccaggcagctactgggtcagtgacaagaggctgcccccctgctcactcagccaggccctcacctacttcctggacatcaccacacccccacccagctgctgctccaaaagctggcccaggtggccacagaaragcctgagagacgaggctggaggccctgtgccaggtgaagatcagggctggtgggcagtgggggtatgtggggggtcccagcatgtggggagccagagtccagagctggttttaactttcaagagggatccacaccaggttcccaaagtgagacttgtcaaaggctggtgggaagccaggcatcgtccgctggcccatgtctaggacacagttgtgttgagtgaactgaatttttccaagtgtctgcaggatgcaaccagagtgcactgccttgaacattagctagraaggggagccgcccttatccgtctttgctttccccaaaactggaataaacttgtcacttaagatgtattgggggatggatgatgtggatgaatggataaatgggcataatgggcagagtgacagatggagagctgaattaataagttaatgagagaatgcgttaactcacctgcaactgtctggttccaagtctttgcaaaaggcactggttgtcattattatcatcatcattatagctaattatctcaatttaagctacctccaccgccattattttgtggctgcaatgtactaacttggcacatgctttctcatttaattcccataacatccccacaagacaggcaatactgtccttgtttcacaaagggtaattgggacaagattccacagctagtgaggacacccagccaagatttgaacccaggtctgattggttccaaagccttgccccaaataaattacaataaagatttgacccctgcccatgagttgccgacagtggaggtaacacaagttagataaatgtactggactgagttcctccaggacaggcacttattttgtctcaagtttggtcgtctcagcaccatggacagtgcctggcacatggacttgtttgttgagtgagtgaatgaatgaatgaatactgggttgtgacagtcttttccccaaagcrggacaggcgccctgagtcactgacatcacccttggcttttagccctcagagtacagcaagtggaagttcaccaacagccccacattcctggagytgctagaggagttcccgtccctgcgggtgtctgctggcttcctgctttcccagctccccattctgaagcccaggttctactccatcagctcctcccgggatcacacgcccacrgagatccacctgactgtggccgtggtcacctaccacacccgaggtgagccaggggcagaggctctggaacagccccgctccgcccattattggacatctgttcatcaactcagattcagctccctcatcagttcaaggagggagggaacacccacagcccagagttgttaacagtattaggaggtgtgtgggagasatctstaggaaccaggcactaaaccaagccttctgtatgtatatgatcagttacattgtggggtaggcactgtgtgcattttacaggtggcacagaaagtcacactgttagtaagtggagagctgagattcagacctggatagtctaactgctgagtccaagtcctccaccactccactgtcccactactcttgggacaatttaatgagatcagatgtgaagagcactcaacccttggtaggaggccagtggttcttagtsttcccaatcatgcagcctgaacgcaggggagattcygcattgattattcattcactcactcagctattcagtgggtgcctggcactggggtgggtrtggaaatacaacagagatcagccctgccctcagggagcatctagaggcrgcagtggagagataggcatagaaataattagatgattytcattgtgctgaagccaagaaggaaaggtcagggtcactgagggaagcagagcagggggtgacgctgccatagagcgggaggccaacatctcgtccaggtggtctcggctccaccactggccgctgccccctgccctgccctctgtaactgagcattgcctgggtkggcaaagctgggagctgcccayacttccgagccctctgtcctcaagaagcaaaaacacagtttctaaaaccttggcagagactctatttgccctgctagagaacagccacccagaccaggagaggagaggcagacgtgtcctgtgagatcaaagtttaatcccgaggaaaaccagggggacctctgcagttggttggaggccttcytcaagtgctgggccattgtaaagggaacacaacccagagagacctcctgggtttctacaagcccaggagggcccactgaggaggaaagcaaggtgccagagcaggctgaaatgcgcggagctcatccaccacccagggttgctaccagcaagggccacgctcatgagcacgcacagcagtagccaccctgaggggccacttcatgctgctgtcagtggagctcagtggtgagctgggagtgttcccggagaaagtctttggaaggagcactggagtaggagtcagggaagctgagctgtccacctgattccaccacgacctgagtgacctttttcaartcacttttcctctccccgtctcagtttctgcttgggcagaaggagcaacttgcagcctctctaagtccctttcaacgttcctcasctccgcgcttacagagggtggatctcagaaccaggagracaaacagctgctcattgagtcctgagagtgcctgagtgggggcgtccaaggaggccgtggtgtgggcggagcagctggtacagtttgcgcatgggcagtggggggacgttggtcactttgtggtatcgttgcagatggccagggtcccctgcaccacggcgtctgcagcacatggctcaacagcctgaagccccaagacccagtgccctgctttgtgcggaagtaagcaccccttccactctgtcccctgtggggccgccgacccctgggagttccgggaggaaagggagggatctggggtttaggagacgctcggagccccttggcccataaagaaggcactgrggtcacactggtgtggctgcctgtagcagggacagcgatgacaggtgggtctcaagagtccagtgagcwtggcccttttwcagaaggacctgggggaggtgctggtgcctggacagaagtgaagcagcctgcaggacgtgggaaatcaaataggagcttcttgtcctctccaccccctcacgaccgcctcccacaggcccagctccccagccatcctgtgtgtgcgtgggcctggggtgtctgaggactggccccctcttctcctgtcctcttcagygccagcggcttccacctccccgaggatccctcccatcctygcatcctcatcgggcctggcacaggcatcgcgcccttccgcagtttctggcagcaacggctccatgactcccagcacaagggtaaggctggaggcttcccaggtgggaggggcaccagggggccagcrcctgcctaggagcagaactgcagccccacaaacggttcctgacctctctcgagggaaggcctcccaagtttgcttccctgtgcgggcctctgcgggttagaatggctgcctttccgtctcccgcatagtagccagggctccctctcctgggagtggaggtaacaggaaagtccctgcttttgatctccgattggctgagggaattctgcatccgcactttcagttctgtgactatggatgagtgatctgaatgcgctgggcctcagtttcctcatctgtaaagtgrggataatgctattaaatagctagtgggagtgaagtgagaattccagttgggcttggagccctggcgccctctggtggccaacatggtaacaacagcccgggactcctgcaggagtgcggggaggccgcatgaccttggtgtttgggtgccgccgcccagatgaggaccacatctaccaggaggagatgctggagatggcccagaagggggtgctgcatgcggtgcacacagcctattcccgcctgcctggcaagcccaaggtaaatgcagcctcaaagcaggtgaagcattacacacacaagctccactgtgagccctgggtccccacaggcccctcgcctccccgagccttcacctcctgagctcgaaaatgctggtaattcacaaccatcagagtgatgctgtgaagagcattacaccctctcatacagcagaagcgacagacctggagaggttcaggactaacctaggtcacacgcgggttaaccccagagcccagcctgctgaaggtccccagcaggccccctgggacacgcgactgcccggggagaggtggtccaggctggctacgctcaagccttgcaaggctggagggcggccgatgcttccaccacggccatcagaggggctcttctgtccccagggccgcgttaccccctgagcctggggtgtcagaatagactctcrgccttcacacatttgtcccatcagggcacctcttgggcccagtgctctgtgcccagtgctggggccactgggcatcctgtgtggagcaggagcagagagtccctgactgactcctggaccttgtatctggggagcccgggatccataccctgcagagacctaatgggtagactgcattgagaggctcccttttctggggtgtaggcagagccctgggcagggggactgccttcattgatgcctttttgaagcatggcaaattcagagacagtctgggatccccactggatggtcagcccctcgagggcaggactgtgtccagcatttatctctctaatcccagccgagccccaggggcatccatgcacctcatcctgagcctggccccttgcaaggtcctggctggaaggggactcactcctcaccccttagtgcccctctccccgcctccttgaggccagcaggcctgcctgcaagccttgtcctgagcagctgaggactgaacccactgtttcctctggtttcaggtctatgttcaggacatcctgcggcagcagctggccagcgaggtgctccgtgtgctccacaaggagccaggccacctctatgtttgcggggatgtgcgcatggcccgggacgtggcccacaccctgaagcagctggtggctgccaagctgaaattgaatgaggagcaggtcgaggactatttctttcagctcaaggtatagtagtgggtgtgtgggctgaaggtgccggccaagggcacaggccgttggagccaggaccaggggtggcaggtagacccaggggaatcaggcccagaaaggttctggaccccaagagaatcttagcagtggctgagatctgagctgggtgggctgtcagatggccytactgcacatcctggaccagttggcagctttgagaagtcgggtgaatgtgttccatttttccatctgtagaatgggggcaggagagtctccctggcctctccccaaacccccctttcagaaagtatctgtgtggccaaagcaaggctgtgaacacaggggagagcaaggctgccccccgtcagcctcgtgtgaacctcacacttcttatttacacccaggctggtgtctgctcaccctcatccccccagcaggaagggcttgcattttattgatgaagataatagtgatatttatcaagggcttacactgggcatactgcttgccaaggattctcatgtgacatttcattcagtcctgccgaggactttatgagggaggcacccccttttacagagggaagggggcctacggggaccacagcagtaaatgtgagagcctagagttcagtctgcctctctctggttccaaagcctgtgattgtcacttccatactctccctaagacacattcatacgttcaactgaacatttattgagcacctactatgtgctagggatagagcagtaaatgaatcaggcaaaaattctttacattctactggggctgacaaacccagacaagaaagaggtgtagtgcttcagagaaaaacagcaggaaacagcccagggaacgctggggagtgtaattttaaatagggtggccagggaaggcagagctggaaggtggcatctgagaataaacctgagatgrtgaggaggagccctgtggatactgaaggaaacactctgggctgttctggaggggcagcaggtacaaaggccccgggggtgggagttaagctggcgtgtttgaagaacagtgaggagataacaggcatttccccaaatgtgttcagtgggtcggtagacagttggcatcaaaaagattccaaggtcgaatagcctgggacatgcttagttaaggcaaggcaaacacgttgctttactacaagacttctgggagccttcagtatgctgctgttcatcaggacccttcaaggctggaaggaaagaaaggacgtagcatttcccaaacatatttatctcagagctcacacttcctggagtatcttgggtgggggatgaacgctgggcaggaaatgggtatgctaagtaaagctttggagatggttagagggcccgcaccagagcaggtgctgagcagsgttagggtctaaaccagattcaagcacaatctaagtataacagttgggaagacagatggctcatgaaggtccatgtgatagggaagctgggcaaccccaggggctcatcccagcctggacttgacacgttgctctctgtttttacctaaaagagccagaagcgctatcacgaagatatctttggtgctgtatttccttacgaggcgaagaaggacagggtggcggtgcagcccagcagcctggagatgtcagcgctctgagggcctacaggaggggttaaagctgccggcacagaacttaaggatggagccagctctgcattatcygaggtcacagggcctggggagatggaggaaagtgatatcccccagcctcaaktcttatttcctcaacgttgctccccatcaagccctttacttgacctcctaacaagtagcaccctggattgatcggagcctcctctctcaaactggggcctccctggtcccttggagacraaatcttaaatgccaggcctggcaagtgggtgaaagatggaacttgctgctgagtgcaccacttcaagtgaccaccaggaggtgctatcgcaccactgtgtatttaactgccttgtgtacagttatttatgcctctgtatttaaaaaactaacacccagtctgttccccatggccacttgggtcttccctgtatgattccttgatggagatatttacatgaattgcattttactttaatcacactgtatgcgtgtgtgggtgttttgtagggaaagctcttctcagagtggggagctggtgggtgtcacagcctggacagatccccgacagagggacaccccagccagtccatggctcctctgaaatggctgccaggtgtgccagcagcagatggagcttcgtgctggtccaaagacctgtggtagggcagggggcgcaggcctgcctcccacacaaagtatctgaaacggggtctggtgagggtgggattgtcgcataaggccagtgtttcgaggaaggccttgagcttcttcttggacactgtcttagaaagcgttttgctctggggccaccagtctcatgcgagactgtgccttggccagtacggatgtggtccctgggaaggcagcgtgtcgaggcgagtgtgggccacagcatcctcgcctgagggactggggaccctcttgggtttggagcaggccaaggaagccttcttaggagagtgggccccgtttccttctcctggtcagaaccaaaaaaggagctcagcggcggccactggggtcctggcaacacacggctcccagcttaggtttggcctctgcctcctgggtgccctggccgacttcacccccttgcccgccaccttccccttctagcagtagcatctcaggggcaggagaaggggcagtgccaacctcaggctccaggaaagctccatgccctgcgcgacagccgtgcatctcagcaacaaggccaggagtccgctcccggaccagggctttccagctttaatgtgcgcacctcgtctggggtcctgtgaaaacagagactctgacctcgcaggtcgggtggggcgcgggatgctgcgtttccaacaaactcccggatgcagctggtgccactgctctgaggactactatggggcctgaggaactggattcttactgggctgagcaggatgtgttggcatcacctggatgcagagtcgggcttcctggcagtggcccagtggctggcagaacccaacacatgaacactgagccacttttcctatgcaagccctaacccctaatgccggagagacccacaatggaacacacacccagacggtgcttcgggttggcttctcctgacccccctccccaagccacctcctcccactgggacgccaggtctgaggaggcagctctgaccctgctgtggccctcacaggctctgccccagcccctctcccatctcggaggcatggggctgtttcctggggtaccccattaccaccttcctgtgtccgagactcctgcccaaaaggctagagccccagcctgctttctccaacaccctcgtgggatttgtgagggaccctctgggaggaggtgtgaggtcaggaccccctgcccaaagggagtccatgctttcccatcccactcctctcagcagcaccgccgcccgattccacagactccaaaatgtctccaaatgaattaaagaagccacggtcaacccacatgaatgtgccaacaagcattttcatttctttattttaaggacactgggaaaggagccagtcccctgaagagaacactctggtcagttggtggaggccagtgggatgccatcaggctggctttccaggagggggtgaagggttgatgcagggtgcaaggtgagagttaggttaaaggtcagaggggagggactgaggacgtcacctcccaccaggagtggacagctggtggcttgagactggggtggagctgcgtgggggatgggaggggactgagcatggggcttcatcttcactgcccactccccacctctccccagctgtgcccctctcatcagacccccaagagttgttgatctgggtgttgtggaccacagcgttctcatcaaaacggggattgaggtggaaggcgatgtggttcccagagtgcgggttgatgtggaacctggggtgggcagcccacctggacctttgtccactgagttctgggccttatttcctccccgtcatccacagcctgcccaaagccaggggaatggctggaatcaccttgaagggctctctcttcccagaggtcaactggagcccttagcttacctctgagcactgggcaggacagtgcccaacaggatgatggacttggatgggtacagccctcccggaatgatggtgacaaaaggcgtcggctttcagaaggagaggcatgggtcagccagtggcagccagggcagcccaccacacaaaagggaagattgtaccaggtcccatgaatttgggctgtcagctaagaagaaaccaacgatatctgtacttggttccataaaagccaaaggaaaactttccagtgctcctcatattaatgggcttagattagtgtcatgaaaggaactttggccaaacacaaaaagactcatctcgtggggtgaaaagggagagccatgcaatgcgctcgtattgacacgacagttttaaggttgaaagctcctctccacagtcttctaattcgctgggaagctttgaagcccttcagcttaccattttgaaagcccttcgcttttcattttgcaaggctagtggatacccccgaagtggcccttcacccccagcctgcccaccacaaacagaacctccgccctccctgagaaaycacttacataggtggggtgggggtacatcataggtgggttggcgggagtctgctgaaaagaaaccaggaaattcaatgggagagcgcatgtgtgcgcgagcactcacccacgcgcacccatgcattctagaggggctccactgtgaggctgacctcatgagcctttggcccttggactcccccatccacctcccttttcatgttagccttcctggaacttcctgccgtgttcccggactccaccacggtcacctgtccctcaacccctctgcaggcagccccactaacgctaaacttccggcctgatttgcaccagcaggagaagagcttaagcctatgatcggtagtgacatcctggggacccaggatgcagggccaggaacctcacatccgggtgctggggccactgcactccccacttggtgacagacagaccagtttccctcccggtctctagggggcttgcctcttccaccactggataaatcctgcttcttccagaatctctgctgtcccaaggacagctttagccacatgtcacctgagccaagcactcagcccctagtgtccccatcctccttgctaaaccgctttcttcccaactctagcgctctagggaatttagttcttggtgaaggaggacactgtgcagctgtgaactgaccagaacttgtagacttacagagaacatctgtccaggggcgctctgcactgtgtggatgactgtctgggtctggaagaaagaaaccaggtctcacccaggctctcacgtgtgaaaaccaccagctcccaccagagggcgccacacggcaggcaccctccagggggcgtaacaagcccaatggccccacagaccccacagagggtgggcccaggtgtctcttctctcaaggggatgagcgaggggcaaaggttagaaccctggagaagacagatggggacgctggtggctctggcccatctttcctctcggggaaacgtctctcagcctagcctccctttgcaggtgacagaagtgaatgtggggcatggtcttccgtggctgcccacggggtggcaactcaggttgtttcatcacggccagccaaccacatccaacccccaacctcaccaggccgggcagatggtcaagggcctggcctgtgccctccccactcccaatgggagaggcccaatgcctggccctgcctcctccatgagcccagaaaagccaaaatgaggacgatccaaaaagaaagcaagagacttacaatgggagccgggttggcaggccacacgccgggaggctggaggggtgaggagagtcagaatggtggttatcgcgggcaccacagaatgggaggagatggtggcaaaactccagggaggctcttgtgctcagaaatgcctccccggacacacccacctccctcttgctcccaagcaagccttcctgagcccgtggcacccagatttttacccccaggtgcacagggctttggggttggggggtagggtatccccattggttcctcttgagagagaggaggctgggtttgatagagacctcattgctctctgtagctcccacagccaagagcattacttccagtgccatattttaccactaaggtgagaagtggtatttgttgaaggcctactgtgggctgattcctgggtttcagtgctttccaatgagggaagcagcctcagctcctgtgtccctggtgaggtaatgaggcttagaaagattaagcaacttgcccaagctcgcccaggtggaaggcatcaaatccaaagtggcagccagttctgtctgactgtatccagcacactttctatcctccccagggccagggccaaatttgggctgcgctgcaaatgttccctggggctcgaccagtcctgaagtcagcgtggcaggaggcaggtgccctgtctgtaccgtgatgagccgtaagaagactgcatagacaaagcgcccctcctcccagtccccactactggagtggccagaggaagggctgctcacctccttgtcctggatcctgccccacccagtagactgttcttgccctggctggtatcccattctccctggctgtgtgaaccacattccacattcattcactgagtgcaaatgaacaaggcacagtcccggccctctgaagcctcatgggcatagggagatgggggtggagtgacggggacagacaacgcaaacacagttacaatggggtgctttgaactggcatggcacagatacgtacagactccgtggggtcatgggggagcgtccaacaatattccaggcggggaggactcccagaggagcgacatttaggcagagcatggaagggcaattaggcgtgtgctgggggcaggctggcagaggatgcttccgggaccagggacagcatatgcaaaaacatggtggcccgagagggccttgagtgagctgcagaggctgcgtgagctttgtggtttgggggtgaggcagcgaggttgattggggtcagactgggaggaatttgtatgccctgctggggaatttgggctttatttgaagggctgggggctgtgaagatttttaagcagggagagggtgtgatcagatttgcttataagaagcacttataagaacttaagtgcttataagaaccactgtgacagtggttgggtgtggggggtggggaactggacccctgtcgtcatggtgaggaatcccggaggcctgggccatgtcggtggcttcgggcctcttggtgccttggagagacgtaaagaagggggaatgaagaattcagggagacccccaggtccccagctctgggtgcccggcagacagacagggaactcttgagtgggcaagatggggcctgtaggccctgagtggcctgctggctggggccagcctctcagaccctcggtccttcctactgtctgctcggccacccagggcctctgtgttgaactcactttttgtctgcrccccctgggcctgggtgggaaacagacagactgggagaatggcaccgtggagaaggcaggctgaacagggactgtgcrggggttctgttaaaacaaaaggcaccgggcagtgaggagaagcattaatagagccaaggagaagccgaaaggcagaggcaagggcaagagggagagaccaggcaggcagggggatgaggcaagggggttagggccatgccaagatgggatgggaaagagccaggctctggtgagcagtgcaggggtgcggtctccctccagctcttccctccccattcacccacaggggagggagtcagggaaagagggaccaaagtcagagatgaggaccaaagggcgagaagcccagatttgctgagggcctactgtgtgcttcgct

SEQ ID NO: 5685 - DNA, 36929 bp, Homo sapiens
acacggttctggtgaaagaaatataaagtggaaatctcctgaggctgtctcttccctttccaaccttttcctgtttggaacatgggcatgaagtgctaactgcaaggacacaaactattttgaggatgacggagcggaaagatggaaagaatctggactcctgatggcactgctgagacgccgagaagccacaacagggctgggctgcttacctctggacttcttgtcatctgagagaaataattctccctccttttttgggcttaggcctccatatttggggtttttgatatatgtaaccacatgcattcctgatacactaagctagcacttgcctgcaaccattctctctttctcttttgtttttttagagagatggagtcttgctaagttgcccaggttggtcttgaactcctgaactcaagcaatcctcccaccttggcctcccaaagtgggattacaggcataagccaccgcgcctggccgctattctctcttaaattctttctaagcgtctagtccaacttttttttttttcttgcctttggggccataatgacagaattggagtaattttatacttattaattataataattctaccagtaattattacttactgagtgcctcctgaatgttaggaattgagctaagtgattttattctcacaacggtcccaggaaacaaatactattattttcctcattttcagatgaggaaactgaggctcagagatgacaaatgactggttcaaattcacacagctagaattgaagctgggctctgaacccaggtctgccttacgccaaaactcctgctcttcatcctcagcatggctagttcaccaagcttagttaacaggtagggaaactgaggtccaagaggaagagttactagctcaaggtcatgcagtgatttcagggggtcatgttacaagaaatcagacagactgggtccccattccagggctctttctatgatatcctgctgcttagcaaatggcagggcctgaagtccaggctgaggtctggggatgatgggagctattgaatgttctaagcagaattaggagagtgttccacatgccagacgagggttgtggaaacacttcctcttccttcaactatggtggagaaggaagtggggtgagaggacttgtattttacagccccataaacttcctgagcaacgtcccctagccagagaatggctctttcccctggtttgtccgtcacaggtggctgagtcccctgatcccaggagctgatgtctgaggctctgcggattacactgatggtgggggctggctggggaggatgccatggtgtgaccactcagccatcctgtgccaagcagatggtgctggctgtctagtggagaggtctgcgggacagggcacctgcagtggaaactccccagatgaacttggggactctccacttagagtctcctgcttgtttatcttcttggcccattcctggcaggatttgggtgtttgtttaaggattcagggtttgagatccaagataaccagcgatgagcgtaatagggagttacacttgtaaatgttgaaatcatacaggccatggctcaaatcccagctctaccacccatatatagcctgtggtataggctatagcaagtcagttaattttcctgtttataaaaatggagacaagaggaacatctacctcatggggctgttaggagttataaaggggatgatgcaccaaaaatctttagcataatgtctgccacatggtaagtgccccagaagtggttaaaactcctcccacttttcttcctctctgcataatctacggacatctttgagcctcattttcctctttgcacaatggggatcatgataccttcttcttccagcaattgtgagggtttccatgagaaagggatgtaaacgcatttggtaggccgggtgtggtagctcatgcctgtaatcccagcactttgggaggccagtgtgggaggatcacttgagcccaggagttcaagaccagcctgggctacatagtgagacccccgtctctacaaaaaaacaaataaaacaaaattagctgggcatagtgatatgcacccggtagttccagctactcaggaggctgcggtaggaggatcacctgagcccaggagatcaaggctgaagtgagccaagttcgcaccactgcagtccagcctgggcaacagagtgagaccctgacaaaaaataaccaaaaccaaaaccaaaacattattttgtgactctcagttctcagcttctcagctgaactatgttgcttaaattggatcccacacatcgctccacaagccgactaccaccctagcgagcctttctgtttccttttaacttcaaacactcgttggttatgctggggcttgggtacaggtacccggtattccagaacaaaagggttgggccttgaaacctgactcttactggttgtgcatcttggacaagctgcttcaacactgggcctcactttctttctctgtaaatggaagtgatgatactgactttataaggttgttgagaaaaatcacatgtaacagtgcatttaaaacacatagcattctaccctgcacatagtagatattcaagaaatattagccattattattattacctccaatggtcaaccctagcctggttctgagtaggtaaagaggaggaggaagggaatttttcatgcaaccctcttgctcaggtagggagtagaagcgagggccaataaagaactagcattgagctcctactgaatgctggggatgctcacagggactatcttacttcatcctcacaacaactcttgcaagagtggcattattaaccacgtttttacaggtgggggaactgaggtccacaaagggcagtttgctgcttaaggtcacactgagaggtcaggtggggtggaggactgggatttgaagagatattggattgagtccagagccttcctgcctgactgagaagctgcctacacaggtggggccgggtggggctgggtccatgagtgattcaggtaagagtcagctctggttttccaaatagtgggtggggcccagcaggagtgagacctctccaggagcattacaatccaggctgtagctagggtgagcaggagggcacgtgattggtgtggataatggggagggggctatgcagagagaaatcctatcccttgttaccagtggggtatagggaaggaggtccttgctgccttagctgggaagggctcagggcctggggtgaagctgggcctgtgggacagctgggggtgctggcccatgggacaagctggagaaggcagggaaactgaggcaggcagtgatacttttggtggccgtcacagcagatgggtggttggcagtcacttcgatgaggctggtgctggacctggtctgtttttttaatgcattcactactcttttagatactcattcatttctttgttcaagcaacaaacattccctggatgtcttttatccgccagatcctatgcttggccttggggctacaagagtgaccaggactcttatagcctcataatgtttgggggcagagggacaatgtgatcaggagtggcactgctgtggccagggaaggcacaggggcttcctagaggagagaagggggaggaggaggcatgttagaggaggcctaccaggggacatgggaggtggacttgccctataagtggaagctcacaatcttgaggactaggatggtgacaccagtcctaggcatttagactatagctttgcagtagggagcaggaaaaggtggccctgtgctgtggtctctttcccagggctggggcaagggctaccccagacctctcccctgtgtatccagctgcatgctggggcggttgggggtgctggcccatgggccaagctggagaaggcagggaaggtttgatcctcctcattccttgaagtggatcaaatacaagaagcccaaattcaaattccacctacccatgccagctccccttccctggatattaccaccagcattgagccagaaggctaggtgtcctcagcacctttcttcccctaagctctagtgctaatcggtcaccaagccctggcacttctgccaccatttctctcatctaccttctccccactccatgctcttggtcctgcctcatccctggagggctgcctcggcaccctgcctgctctctcagactccatcctctcctgtattgcagctgtgttgagatctgtggtgctggtcacagagcctggctgcagtgagggctcaattgctccatgctggaactggaccagtcctcagagaccatctgatctgctcattctgttgttcaaatggggaaacagaggcccagtgaggcctagcggcttgtttaaggtcacgctatggaagaagtgacttgaactcacttctgattctgaggtgaaggctcttcccattagtgccagggccacacaagtgtttcttgttttgagtgcagatgggtggcttggaagtcagcaggaggcacaggtgtggtgacttgatgggctcagggcccaaagggagggagggcctgggagtggaagatggaacctcattcaagcccgtctctcctttcttctcaccagaaactccccctttctttggacaactggacccccacacctccaccctgtccccatcccttttgctgataatcccatctccttgccctgtaaatgctagggggcccttgatttggggaggaagggaaggctgaagccggtcccggcaccctgagagccccagggccctccaatgccccactccttctccaggtctgccctggcttgctctgtctccctagggcagctggcttttgtcccaggggagcatgggaacagcttgggtgagaatgggggaggggcttcccagcaggtttcacctctcccacctggcataatttctaccctgcacccagtgatgcccaggagccagcacaagaacctctgagctctcctgccggctttccccactgtggggcccacaggatggctgggtgtgctggggaaactgagggagatgacttgtgggtgccagcaccatgggactttgggtgatcttggacctattccttcctccttctaggtgcttcctgagctggcgaaaaggagagctggatgctgggattctataaattcggcggtggatgtgagtctagctacagcatggaccctggccagccctggaatctgagttcagagatctttgaaaaaatgccttccgataactgagcacctactacatgctggacactgcaccaggagatttgtgtgcattccctcattgaatcttacaaccaccctctgggatggtttttgctattaagccgattttatagatgagaatactgagggctagaaaagataagtaccttgtccaaggtgacacggccagtaagctgtggagtctggatttgaactaggctctcttggagtttggagcccggtcttttcatttctggcagagacctgtggcttcagggggcggagcccagcccatgggggaagtaagtccttcctgttagatctgtctgaggagtagtgagtttctcatctaggaaaccatcagcaggccaggctggactgccccatttctagccccctttcttctctgcagactgccctgtttctagccccttttcttctctacccttttctgtagagtgcgttagacccattttacagaaggggactctgagaccctttcttctctgcggggcagggtatgtggttcagacgagccgcttccatccccagttctgtccctaagccctgggtgacctcagcattgagcatcgtctctgagcctcagtttcctgtctatatctagtgccaccaggcatcagaaacgtaagtgcttcaaggatcttgggtgaaaagccgctttagcggcgagcatacactaattaataaaatgccttggccggggctgggcagaggaagtaagcgggcagccgaggtgacagctggagggaggagcgggggtggagccgggggaagggtggggaggggatgggctggagctccgggcagtgtgcgaggcgcacgcacaggagcctgcactctgcgtcccgcaccccagcagccgcgccatgagccgtgagtgcgaccccggtgcccggtggggaattttcttggcctcctggtggagccttgaatgccaggctcagcccctcatctctctcctctgcagggagtctcttgctcyggttcttgctgttcctgctcctgctcccgccgctccccgtcctgctcgcggacccaggggcgcccacgccaggtaggcggccccatccctccccaagggaatccccggtcttgcgcccctggcctggtttcaaccccctcctttcccctccagcgggcccagcttcccctttctgctcgcggtgctgagaaagactgaggctgagtcttttggtgggatgggggctccctgaagcccccccggcggtgtggccttggctaatgggctatctagttctttcaggggaaacagcagactgggatctggtgccaacttggggagaagggacagtccctatccatccccctcacctgttctgggccccagatgtctaagcagcctctgcacccaacaaccccgctgtttcctataggggcctctttgggaggaagccgcaggcaccaagggaaatgagttccctttctccagcctctaaccgtctgggaacccatcctgattcccattgccagtggagaaggtctcccctggtgaagacttcgggagaacatgggagatggaaatacatttaggagccgggatgcttcatctggggtttaagagatccccattgagcaaatgaggaaaccgaggctcagtaggtgccatgattccccaagctcacaaaatacatggtgggcccaggatctgaactcaggtctgtctgcgtccacacacttcgcaaggtctttccacagaaagctgcttctacccacaatggacccggagccactctgggtttcatgggggaggttgatggggaaattccgcccttccctcccccatgcatgtgccaggttccaggtgaaggaattcagctcctcgctcagccaaccttcctcccccagctcgctgcttgtgtgtgtgcgtgtgtgtgagcatgtgtcccagttggatatagtttcctccaccacctagctgtgtaaaatctctaaaatgaggcccagagagggcaggagggagcagagggagtccgcactttctgctgtgatgctctaaggatctggtgcgtgggggaaagaggaaagatatgtacatggattttggatcagaccaagtttcctgaaacgggctttgggtgggtggcatttaggggacccaaagagaggacggagggtgctctaggaaagggattgcgttgaataaaagtctggtttatgggaagaggaggaggaagactcatgtggccagcactttaaagtttacaaaggttggttgtggacatccacctctttggtgctctcaacagccctgccagagagatgcgttagacccagtctacagaaggggactctgaggcccagagggagtgaagccacttgtctgaatcctcacagtgagctggtggtggggagtagaaggggctcttcaggttgcctcgctgacccatcttgtcagtccctggatcagcccagcacttcctctgaggccccatctggcctcatccaggcactcttggtatacaggtcccacccgtctgtattcttttttagtccattcactaaygcacaatgagccatggtctgtgctattttgttttttgccttttctgtttccttttgtataataaatgtttacacggaattgtttttttttatccccaagggttatttatgccagtctttggctggggcctggagacacggagctgggaggagctgacaggctgatggtggagccagaaatgccaacagactgtcatccaaggggaccagggctgtgcggagctcatgggagggagcaggggtatagggagcccagggaagggagcaggggtgtgcggagctcaggggagggagcagctgcctctcagtgcgaagaattgagggaggcttcttggatctgatgacttttggactggacctcgaaggaggtggcgggtgggggaaacactaagagactcgaccaggaaacaccgtaagggtaatgtggagcaggaggctgaggttggatgcgtaatgtggggatgagacyggaggccagaaaactggtaccgaggctcctgcaaggatctaggaaagaacgaatgactggtggagtgcaggggcagaaggtctgggttgccctcatatttccaagtctgcgagtaaactgagggccaagctacttgggcatctgccccaggaagccaaagcctgtcttttrcctctagaggcaaaggagatgaagagatgagggctgcactcacctaagagggcaggcggagggagagaatgctgcttttgcctctctggtgggtgaggagatggaggccagcctggaggcaaggctgtgcygggggcgccctgaatgctcaagtacttcccctctagtctctggacttgactcagtgcccatcttctagatggggatagggcatgacctggcaaccagagctgcatgccaggcagaggagccccaggccagctgaccygggcacatggggcaagatsccagctgtgccaaggctgcccgggtgcctgcacctgctctcgccagcaccagttgggtctgtgggccgggagagggcttccccaccagcaggctcttccagctgctgggcccagttgtctggatctggtgyggtggtgcttaggtgtggggactggggcccaggccaaaccagtcagggttccccaccttttttttttttctctctggctgccaggtccccagagactctctaaatattaytctttaggggatttgggtcctgcctcttcactgggcartcttgcagcctgacacctctgcatcctggaggacttggtgttccctggctgtgcctgtcccctagtcacgctcagtcctggacctggagccctgacttttgggctagggggtgttccttgcccaaacccttggaaaggtcctggaaccaggcagttctggacagtcctcatctgtggggatggggactagcagcttggcctttgggctgcgtgtgtctggyatgcagcgtggtgtgctgatcatctctgcctccgcgtgtcttggggactcagtgagagcaaatgggaaggttctctgctgatggggcagttgtgggagggttgtattgatacaaataatggagagggacagattggctctacccagagtagagggcctggacgtcgaaaggaaggcctcctttagcccgcctgctaaacccccttcatgggatatacagaaaaatgaggctccagaggtgggagggactcacccaagaatgcacagccagtaagagcagccactctctaatacagctctcccaagcaactacttggtgcctggccctgtgctgagtatgggggactcaaagtgaattagacttggtacctgcatctccttggttttctttcttgatgaacaggggtgtcctccactgagcatagaactgagttggcrtgaaaacatgcaggattgaagttagaccgaaggaaggccttcctgtacgaatacttcctaaagatctggttgtggcaggagatggtgatccccctggggtcctggtttcattcgttctggattttcaaggttcactttgaaggaatgtgacaaatccaactcaactgggtcatcctcagtctgcatcaaagcgactctccctttccatcccttccccaaatccagtcctgggtacctccaggagtaggaggaggagggagattaagtcttggctccgcaacttcaaagcagtggggtctgggcaagcctcctgctttctctgggccctacattcctcattatgcaatggggagtctcacctacctctcttagggagtgctggggagataaatgagcgtgggtgtggaaggttgtggacttggtcggctggagccctggctttctggctgggctgtgatggtcaggctgtagtctagtggcacccagtctcctctccgcccaccctgacaccttggggcaccagcggcaggcccactgttgtccttcctgggagaacttttcctgccccagagcagtggtgtttatggaaagaacgtggcgggggaggcgggaggggggaagctggatgggccggactgggagggaggagcctcagctcccgcacagcctctcttggcagggagggtgtgggcagccgttccagcttcagcgtctggagcttgtggctcttctgcctgccgaggcagagctctagggccatggcgggaggccttccggctccacctcagacagctgttgagggcctggaagatgagggactccttttggtcaggctggaggtgaccaatctcctcacttcattttatttattccacaaacattcgttaagctctggctaccacatctggatcccagacctggttaagccccaactgtgtgcatagcctgtgctgggggaagagaaagccttaagggaagcgggggtcccttctcctggaagcttatggtggagaagagcaggttgaattggaacccggagccagggcaagggagagtgggaggagggagtgtggacatttggggaagacttcttggggaggcaaggcgtgggctcagctgatttggaggaaatgtattaaggaggctaacagcctggatgaaggatggagatgctgagggtttggggctaagggaggggctggcgcagaatgttggagctgcacggacctctggagttcattttgagatccctgctgtggcagggatggggaaattgagcctaggggaggcctaacccctgtgcccttagagtggtagaactagaccgtgagtcctagcggaccttgtgtgccagggttgggagctgggcagtgggtgctacaggggctcctgggcaggtgagagagccaggccagcaggaggggcaagaagaagagttctagcagggtgacaagtcctttcttgggggaaccagacctctgagccagcacgggggctgctccagaggcttcttggcctttctgggcctgtggctgggggaggcgggggctggggtactgccaggccctttccctggatcctgcctgccaggtttgcctgtggctgcctgataaagcctttttgtccagccttcttcccctgacccctccctcctacacccctgctggggccattgtggggctgtggggagttgccagggcttaagcaaaactatttgcatgattcttgtggtccttgcttgtgtgtgtgtgtgtgtgtgtgtgtgtgtgtgtgtgtgtgtgtgtatttgaggtggtgttgccgtcttcgaagtggggaccaagaggactctgctgcccaggtcaagccctgtgctgtgaagtgaggagtgaggagactgagaccagggcaggggatagggggcaggtcttgcccagggtcatgctctctgatcctagcaccctgagatgacagcatttcaccctcagctgctctggcctttcactacccttttgacctgcaataaccagttgcacaaagaatccatattccctgtaacgttggctctgagcccagataaggaagtatgtttgcagaaaggagcccggcgttttctgtgtaaggtcagagatggagcctcctgccaggcgctaggagtttttggtctgcccagctctgttctgtttccttggccaagttatcacctgtccctgaacctcagtttccttcactgaacagggtggtgggggtgatggtggatcctactgaacctgaggagtctgtaactttgctgctaaagaatcactgaggcagatttagcaagggggtggtggtctgagggatctgggttagatgccaagagggatttccttatagagtttctccaggaggcagcagggcggatgccagagctccatgcaccctcccaggagattttctagccctatctctcctattcccttggtctgtgaccttcktctggatcctagagcccagaccccaccctgatgtgggccaagtctgattccatcaggaatgggggctraggcagctgagaccttggagtccccctcctcctgcacacccaccctctgtccccagggttctggaaaacttctttccttagacttggctgctgaggctgtgggggtggagtggaagtgaagggatgggcatttggtctggtgagacttgtggggtgataggtctggctttccctttttctggcttcaatttccccatctgcaatgtggacattatgatacctgctcttctctaccttctgcagaaatggaggaatggtgagggatctcgttttcctagtgttcatggggtggtggtctgggagaagtccccgtcctcgtcctcgtcccttttctgaccgcccccccaccccccgccccggcctgctcttgctactgaactctgactaggcaggaagtgaacgctctagaagcccgtggctgaggagttttatcagctctttcttaactttcagtgtcacagccggggaatcttctcctgccgccgtttggtggcaatagggagggagggggcgcttcccctgggggcctgatgtgggctaggctggagttccagagcagggcctggaaatgtcaggatgggtggtttatgttcacagaggtgggaacaggggtccccttgggggaaccctgaagccctggcacccagtgattcaggacggagctgcgacttaagtccatgcctctggcccctcattcccccatcaggggctagatgggggtcaggaggccaccctagcatggtctctgacctccatttctcacccacagtgaatccctgttgttactatccatgccarcaccagggcatctgtgtccgcttcggccttgaccgctaccagtgtgactgcacccgcacgggctattccggccccaactgcaccatccgtgagctgggccttcagccctcactccttccrtcttgagcccttctgctccccgggccctttctcctagaccctaacttcctaccctcctctctgaccatggccctgttctccttccttgcctggttctgcccctctccctgacctggcttcagcatgagctctcgctcttggtccaccctcactccctgcttctgagttccatggtgagtcttcaccacatgccctggcccctgtcctcacgcccggttctgtctctgtcatgtgtcattgctcccaaggttccatccttacccacttccccataggtgctactctgttccaccctggcccttgtcctcagtgccccatcttccaccctggctacttctggttctggtaggagggaccaactgagtgactsccattgcccctgcagctggcctgtggacctggctccggaattcactgcggcccagcccctctttcacccacttcctgctcactcacgggcgctggttctgggagtttgtcaatgccaccttcatccragagatgctcatgcgcctggtactcacaggtgggtgtggggcagggccccctgacctgggggagcaagcaagcctgctagtccttttggattcttggcatctgataagggtagtgggtggggagagtctatgatgcctgataaaataagccccaacccaggaggaggcaagaactgggatggagctgggggtggaaacacccttgtcaccgttatttttgctctctgcagtgcgctccaaccttatccccagtccccccacctacaactcagcacatgactacatcagctgggagtctttctccaacgtgagctattacactcgtattctgccctctgtgcctaaagattgccccacacccatgggaaccaaaggtaaaatggggtgaggagctgggcctggggattacaggaggygctcagttcttctctttgggaaaaatcaggcgaagaacaattattgacccaattctgcagatggctagaccaaggcaagacatatgacatgtccagagcctgggctgagaacaggcaagggcagcagagggtcttgcctgaggtcacctagagtcagaccaatgtttccatagttccagggtgcctctttgcttgatccttttctaatgatcagttgggtcctgccggggtggaagtgacttagaagttgagatgtaggaaagaatagtgagctatttattgggtgctgtctctgtgtttgggtctttacagatgtaaatagttttacatgcttcaccagtgtaaggtacaaataagccacatttttttctttcgttactcaagacttcacttagccacactggcaggggtcttccttgtaagaccttcccatgccacctgtaattatccaaaaacctgggatattattcatttcagacccatcagttcagcatcaagtacagagaggacaagagaggctcatcagtccactgctgctatactccagttcctgccacatggtggcactgttgaatgccagtcctgtgcagcctcatggttatgtgcttttttgggttcaaaaccttgcaccatgtccctgcttgggtctcaagagcactactgtgacggttttccatcatatggttagctgcttttcccaaagcatgactattctaccaggatagctgagtcttgccaactttgctgaaatcatgcttgcccagtgtcagtgagtgatgattccaaattacggttgacagatcactccctctaacttcccttttggtggattttctttaggggtacttgatattttttcctgccagaggaacccagtcagccatcttaatccaagtaatttccattgatcttgaaccttcaacatcagggctcacatcttgatgcattgtgaagagatgcctttaccagaactcaaaaaattctattcctttctgtgagggcaattgggtgacaactcatttgacactgacataattaaggaaggcctctcaatacttattctaaggatgacttgtctttatgccagacatagaaagattggcatcatttaaaataggttgacacacctattttaaggggagcaagcaagcctgctagtccttttggactcttggcatctgataagggtagtgggtggggagagtctatgatgcctgataggtggtggtgtggtggcacacgtctgtaatcccagcactttgggaggttggggtgggtggattgcttgagctcaggagttcaagtccaacctggatgacatggtgagacaccttgtctacaaaagaatacaaaagttagctgggtgaagttgtgtgtgcctgtagtcccagctactcaggaggctaaggtgggtggatcaattgagcccaggaggtcgaggctgtagtgagccataattgcggcactgcactctggcctgggcaatagagtgagaccctgtctcaaaaatwaataaataaataaataaataaataaataaataaataaataggttggcaaactacagcctgcaggccaaattcggcccacctctccatttttgtaaataaagttttattggaacacagccacacacatttgtttatgtgtcatctgtgactgctttcccgctacaatagcaaaaactgaatagatgtgacatgtctgtatggtctgcaaagcctaaaatgtttactatctggctttttccagaaaaagcttgctgacctatgatttaaaaaattctacccactggttctctgccatgcttacattatctctcgcagtcctcagattcactgtatcaaatgggtatcatttgcccctttttaaagatggagaaattgacacccagagagatgagatgayttatctgtattcacacagctagcaaatagcatagtcagttgcaaacacaggctaccttgactcagggcaagggagttcatgtttgtttttttctgtttctttatttctttttggtgaaatgtttcattatggaaaaattgcaaagatacacaaaagttgagagaaaagcagaatgaactatgtacccatctttcagtttcaacatttacccacagtttcttcatcttatttcatttstcccctctcatatttttataaagtattttaaatcaaattctaaaaatcatgccacttaaaattctaaaaatcatgccacttcacccataaatacttctagggtcttttggtagagagtgggttacttggtggtggtggggaggtggtcctgaggaggccactctgggcttcctgcttgggccagtttgcctggtgagcccagatgtccccagggcagcaagatccagataggagaagctactgctgtttcctaccccccaaccagggaagaagcagttgccagatgcccagctcctggcccgccgcttcctgctcaggaggamgttcatacctgacccccaaggcaccaacctcatgtttgccttctttgcacaacacttcacccaccagttcttcaaaacttctggmaagatgggtcctggcttcaccaaggccttgggccatggggtgagtacctaggaggggctcaggactgctctggacctaatttggcacgcgtatgtcatcgacagtgggccggcaccctggtgacctgagggaacccctctctgtccacaggtagacctcggccacatttatggagacaatmtggagcgtcagtatcaactgcggctctttaaggatgggaaactcaagtaccaggtagtgctgrgccagggggtagggcagagggaggggtctcccatggtcttccctggcaaagactgcttggggcgggggtctgggtcatgtcctgagagggccaaccacgggagtgggargcttgtgccaggagcgacagtatacgctgggaggaggcagcaggtatgagaagccagggaggagcagacgtggcctcccatgtcagccagggaggtggattttggagctcaacaggagatgaacatttgtagtctgcatttatttatttaattattccacaatattaattggacacgagaatatacctggcacaggtgattgagtagtgaccattatagttaatgggccctgccctcaaaaaaccacaggcaaactctaggatgttcattctatgagggcttttgtttaaatcagaacggtccaacagaaatataatgtgaaccacatacatagttaaaattttctaatgtccatattaaaagagggaaaaagaaacaggtgaaatgattttaataatacattttacttaatgcaatatgtccaggtaattagcattttagcatgtaatcaatacattattaataaaatatgtcacattcttttttcatgctgaagcttcaaaatctggtgtatatttcacactcacagggcatctcaatttggatgctctattttcactggagtgatctaatctgtattaagatttcataaaatgtacagctgaataagtagagtgacatgtccgacttgttccacgcatacttaaaggttttccaatagctgaagtatcagttttaaaattcaaatagaaattaagataaacctaaataaaataaattaagtaacattcagttcttcattcacactagccaaatttctagtgctcagtagctacacgtggctagtggctaccatattggatcgtacaaatcttaggcaagcaccaaaacaaagtttgatgctgaatctttagggctaagaacagtacttggcatgtagtagtctcttggcatgtatttactgaatgaatgaagaagctgccatataattaggtacacttgtagctgccaccaaggagaagctgtgagtgccactagagtgtttggatgatgggtaaaacttccctaggaagttacaaataaacccagagttgcataaaggatgaggaggagttagggatgctaagaatgggagagggctttccaggtagagggtttagcaagtacaaaagcttagaggtggagaacagcttggtgacttggagggagtgtaaaaatgggagcgtttgctgagcctagtgatggagcgtaagaatgactttacaggaaggtggagatgtctgtggggrccgtgttaaggaattctactttctgccaagagcagagagagtatttggaaaggttttaagtcagctcatgatgcaagatttgttgtttttttttttttaagttttttttttcttttttttttttttcttttttgcttgggtgcagtgcagagactggcctgtctggggataggagtggaaatagggagcccacttagggaaaggagtcagagtggaagatgagcggrggttgcttgaggtagtgrtggtagagatggagagcaggggactgattttaagagacattttggaggtggaatcaacagccttggctgaggggaactggcagctggaggcaggagtgggagggagttggttgtgggcagctgygggtgacccccaaccccaggttgccaggtggccccatcccacaggtgctggatggagaaatgtacccgccctcggtagaagaggcgcctgtgttgatgcactacccccgaggcatcccgccccagagccagatggctgtgggccaggaggtgtttgggctgcttcctgggctcatgctgtatgccacgctctggctacgtgagcacaaccgtgtgtgtgacctgctgaaggcygagcaccccacctggggcgatgagcagcttttccagacgacccgcctcatcctcataggtgaggactccagacctgccctgccctggaaggtcattccctccatcctgagaagttgggggcgggggggtacttagaggtggaggctgggattagaatcctcacccttctgcttagtggctagaagaccttgagcaggcccctcaacctctgtgagcctcggtctccaaatctgtacgttggggtgaacgatgattgtaaggatttattgagatcatgaatgggaaggcaactagcacatagcaggccttcagaaaatagatgactgtgatggttgattattagctgggtgactcagcacatttgattagccaccctgagtctcggtttccccygtgtgctgcgcccggatgcatacttgtggtccccagcacgtgcagggtcaaactgtaacttgcccggccttcaggaatcttcatgttcccttccctgcatgtrtctaccttcctgcagtttggtagcttctaggtgactcagggacaggatatttttgtgttccctatgggggcgagtctgcaacctaaaatgtcagatggtttcctgcctgggagcttggcccctgacatccctgtccagaccatgttcgctctgagtcaccagtaactcccttcccccacctctggcaccactgggcatggctggtcccaattatagagcctaattcactggagccatgaagagccaggcattgggaataggaacagtcattagagggaagaggggctggttctgaagtttcagcgttgcaaagaccttgacctgagagagctggaggctgtccagcacactggctggagatgaagctgtgaccaaaggcaggaccctagggcaccatttaactcccctacaacctcatgagcygggtatgattaccctgtgaaaatcaagattcagagaggtgaagtgaaytctccagggacactcagcagatggagacttgaggtckggttgccaccaaaatctatgctacttccactccatcacaaagggggctcttcttgaatgggaaggggttgcaaacctgagtctgatctgtgacatgtgagtattggaaagggattccccctcgcgtctacacttagtattcctacttttggctgacatatatggacaccccgtcttatgccaggcactgtgccagcagttttgctgtattcattgtctacttctctcaacaaccctaatatagtattgcattgatgttattattattattatttgagatggagtcttgttctgttgcccacacagtagtgcaatggcgtgatcttggctcactgcaacctctgcctcccgggttcgagcaattctcgtgtctcagcctcccgagtagctgggattacaggtgcccgccaccatgcctggctaatttttgtatttttagtagagacagggttttgccatgttggccaggmtgatcttgaactsctgacctcaggtgatccacccgccttggcatcccaaagttctgggtttataggcatgagccacagcgcctggccgcactgatattattataacacacattttacagttaaggaaagtgagattctgagagattaagtaactcagcccaagctcaggtggctggaaatggtaaagccaagatttgaatccaggtctgctgatcccacagtctgtagctccaggtcgatttccaaaagccaatttgtctaatggctaattggcctgcatatcagtttctttcaatatctagttgcccagttttaattttgttacagaatgttcaatttgcattttccctggctttttgctttctagctggttatagctacaaatggggcagaggaaaaacttatttataagaatcctgttatataagaacatataggaaatatgttttttgaaatatatttagggctaggctccccttctgtcctcagtattctcttttgccactgcagcagctctgagtggtctccttgaagtccccctctatcaccgagggtgtcagcatgatgacagctctcaccagtaaatcctccacttttccatcttttgtagtctctccaccttcttttaatgggcttcaggagggaggtcataagaccaattcttggacacctcctttgcatgtcctgcttagctgggcctagaacctccctctgaaatgtgggagtagctggtgctcttgtcttgagacctcagtcaaaatagaccaaaagttctattttcacatcctgttacaaagagacaaaatggaagaggccaaacaaaattaaacatcaacagcaaggccaggtgtggtggctcacacttgcaattccagggcttttgggaggctgaggtgagagaagtgcttgagacttgcagttcaagaccagcctggataacatagtgagaccccatctcttaaaaaaaaaaaaaaagaaagaaagaaagctgggtgtggtggtacacctgtggtcccagctacttgggaggctgaggtgggaggattgcttgagcccgggaaagttcaggctgaagtgagctgtaattataccattgcgctccagcttgggtgacagaccaagaccttgtctgtaaaaataaaaataaacatcaacagcaacaacaacaataaagagaccaaaagcaagcacctctcatgaactggcctgctttccaagctgggcatctaaatcactgtgcttggctgaccctatttccaatcctgccctgcccaggggagaccatcaagattgtcatcgaggagtacgtgcagcagctgagtggctatttcctgcagctgaratttgacccagagctgctgttcggtgtccagttccaataccgcaaccgcattgccatggagttcaaccatctctaccactggcaccccctcatgcctgactccttcaaggtgggctcccaggagtacagctacgagcagttcttgttcaacacctccatgttggtggactatggggttgaggccctggtggatgccttctctcgccagattgctggccgggtaagccccagaggagtgctggtgagggcaggtgggctgagggatccagcagacctgggtccaaattccaggttcttcttctgtaaaatggggctgatgtcacttctacagggcagttgtaagcattcctgtgtgagttcattggttcatttgtccattccacaataccagacattactccaggtactggagatgtagtgggaacaagacttttgtggttcttggctcatcttttagtgctcccaccctagaaagtgatggcagtcatacgacagctgacagcattagggcccttactgcgtgtcaggcactgttctaagagcttctcctatgttatcagaattctaagagtatgttataaaccatagtagaaaagcccaccatgctctgggagtcaggaagggacatctgacccagagttgcgggttatgggaaaagaagggatgtccaagcagaaattggaaggagggatakagattkcccagggtaagaggtggtgttagtggcaggggatggctgtgttccagatagagaggacggcatgggtgaaaggcatggaagtcagaggacatggcagtttgaggaacagaaggacattcagggcatggtaatgtatgtaacagtgcccgcctatggtgtttattaaatcataagcctccgctctgggctgaattgtggctcttttaaagttcgtatgttgaaatcctaaccgccagaaccttagtatgtgactgcatttggagacaaggtctttaaagaggtaattaagtttaattgaggtcattaggctgggccctaatccagtgtgacttataagaagaagagattaggtcacacacacagagggaaggccacatgaagatgtagggagaagaaagccatctacaagccaaggaaagaggcctcaggagataccaaccctgctgacaccttgatcttgaacctctggtctccagacrgaggaaataatttctattgtttgagccactcattctgtggtacattgtcatggcagccctagcaaacaaacacattctctttccctggaattcccagccaacgccttcctcaatctccccttctccacattcggaagctcccatctgcttcatcgcagtctctggctcccctgttgcctcacagtcctctgcttctctctaatccttgtccctaaaccctgtcatgaagctgtggcacacatggatttccatttccttctggtaatttgactgaaattagcatttgctgccccggtgggcagctgctggctgctttatggcctctttgtcggtttctttatggttctttgtggggacacaagacatgaacagagacaatagcctttgtgtgaggctggatggttttcagaacgttttcaaggaatgaccatgatgatgtacgtgaaaagccccggcgtcgtacctggcacaaggcagaaaggccgcagagatgtatggactgtcaagattttttttcttttttctttttttttaaatagagatggggttttgccatattgcccaggctggtcttgaactcctgggctcaagcgatctgcccgcctaggcctctcaaggtgctgggattataggcgactctcaggatattaagaagagtgagtgatgataagacagggcttcccctgataaccattgtccatggctaccctctcaggggttcccatgtgaccaatactgagataacagctttgcatagtttatcccatttaaattgaccacagccatatcaggtagatgctcttcccttccccatttttacatatgcgggaactcaaacttagcttgaatagctgcccaaggtccctatattagtttcctcaggctgctgcaacaaagtaccacaaactgggaagctcrgagcaacagatggaggctagaagtctgaattcaaggtgtcagcagtgccatgttctctctcaaggctctatgcctccttggcatctggtggtggccgacagtccctggcattcctcagcttgcagaggcatcgctctagtctctgcctttatcatcctgtggtgctctccctgaacttgtctttcctcattttataaagacaccagttattggattggagcccaccctaatccagtaggatctcatcttaacttgattacttttgcaaagacttcatttccaaataaggatgcattcacggatgcagagagttagggcttcaacacatatttaatattttagggaacacaattcaaccctcaacagccccacagcttgtaaagctgtaattggcaccatcctctgcttgctttgctcatattatttcatccaaccatgcctttcttttttgcccaattatagttgttgatcaaaatgactatctcttaagcatgaacgttattatttcatcctaagcaccagagctttcttttctttcctttttttttttttttttttgagatacartcttgctctcttgcctgggctggagtgcagtggtgtgatttyggctcactgyaacctctatctcctgggttcaagtgattcacctgcctcagyctcccaaatagctgggattacwggcacctgccaccacgcccagctaatttttgtatttttagtagagacgagtctttgccatgttggccaggctggtcttgaactcctggcctcaagtgatccacccgcctcggcctcctaaggtgctgggattacaggcacaagccactgtgcctggtcagcaccagagctttctttagactaatgcgccttaactgttagtaatcagaatctttttctgcagcttttttatcttgccaggttacctgggctttgagttctattttccctcccttcacagggggttacactacctcttggtgtaattcaacggtctggggagcagtgtgagccacaaaagaggtcctcttggcccattccacacttcaaagatgaggaagctgccggatgtggtggttcatgcctgtaatcccggcagtttgggaggctgtggtgggaggatcatttgagaccaggagtttgagaccagcctgggcaatatagtgagacctcacctctacaaaaataaaataaaacaaaattagccaggcatggtggcacgtgtctgtagtcctagctacttgagaagctgaggtgggaggattgcttgagcctgaggaagttgaggctacactgagtcaagatcatgccactgcactccagccagggcaacagagtgagacagtgtctaaaaaaaaacccacaaaaaaaaaatgaggaagctgagactcagaggggcttcctgagagagcatgacagcagcaggcccggggcaggtctgcagcatcacaactgctaggctgcccaacactctccatcctagctcagaagggactcccactggaagctcttgtcccaggaacttacccaggctccaggacagcctggcctggctcccagaccactgctgtgcttctctctcggcagatcggtgggggcaggaacatggaccaccacrtcctgcatgtggctgtggatgtcatcagggagtctcgggagatgcggctgcagcccttcaatgagtaccgcragaggtttggcatgaaaccctacacctcyttccaggagctcgtaggtgagcagctgtttcctggatgcagtccctgcccttgagggactggcagcaaagtcagggagacatcaaggaaatagaacgggacaatacatgcggcaatgtgtaacaaccagacttataatgggcgtggaagtgctgtgccagggtggtaaataagcctgcttggggagagaaggtgacttttcagctgggtttggagaacaaatggcattttcagtgggagaagagagggaggagtgttttaggcagagcaatagaaagtacaaaggctgccgggcaaggtggctcgcgcctgtaatcctagcactttgggaggctcaggcgggtggatcacgaggtcaggaaatcgagaccatcctggctaacacgatgaaaccccgtctctactaaaaatacaaaaaattagccgggcatggaggcaggcgcctgtagtcccagctactcgggaggctgaggcaggagaatggtgtgaacctgggaggcagagcttgcagtgagctgagattgcgccactgcactccagcctgggcgacagagcgagacaccatctcaaaaaaaagaaagtacaaaggcatagaggtcagacagcaggtatctagggaaacagtcatagatgtggctggggcaaggagcttatgttgtgggaatgattagtgatgggaggttggggccaaaccgtgtagaatcttggttttcatactaaatattttgagttttatttggtctagtgctttctaagtacccacttacgggccagctgcataaaaatcatttagaaagctgattaagataccaaatctcagatgcctctcctacggattctgattcaaccagcctgggtggtgcccaagaatctgcgtattcatatgaataaagtatatatacatatatatgaatatatatatgaatagagtatatatacatatatatcaatatatacatatacatatcaatacatatatacatatacacacacatatatatgtgtgtgtatatatatactatatatatacatatatatatatacatatatatatatacatatatatatacatatatatatacatatatatatatatatacatatatatatatatatttcccccaatatcctcagatgttgggcagccaagtttccagcccttgtcacatacaatggggagccactgaagcaggtgtgacatggcccatgagagttcccagtggaggatggatttgaggaactgggcagggaagcagggaagctccatatttgtctccccttggccacatgaacatgtggrtattgcagagtggagcagattctgtgcatgagctccttgtgatcctggaacagcatcttattctttactctcccatgacaaatggtccccgggggcagaaggaacactgccactgaatttctgtgtgagctcggacatgttacatctttgagctctagtagtaaaagggcttggcccaggctaaggtcttgaaatctgtctgtgaaggaagccagatggggagcattctcccttctgtgatgatcaggtaattagggcccagagttgctcaaggttataggctgtttggtggcagatctaggcccctgactttctctttagtagcattttccttccctagacccagtccctgaggaggggcaatttgtgcttttcctcttgacccttttccccagtgccaaccatgccaaattctagggcacatgctcagttgctcaagttagtctcctggagtccctattatccccagaaaaaggtggacctggaagggtcccgccccaggttgaccttaatggcatcatggatctgaygctagcatttccccttatctccttgtaggagagaaggagatggcagcagagttggaggaattgtatggagacattgatgcrttggagttctacccyggactgcttcttgaaaagtgccatccaaactctatctttggggagagtatgatagagattggggctcccttttccctcaagggtctcctagggaatcccatctgttctccggagtactggaagccgagcacatttggcggcgaggtgggctttaacattgtcaagacggccacactgaagaagctggtctgcctcaacaccaagacctgtccctacgtttccttccgtgtgccggatgccagtcaggatgatgggcctgctgtggagcgaccatccacagagctctgaggggcaggaaagcagcattctggaggggagagctttgtgcttgtcattccagagtgctgaggccagggctgatggtcttaaatgctcattttctggtttggcatggtgagtgttggggytgacatttagaactttaagtctcacccattatctggaatatygtgattctgtttattcttccagaatgctgaactccttgttagcccttcagattgttaggagtggttctcatttggtctgccagaatackgggttcttagttgacaacctagaatgtcagatttctggttgatttgtaacacagtcattctaggatgtggagctactgatgaaatctgctagaaagttagggggttcttattttgcattccagaatcttgactttctgattggtgattcaaagtgttgtgttcctggctgatgatccagaacagtggctcgtatcccaaatctgtcagcatctggctgtctagaatgtggatttgattcattttcctgttcagtgagatatcatagagacggagatcctaaggtccaacaagaatgcattccctgaatctgtgcctgcactgagagggcaaggargtggggtgttcttcttgggacccccactaagaccctggtctgaggatgtagagagaacaggtgggctgtattcacgccattggttggaagctaccagagctctatccccatccaggtcttgactcatggcagctgtttctcatgaagctaataaaattcgctttctaaagttacctgttatatatctcttttggtcccatcctctaaagcagaggcaacactggaacatggctagcctttcttgtagccatggctgggcgtgctagaggttgcagcatgagactttctgctgggatccttgggcccatcactgtatagacatgctaccactggtacttcctttctccctgcgggccaggcactgcccttttcaggaagctctcttaaaatacccattgccccagacctggaagatataacattcagttcccaccatctgattaaaacaacttcctcccttacagagcatacaacagagggggcacccggggaggagagcacatactgtgttccaatttcacgcttttaattctcatttgttctcacaccaacagtgtgaagtgcgtggtataatctccatttcaaaaccaaggaagcagcctcagagtggtcgagtgacacacctcacgcaggctgagtccagagcttgtgctcctcttgattcctggtttgactcagttccaggcctgatcttgcctgtctggctcagggtcaaagacagaatggtggagtgtagcctccacctgatattcaggctactcattcagtcccaaatatgtattttcctaagtgtttactatgtgccagttcctgtaacaggtgtggggacacagcagtgagtaatcaatacagacaaggttctgcccttatggagctcacactccagtggcagacaaacagaccataaataaggaaacgatgaaataagatatatacaaggtgagtgtgacttcccttctaaccccctctgctctgtcctcccctattgcgctctcaagaccagagacccaacagcagtgatctcagggcagacagccctccactccagctctgagacccttttctcaggacctctgtaggcagcagagagagaggacagaggggtaagatgaggggttgagggaaggttcttcatgatccacactttgggcttagtatttctcaggaagagctatggcccagaaacaacaggggaaactagagttcggtctgacagtccttggggttaagtctcctgtcttatggtccagaaactcctgtttctccttagttggctggaaactgctcccatcattccttctggcctctgctgaatgcagggaatgcaatccttccctgctcttgcagttgctctgacgtagaaagatccttcgggtgctggaagtctccatgaagagcttgtgtcctgtcctttcttgcagattctatttcccctcttctgctaatacctcttactttgcttgagaatcctctcctttcttattaatttcagtcttggtggttctatcaggggtgcattctggccaaggggtgggcctgtgaatcaatcctgggcaatcagacaccctctccttaaaaactggcccgtggagactgagatcactgactctgactcatccccacagctggctctgacaagatggtccatttgttcctgcttccgagatccccagggcagcctggatccctgcccttctcaagactttagcttttccttccatccggtggcctattccaggaattcctcttttgcttaaatcagttggagtttgtgtctgttgcttgtaatmaagcctttatggctgctgggctgagtgacacaagcactttaatggcctggagggacttttaatcagtgaagatgcaatcagacaagtgttttggaaagagcaccctcgagaagggtggatgacagggcagagcaggaaggacaggaagctggcagaacggaggaggctgcagccgtggtccaaccaggagctgatggcagctggggctaggggaagggctttgagggtggaaggatgggatgggttccagaggtattcctctcttaaatgcaagtgcctagattaggtagactttgcttagtattgacaackgcacatgaaagttttgcaaagggaaacaggctaaatgcaccaagaaagcttcttcagagtgaagaatcttaatgcttgtaatttaaacatttgttcctggagttttgatttggtggatgtgatggttggttttatttgtcagtttggttgggctatagcacacagttatttaatcaaacagtaatctaggtgtggctgtgaaggtatkttgtagatgtgattaacatctacaatcagttgactttaagtgaaagagattacttaaataatttgggtgagctgcacctgattagttgaaaggcctcaagaacaaacactgcagtttcctggaaaagaagaaactttgcctcaagactatagccatcgactcctgcctgagtttccagcctgctagtctgccctatggatttgaagtttgccaaccccaacaattgtgtgaattaatttctaaaaataaagctatatacagccatcctttggtatttgtgggggatttgtttcaggatctctacagataccaaaatctgtggttcctcaagtcctttatatgaagtggtatagtatttgcatataacctatgtgcaatctcctgtataacttcaatcatctctagattacttataatacctaatacagtgtaaatgctagttgttatactgtattttttctttgtattatttttattgtatttgaatattttgatctgcatttggttgaattcacagatatggaacccatggatatggaggatatgtgcacatatattcaggactgaatatatatattatacatatatatacacacagaactgaatatatatatatatatatacacacacacgactgaatatatatatatatatatatatatatacacacacaggactgaatatatatatatatatacacaggactgaatatatatatatatatacaagactgaatatatatatacatatacaagactatatatatatattcaagactgactatatatatattcaaggctgactatatatattcaagactgactatatatatattcaagactgactatatatatatattcaagactgactctctctctatatattcaagactgaatatatatatatatatatttctatctctctaataatacaagaacagaaaaccaaatactgcatgttctcacttatgcgtgggagatgaatgatgagaatacgtggacatatggtggggaacaacacatgctgaggcctgtcggagggtgggaggtgggccatcaggaagaatagctaatgttaatacctagctgatgggatgatctgtgcagcaaactaccatggcacacgtttacctgtgtaacaaacctgcacatcctacacgtgtaaccaatatatgtatattattattcaagttccaataatcaaataatacacaaaccactgtattatttgattattggaaatcaaataataataataataataataataataataataataatatacatatattctgttggttctaattctctggagaaccccgactaatacaatgggtgattcattcaggactctcaatgcaaacaacagaacattctctagcctgtataagcaggaaggaatttattataggacattacatagctcatggagccactgggaggaccagggaattaggcttggagggtttgcacctaggaatggtggccactgtccagtggagatgcctctactactgccatggacacagcatctcaaatgacacctttgctgcccaaaccccactactgctgccttccaaaacaggctgcttctacagccacttttgctggaaaatggaatctgtgtgatacttgcttcctctcttttctctacttagaattaaaattatctttattttgtgtcggattggtggagcccagctcatgtgtctgtactgcagctacaagaaagaatggaaagtgagttttctggtttgtgccttgaaaaggaggaacccatgataaggaaaattcctcatacatagggaaggtgttcaaaggggctgggaaacgtggaaagtctgcttcagtgaatctgaattttcttagttctgttctgcctctgtgggccctatccctagaatgttacaaagaccatcacaatggccttactgttgacctggtagcagctcgatatagttgcaagcaaagagcttaagaagtgaagttatgtaattatagaacaacagagaaacaaagactgttgggtacacacagtccactcttttagtaatttttgagttaaaaaaagtgtcagaaacgcaggaggcagagcaagaaggcagaatagaagcttctaccaattgtcttccccacaggaacaccaaatttaacaactgtctacacaaaaaatgcaccttcattagaaccaaaattcaagtgaatgattgtagtacctggttttaactttatattactgaaagaggcactgaggagggtaggaaggatggtcttgaattgccagagccatccctccccgatccctggcagcagccacatggcacagagaatctgtgtagggagagtgtagtggttgtaggactttgtgttagaactcagtgttgccttgttacactggaaagcaacaccaggcagaactcagctaatacccatgagggagaatttagatcagccctagccagaggggaagcatccatcccagttgctgaatgggctaaagggctctggggttctaaataaacttgaaaggcagtataggccacaaggattacaactcctaggaaagtctgatctgcgcttggagccagtggacttgaggggcatgtgacctgctgcgatagccaagggagtgcttgtgccacccctctcccaaccctaggcagtgcaactcacagctctcaaagagactccttccttcagcttgaggagagaagagtaaagaggacttgtcttgccacttggataccagctcagccacagtagtttagggcaccgggcagagtcctgaggcacccattccaggacctaacttccagatgacatttctagacatatcctgggcttatatgggccatataaggcagaagggaacctgttgccttgaatgaaaggatctagtcctgatagtattcaccacctgctgactaaagtgcccttgggccctgaataatcagcagcagtagccaggtagtacacactatggcccttgagtgagattctgagatgtgctgacttcaggtgtgacccagcacattcccagctgtggtggctatggggagagactccttctacttgagaaaagcagggggaaaagtaaaggggatttcatcttgcagcttaggtactagctcggccacagtggggcagagcaccaagtgggctctcagtatccctgattccaggccttggctctcgcacagcatttctggacctgacctgggccagaggggagaccactgccctgatacgtgagtcctaggtctggcagcattcaccacaagcttcctgaagagctcttggccttgtgtgaacattggtggtagccaggcagtactccccatgggcctgtggtggtgctggccatggggagagactcctctgcctgtgggaaggggagggatgagtgggaaagacttgacttgtagctttgtctgcagctcagctgcagtagaatagaacacaaggcagattcttaagattttcaactccaggctctggtccccaaacagcatctacggacctgcttgggggaactcgctgccctgaagggaaggacacaagcttggctgacttactgcctgctaactgcaaagccctaaagccttgagtaaacaaaggtggtggtagccaggtagtggttataatgggccttgggtaagaaacagtgctgtgctggcttcaggtctgacctagtgcagtcccagtggtggtggccacaggggtgcttgtgccacccctcccccagttgtaggcagctcagcacagagacagagagactctgtctgtttgggagaaagtaagggaagagaacaagaatatctgcctggtaatccagacaattcttccagatcttatccaagaccatcaagtggtacctctacaagtctgcaagagccacagcattactgggcttggggtgcctcctaatgctgatatgactatggtgaccaaaaacttagatgacaacacccaagtcccttcgaatacctggaaagccttcccaagaaggctttcccaagaagcccagactgcaaagactaccacaaatatctaacttttcaatgtccagacaccagtgaacatccacaagcatcaataccactcaagaaaacatgaccttactaaacaaactaaataagtcatcagggatttatcctagagagatagaaatatgtgatctttctctatctctcagagagaggtcatatatctacacctctaggcttttcagacagagaatttgaaatagctattttgaggaaactcagtgaaatacaagataatacagagaaggaattcagaatcctatcagatcaatttaaccaagatattgaaataattaaaaagaatcaagccgaaattctgaagctgaaaaatgcaactgactactaaagaatgcatcagagtctcttaatagcagaattgatcaaagagaagaaagaattagtaacatttctatgtgaaaacagtgaaaattctgaaaatagtaatcccatttacgatagctacaaataaaattaagtacctggaaattaatcaaagaagtgaaagatcttgacaatggaaaataaaacactatgaaagaaattggagaggacacacgaaaaacagaaaaatattccatattcatagattggaagaatcaacattgttaaaatgtccatacaacccaaagcagtctatagattcaatacaatccttatcaaaataccaatgacattctccatataaacagaaaaaacaatcctagaatttatagagaaccacgaaagacccagaatagccaaagctatcctaagcaaaaagaacaaaactggaggaatcgcattacctgacttaaaattatactacagagatatagtaaccaaaatagcattatactggcataaaaacagacacatagactaatgaaacagactactgaacccagaaatagatctatacacctacaggaactcatttttgataaagttgttaagaacatacattgggaaaaggatagttaatcttcaataaatgatgctgggaaaactgaatatccatatgcagaagaatgaaactagactcctatctcttgccatatacaaaaataaaatcaaattttgaattaaaagcttaaatctaagacctcaaactacaaaaccactatgcaaaaactctgtggaaactctctaggacattgaagtgggcaaagatttcttgagtaatacctcacaagcacaggcaaccaaagcaaaaatggataaatgggatcacatcaagttaaaaagcttctgcacagcaaaggaaacaatcaacaaagtgaagagacacctcatttgccctgacatgattattatgcattgcatgcctgtatcaaaacatctcatgtaacccataaatatacacacctgctatgtatccacacacaaaatatgtctcacacaaaaatatgttagacacgcctacaacccacttttcaactttatcatgcttttcctataaaaatggactctaaattaaaacagctatgtgtgaatgacagaaagaaatactaaaacttaaaagatacttttattgagtactattaagagaatcacagtgaagcactttcttcactatcttatctgttattcgtgtttcattcaaagttggtttccctccacacttggtcaaaatacgtcttttgctttcaatctttatcctttagtcaaaagggattttgagccatttgtacaattgcagcttgggtttcagaacgatgtggcagtacacccttgcaggtttctgtggcaggtcggtctccctcctgccttcaactggagtataacatacagcaaagagcattaatcttaagtgcataattcgacatatttttacacatgtataaaccgccatagaaatcaagatatagaacattcccagcactctagaaggctcttttgtgctccttcccagtcaaaaaccactgaaaggtaaccactattttcacttttatcacttttgattaattttgtctactcacgaacttcatttgaatagcgtcataaagtatgtacttttttgtgtgtttggcttcttttgctcaacataacgtttgttgacatccatgttgctgtgtatatcagcagtttgatctttttattgctgtgtaattaacgtatatcacagttgatttatctagtcttctgttgatggacatttgggttgtttccattttttttactattatgaataaaactaccctctatggtagattttaactcttttttttttttttgagatggagtctcactctgtcgcccaggctggagtgcagcggtgcgatcttggctcactgcaagctccaccttccgggttcacgccattctcctgcctcggcctcccgagtaactgggactacaggtgcccaccaccacacctggctaatttttttgtatttttagtagagacggggtttca

SEQ ID NO: 5686 - DNA, 27890 bp, Homo sapiens
  misc_feature (1)...(27890): n = A,T,C or G, or insertion/deletion polymorphism (see Tables 1-2)
ctgtaatcccagcactttgggaggccaaggtgggcggatcacgaggtgaagagatcgagaccaccctggccaatatggtgaaacatggtatctactaaaaatacaaaaattagctgggcgtagtggcgctcgcctgtagtccacctacttgggaggctgaggcaggagaatcgcttgaacccaggaggtgaaggttgccgagagccaagatggcaccactgcactccagcctggtgacagagcaagactccatctcaaaaaaaaaaaaagaaagtgagatagccttattactgatatggagaaagttttagtggtccggatagaagattaaaccatccacaacattcccttaaaccaagcctaatccagaacaaggctcgaactttcttcaaatctgttaagggtgagagagataaggaagctgcaggaagctagcagagttggctcatgaggtttaaggaaagtagccatctccataacataagagtgcaaggtgaagcagcaagtgctgatggagaagctgcagcaagttatccagaagatccagctaagatcactgaagaaggtggcaacactaaacaacggattttcattgtagtttaaagtcttatattggaggaagataccatctaggactttcatagctggagaggagaagtcaatacctgccttcaaaacttcaaaggaaggctggacgcagtggctcacacctgtaatcccagcactttgggaggctgaggcaggtggatcacaaggtcaagagttcgagatcagcctggccaacatggtgaaaccccatctctactaaaaatacaaaaattagccaggcatggtggcacatgcctgtagtcccagctgctcggggggctgaggcaggagaatcacttgaacctgggaggcggaggttgcagtcagccaaaatcgtgccactgcactccagcctgggtgacaaagcgagactctgtctcaaaaacaacacaaaaaaaaacttcagagggcaagctgactctcatgagaagctaatgcagctggtgactttaagctgaagccagtgcccatttatcattctgaaaagcctagggcccttgagaacttggctaaatctactctgcctgtgtctttacatggaacaacaaagcctggatgacacatctgcttacatcatgatttactaaatattttaaacccactgttcatacctactgctcacaaaaacattcctttcaaaaatgactgttcatggagaatgcacctggtcacccaagagctctgatggagatgtacagggagattaatgctgttttcgtgactgctaacacatcattcattctgcagcccaaggatcaggagtaattttgacctgtcactgtaattattttaaaaaacagggccgaggcaggtgtatcacctgaggtcaggagttagagaccagcctggccatcatggtgaaaccccgtctctactaaaaatacaaaacttagctgggcgtgatggcaggtgcctgtaatcccagctactggggaggctgaggcaggagaatcacttgaccccaggaggaggaggttgcagtgagccgagatcacaccattgcactccagcctgagcaacagagcaagactctgtctaaataaataaataaataaataaaaataaacaggggcccagacatggtggctcattcctgtaatcccagtgctttaggaggtcaaggcaggaggatcacttgagcccaggtattcaaaacaagctgaataacataataacatagtgcaacctcatctctctacaaaaaatttaaaaattagccaatgcagtggtgtgcacctgcagtcctagctactcacaaggctgagccaggaggcccactcgaaccaaggagctcagggttgcagtgagctatgatcacaccactgtactctagcctgggcaacagagactctggctctaaaatttaaaataataataataataaagtaacaaagaaacaaatacatttcataaggctatatagctgccatagatagatctgggcaaaatgaactgaaaaccttctagaaaggagtcaccatttagatgccattaagaaaattcatgattgaggccaggcactgtggctcatgcctgtaatcctagcactttgggaggctgaggcrggcggatcacctgaggtcaggagttcgagaccagcttggccaacatggtgaaaccccgtctttttttttcctgagacagagtctcactgagtggcccagtctggagtgtagtggcatgatctcagctcactgcaacttccactcccaggttaaagcaattctcctgcctcagcctcccaagtagctgggattacaggcacccaccaccacacccagctaatttttgtattttttnnnnnnnnnnnnnnnnnnnnnnnnnnnnnnnnnnnnnnnnnnnnnnnnnnnnnnnnnnnnnnnnnnnnnnnnnnnnnnnnnnnnnnnnnnnnnnnnnnnnnnnnnnnnnnnnnnnnnnnnnnnnnnnnnnnnnnnnnnnnnnnnnnnnnnnnnnnnnncctggcctgaaacccatctctactaaaaatacaaaaattagccaggcgtggtggcgggcacctgtaatcccaactactcgggaggctgaggcaggagaatcgcttgaacccaggaggtggaggttgcggtgagcagagattgtgccactgtactccagcctgggcaacaagagcaagactcagtctcagaaaaaagaaaaagaaaaaagaaaattcatgattcaatggaggaagccaaaatatcaacataacaggagtttggaagaagttgattccaacccttatggatgactacaaggggttcaagacttcttggaggaactaactgcagatgtagtagaaattgaaagagaactagaattagaagtggagcctgggacgggcacggtggctcacgcctgtaatcccagtactttgggaggccgaggagggcagattacctgaggtcaggagttcgagaccagcctgcccaacaagacaaaaccccatctctactaaaagtataaaaattagccaggcatggtggcgggtgcctgtaatcccagctactcaggaggctgaggcaggagaatcacttgaacctgggaggtagagattgcagtgagccaagatcatgattctatctcaaaaaaaaaaaacacacacagaaggtaaattgttctgcaaagagaggtaatgggaatgtgggagttggcttggctactggcacagacagcagggaatcgggagtttgaaagaagatttacatttggcatacacgtgtgcccacgtggcctttcctactgcaaagggtgctgacaaaatcaagcccctgatccttcctgtggcatacataagaacaaaatggtagttgttagggacaaatcaaaatttaaaaataaaatggccaggtgcagtggctcacccctgtaatcccagcactttgggagggaggccaaggccagcggatcacttgagcccaagagtttgagaccagcttgggcaacatggcaaaaccccatctctacaaaaaatacaaaaattagtcgggcatgttggcacgggcctgtagtcccagctactggggaggctgaggcagtataatcaatcacctgaacctgggagatcaaggctgcagtgagccgtgatggcgcctttgcactccagtctgggtgacagagtgagaccctgtctaaaaacaaaacaaaacaaaaggctgctagtcagtttgggctactataacaaaacactggccaggcgcggtggctcacgcctgtaatctcagaactttgggaggccaaggggggcgggaatyacctgaggtcaggagttcgagaccagcctggccaacatggtaaaaccccatctctaccaaaaatacaaaaattagccaggcatggtggtgcgtgcctgtaatcccagctactcaggagactgagacaggagaatcgcttgaacctaggatgtggagattgcagtgagccaaggtagcgccattgcactcccgtctaggcaacagagcaagactctatctcaaaaaaaaaaaaaattaaaggcttagttctccatgttgaaagtaagggaagagacttctccaccctctcttttcttagaaaatttgctttagaaaacttgtaaaattttttttttttttttgagacaaagtctcactcttgttgcccaggctggagtacagtggcacaatctcagctcaccgcaacctccgcctcccgggttcaagcaattctcctgcctcagcctcccaagtaggtgggattacaggcatcctctaccacgcctggctaattttttgtatttttagtagagatggggtttccccatgttggccagactggtctcaaactcctgacctcaggtgatccacccacctcagcctcccaaagtgcggggattacaggcgtgagccaccgcacccagccagaaaacttgtaagttattttctgtgtcttcaaaacgtgtataaatatttttagaagccacacagcctcttgccagctttactacccagggatgtctttcacaaagacccaggagccatctccttgaaatgtaaacaccaagaaagatggagccttcatttcccagtttctgtgggagggtaggactaacttaaatggacactttgcttgagctgcaaaactatctgctgtcataaaaatctgaaaagctggctgggcatggtggctcacgcctgtaatcccagcactttgggaagccgaggtgggtggatcatctgaggtcaggagtttaagaccagcctggccaacatggcaaaacctcgtctctactaaaaatacaaaaactagccaggcttggtggtgcacacctgtaatcccagctactcaggaagctgaggcaagagaatcgcttgaacctgggaggtggaggttgcagtgagccgagatcacgccactgcactctagcctgggcaacagagcaagactctatctcaaaaaaaaaagagaagtttttcttctgattaagccagttagctaacatagatggtcatcacaattgccaggtgtctctagactgcactatatgtgacaaatggtgctatcgagtcctcctaaagattatttatagtttatcttgagaacacatatgtaatgggctgtatctgcttggctagataaaagtgagacttccttctgtctttgcagtctcttagcaaactgcctgtgatgtgctcacattctggtttaatgcttattcaataataaaactgttttctttcttcactactttcgtggagaggttttttctgggttgggagaaaattttgcttctaattatattctcccaacatagcgcatgtgcttaaaagggaaacaaaagcaggagggggaagggtctagagtgataagagctctagtgagaggctaggcctagagagggacatggagaaatagcatgcggagaggaacggtagaggagcaacgctaacattcagttgtaaataatacaatcatagcagctaatacatagagggactacacgccaagcactgttctcactgtttagccatattcactcatttagcatgcgcagtagcttgaatccggtttttcaattattcattccctctctctgcacgtggccgtagagtacactagagtgggcagaaaataagtcacaaaacagcaaagaaacagtgcttttggaagtaggtatgagacaaactcttttctaggcaaaagtaacccacgaaaatgtgtgtggaaaggccagatcctactattaggcaggatgggaatttgagccattttatttggatattacagaatggggtgaccccagaaaactggaagaactggggaccagcaaatggccgacctgcagtcctgagcagaggatgtaggccagagtggacctagaagataagaaagggaattgaatccagtaagggacagacactttatttttttatttttatttatttatttatttatttttgagatagagtctgatctggaggctggaaggcggggctaaaactcccactcacttacctctaccaacaactaggccaccaagtcatttctgaggactggctcaagaaagcagatttaacttacactggcctagcccaggccaccagatgcatccacggagatccaaatgcatataatcacttgaatcaagatctagacagggacgcgtgcagcaggcttcatctgactgattcctgacacgggagagaaagcctaagctccgaatcatccttcaatgtttacaaaggccctaaatagcagtgggctaattgctgttcctggatttccaggagacctgagacccatgaaggagcaggaaagagcttggggataaaaaattaatctggaacctactggagcggaaggggctgcactcacctggaaaagacaaagttcttgggaactggccacgtaggccaggtccctaagcaattccatcccgcaccctaacaccccgactggtgttcctgggtccctaacattgtctgtacccgcttcggaggttggacaaaatgagtttttcactgccctgcctcaggcctctctcaaaggtctggcccatgatatttggtgtacattgggaccccagcgcccagatatttgaaacggggtggggagcgggtgttgagctgctacatttccaggttctaggtaccctggggaacccctggtcgttgacggaagcacagcgttcaagggcggcagagctcaggtactggaggacacatgggccgcgccgggtctagccrcgggacatccccagaccccagcacggcctcccaggccgaccttccagaagccggcccactgccttccccgggtcccagcccagaaaagcggagaccttcccctccgtttggaagatggactcatcccctacttcctcctggctccmcagaagacctggagacctcgggaagtgttctcatctatgttcgctccaacccgggggctcagrcccacctcgatyccgccttcccgggaggtccaggaaggtcccgccgcacccaccccgttggcctcaccctggctcgggcccctttatcatcctgcagctacgctccgaccaggargcacagccagtccccacagccggctctaccgctctgctcgcaggtttgggctagtctggggcggggacttgggagcgcctaaaacttgcgaggagggcggggccgcagaccggtcctttaaaggttggaagtggccccgaggcgccggcagccctgggcggtcccgggaatcgcacaggacccggctcccctcgcctaagctgctggggggcgccatgggccgctaccgcatccgcgtggccaccggggcctggctcttctccgggtcgtacaaccgcgtgcagctttggctggtcgggacgcgcggggaggcggagctggagctgcagctgcggccggcgcggggcgaggtcagcgcggggagcgaggggagctagggcagcggggaccccgggcccaggcccgggccgagctgggctcgcggcgggagggcgggaggctgggggcgaggtgacagcgcgacctcgcggactgggacttccacgaagctgggacgaggtgggcaagatcagggacagggtccgcagctgggatcccgggctgggctcaaccccatctccctttcccgcccctggtcccggcagcccccagctccttctcccagtgacccagagccaatgtaagtatgaggccagaggtcagacgtgaagctcctccaagaaccggcgcggggagagctcagttaatgggacccacgtgggcgatgctgctccagcatcagctccaggcgctgcgggccctcgtcctccacccgactccgggcgtctgagacccaaagagcaggttgtgcgggggcgggaacgaggcgatgctgtctttggaggccctgagaaactgaggttgcacaggagcgcrgctctgtcctcgaaacggcctcagtygggtccctcctactaagtctggcctgggtccggcctgcacaggaggaggagtttgatcatgacgttgcagaggacttggggctcctgcagttcgtgaggctgcgcaagcaccactggctggtggacgacgcgtggttctgcgaccgcatcacggtgcagggccctggagcctgcgcggaggtggccttcccgtgctaccgctgggtgcagggcgaggacatcctgagcctgcccgagggcaccggtgagcaggcggcgtyggggaaggaggcacaaggtcycgggaactgctgcggggctaggagggcagagttaaggacggtcggagcagacttagaggakgtatgggcccagggcaggtgaaatgtagggatcccagggtgctggacagaaaacgggaaggagttatgaattcccaaagttttacacaggctaagagaggctgcgtgtgaggctggaggcagggagtaagtgatctggagatcccatcttccaagaaggcaaagacagaaagtgggagttgcagcgatccaggaaaacagagaagcaaagtgaaagtaggaaggagatgtaaaggtgactcagaagtcaggtgaggggaccacatggaacaggagggggtgggtgacccgtgagagcagacagctaagggaagaaaacataggatgctggagagctggtttggttggaataacacggaagacacccgtgaaagacaagaagcacactggcccgcaggagaygaggaggaatgaggatggcaaatagtgaatttttttttttttttttttgagatggagtcttgctytgttgcccaggctggagtgcagtggygcsatcttggctcactgcaacctccacctcctgggttcacgccattctcctgcctcagcctcccgagtagctgggactacaggcaccccccaccacacccggctaattttttatattttttttagtagagatggagtttcaccgtattagccaggatggtctcgatctcctgacctcgtgatcygccctccttggcctctcaaagtgctgggattacaggcttgagccaccacgcccggcccaaatagtgaatttttaaccatgggtaatgagtaaaagagagatgaatccagagatgagtgagggcagtagggatggaacatcaaatctatgactttgagacaggtgagtgtaaatgcagaaaagacccagaataagtccatagatacagattatgatagtaaatccagaaagatgaggtttaaaaaaaaaaaagcaaatgtagaatcttttgaggacaggtgaaggcgtggcaggtgaggtttaagatgtgaaattaatcaaagcaatctgtagtagacagtaggtgtaggtgtataggtgactaagatttcatcaccttaattaaggtgatttttttccaaccatagatattgatgaagtaaggccaggtaggggaagatgagtgaaggagcaagaaatggtggcaaacaggaggtttttatctacaggcaaaggatgagggctgaaataagagaaagcaggagtgcaaagttggcaaagatgggataaacatgtctggtggataatcaaatgaggcaaagccagagataaaagcaacagtgcatggctgaaaacatggaatacggctaaccacagggagatgaggacaagaggcgggcataggaccagacagagccgtgaggccaattgtcttgatgtctccccagcccgcctgccaggagacaatgctttggacatgttccagaagcatcgagagaaggaactgaaagacagacagcagatctactggtgaccacccaccccttaaactaaccccgccaccactgtcccaccccttccctgcccctgcccctgcccctggccccatcactgaccatgacatccttcctgaagctttgtccccaactcctagctgggccacctggaaggaagggttacccctgaccatcgctgcagaccgtaaggatgatctacctccaaatatgagattccatgaggagaagaggctggactttgaatggacactgaaggcagggtgagaaaaaggctagacctcgragtgaaataagggctgggagggccaagaatgatgatagacggtgagggactgagggatcagctgatgagttaagcctcaatacctgtcctagggctctggagatggccctcaaacrtgtttacaccctcctgagctcctggaactgcctagaagactttgatcagatcttctggggccagaagagtgccctggctggtcagtggttccccgaggtctccataatcccttaatggcccstctggatgactcatcacactccacagtcccccgtaactcttygcaagaagagaccttatcatatctggtcaactcagagaggccttgagaatgaaaacgcagaagctgggttcagggagggttatatacctgaacccctggggtagattttggagaagggatatgcaggctgtggtacatatatcctcctttcaccgcccaccaaagagaaggttcgccagtgctggcaggatgatgagttgttcagctaccagttcctcaatggtgccaaccccatgctgttgagacgctcgacctctctgccctccaggctagtgctgccctcrgggatggaagagcttcrggctcaactggagaaagaacttcaggtacctctccttcccctgcctggcactgttctctccttagtagtgtggtgagaacggacagagagaatccaaactgagtcagaggaaggctgcagtactgcrttgccccttggtgcagtcctgtgctggaaaaatacagaaataaaatatgtaggggaagaaactatgaggagctcccagcaggaaggggaaaatagaatggatccccagcacacagagaggggctggagatgttagcaggaacagtgacattgcctggccgcagtgttctggactccagtgttcatgggcagggagaaaagtgaggaagtgccatcaggtggggagaatcggggaggctttctagaaaaagagagcggggtttggaagcaatggactgtactgaggacaagcctaggcaaaatgtgtgcgtatgcatgtgtgtgctgtatgcggtggcaggggtagtaggggaagctctctggaatatttggcagaggacgtgagatttgaatagggaatgaaagagcatttgctgagctgataggagccaaaaccagagcgcagaccattcgggaatgatcagaaaggggcctggccatttgacaggtggtcagtttacaatgcctgtgatgccaactggattgagcaggcctggttccaaacccagatctgccaccacatccacacacaagacatctaccctcaccagactgtttcttcactttaagatgagaggaactggaccaggggctctagttctcccaacaggrctccggtactgatgcaggagaatggcaagaagctagactaaatctcttgccctttgccccggccccctgggggtagactttgaactctaaaaatggatacatccctcctgtccccagaatggttccctgtttgaagctgacttcatccttctggatggaattccagccaacgtgatccgaggagagaagcaatacctggctgcccccctcgttatgctgaagatggagcccaatgggaagctgcagcccatggtcatccaggtaagggccccagacctctcccacaacgttgcactctgttcacctcaacctctgctcccagggacccaacccccagctcttggctcccaaaccccatcctcactcagtgagacttgtcttcatgtcactatttgcctgtaccctcrtctcccctgcctcatccaactagaattactttttcaagagtcaaaatggcctcytggagttctcatcctgtatccaatggtcctcacacttcagtgtgcatcagaatcacctgaatgcctgttgaaatgcagatttctggatcccatgaccagactttctgattcagtatgtctggggtgggaactaagagtttgcgtttttataagttccaaagtgatgctgacactaccagttcaggactacactttcagaatcactatctcatctctcagtggcctctggctctgaaccctcgccatctcttgaatatcttttctygcaatttcttttttttttttgagacagaatctcactgtgtcactcaggctggaatacagttgtgtgatcttggctcactgcaacctgcgcctcctgggttcaagcaattctcccacctcagtccctccagtagctgggaccacaggcatgtgccaccatgtgggcctggctaatttttgtattttttgtagagatggggtttcgccatattgcccaggctggtcttgaacttctgggctcaagtaatctgcctgcctcggcctcccaaagtgctgggattacrgstgtgagccactgcacctggccttctctcactattcttaacagtcaggtgacaagaactgtcaataatcttacacctcctacttctccttcacattccaccaccatctgagcgccgaccccaaagcagcaggtttctcccacaccactgttagggcctccttctggacccccttcttccagtccctcctgccttccacctgacatcagggcactccagctagcgagcggcaggctgggagggttcacagtcctcctgctagactataacctcctagaaggcaataatcttacttagtcatctctgtttccccaagaatgctgactataatgtcatatacggaatgggagttcaataatttctctttctcccagattcagcctcccarccccagctctccaaccccaacactgttcctgccctcagaccccccacttgcctggctcctggcaaagtcctgggtccgaaattcagatttccaactgcacgagatccagtatcacttgctgaacackcacctggtggctgaggtcatcgctgtcgccaccatgcggtgcctcccaggactgcaccccatcttcaaggtacttattaatctattaaatcacatatccctcagaccccagagagaggaacagccccatatcaaaagataytgcagcagcaaaaactctttgtagcaatttgtgagtgaagaggagactgtctcaatatcttgagatgttgattttaattaagtttattaagtttagtcacttaacattatataggaatcctctgaaattctcagagatctgacagtctagcagtgcgctcacagtagggcttgaacactgctagtaaaamaaaagccatattcctaccttagatctagtatttagccagaaaaacaagtgatgcccataagaaccaaccagagaacagtatctggtactagagtttgaaatcacaagggacagcctataacagtatagtattgatgaagaatgtttctacccaattgaggagtcagctaagtagaaacagaccaaaaggcaaggaagaacagccagcaagccgctcatacctgcccaacagyaaggtggatagagatgtaygttagcatggtaatgacaggaatgaaaaggaaagaatctaaaacgtagtgaagggaggaaatggtagctgcagcgtgcctgggtgcaagagagagaaaagccagaagtccaagcttctgccacacctgtaagtccctggggcaggtgtgttatactgacctagaaatactgtggttttaagagctgggtgtggtggttcacgcctgtaatcccagtgctttgggtggccaaagcagtatgattgcttaagaccaggagttcaagaccagcctgggcaacacagcaagtcccggtctctaaataaaaagaaagaaagaaagaaatactgtaattttataaaacagtgagttccatatatattgctgggagaaggcaaaataagacctgtgcttgcttaagaaaatgttcttaaaatcttgatgatactttatatacagggaacttggcagagggagcacaaaaatgatacaagcttacaaaccagagtaattgtcagaaacagtaaagttagaagaaaccagagtcagcaaaaatgaggtgtttggttttaggtacatggagtttgatgtattggcaagatatgcaagtatgtcctgggtaaaaacaaccaaattgtgtttcagctgggggcctccaccaagaccccccaagcctggccagtatagctgtgccgcctctggaattttccccttcggtaacatagacaagatggagaccagtctgatgaatggaatcttggatttcattcatctcatgctgtctcctgcttccccatcctctgctccacacgaacaagtgaagcctctattcacacttacaattccttttcctagttcagtcctctccgtgtctccactcaccacagtaatgccatgccccagcggacagctgagttgctggcagatgcacacaagggtcaagcctgcasatgtcttaacagtggcctatgcaggctctgactttggattgctggggtcttagtcctgaaccccggcctcaataatttccagatgtcctcacatgttccatcgtgaggttattaaaggttaaaatgacttaatggtgtgacacaagctaaatgctacaaaaaacattagttcttgcaaatttttttttttcagagacaagttctcactctgtcacccaggctggagtccagtggcgtaatcataactcactgcagcttcaaactcctgggctgaagcgatcctctaacctcagccttcagagtagctgggactacaggtgtgcaccaccatgcctggctaattttttttattttttgtagagacagggtttcrctatgtggcccaagctagtctcaaattcctgggctcaagcgatcctcctgcctcagcctcccaagtaacctggattgcaggcacatgccgccacacccagctagttcttgcaattattattattaaggactgtttatccttaggcatcctttctcctcatgtggactttggcctttccgtgacatttggcatctttcatgaatcttctgaaaagcttcaggttaatgtgagctgctttggtatcttaacaccaaaggtgtcattggggtcattgccagtgtccagcatcaacaattcagacaagcaccaaaactgcttgaaacctgcatgttaactatgtggaaaggaagacaaacagtctaagataaaaagaaacgcatgtaaggaccatgcctttttttaatagctaaggaaaatattttaatatttttaatttaataaattttaattttaaataaataattaaaatttaaataaatttaaatttaaaatttaaatttaattttaaataaacatttaaatttttaattttaatattaaattaatttaatttaatattaatttaacttaatttaatttaatattaatttaacttaatttaattaatttaatattaaattaaattttaatatttttaattttaatattaatttaatttaatttaatttaatatttttaatttaatttaatttaatttaatttaattaaattaattaatttaattttaattttgcttcaatattaaattaaattttaatatttttattttaatattaaattaaaattttaatttaaaattaaatatttaatattaaattaatttaaatttaatattaaattttaatagctaaggaaaatattttaatattaaaaaaagaccatggccttttttcaatagctaaggaaaagcaggagaagaggggcccaacagtgcttaagtaggggtggagaaagatttgcttaaacaggtagctgaatatagctcttctagttctgacagaaagtattctccccatccatcccctaaagaaacccccaactgtgaaacaactaaaagatggagatgcagctttgatcataagcagagaggctagtttaagaggatgtgaatgacagaggaggtagcaaagaaaatcagaaagggctgattcataaggcacctatactcaaggtagaaacaatgaagcagacagctactattccaggactcttatgtgtaatagacactctccaacatcacttaggtgagcatcaccacagcccctgagataagagagtctattgctgccccctgttgacaaatgaagagattgcagattaaaaggttattaacttggccaagtctcaaatgaggagtaaagtgtaggttaaaatcctggtcagtctggctccagggcccaactcacagggaagttggagagcacaagagtgagtgatcagaacagcaggagatcagcctgtaaaggaaagcatcaagaggagaaggcgccatgctgggtgccaggccctaccaggaaggacccaagcatggcctccaccagtcacgccctccaatctcctcctctccagttcctgatcccccatatccgctacaccatggaaatcaacacccgggcccggacccaactcatctcagatggaggaatttttgataaggtgaggagggtacggggcatgggactgcctcatccatctctccatgatctgccactttcaggatccaagatcaactatgtgtgaatgtcctcactcttaacctatgaacctgtcccttttatacccatgtctttttttttttttttttttttttttgagacagagtctagctctgtcgcccaggttggagtgcagtggcgccatctcggctcactgccatctccgcctcctgggttcaagcgattctcctgcctcagcctcccgagtagctgggattacaggcgcccgccaccatgcccagctaatttttatatttttagtagagatggggtttcactgtgttggccagactggtctcgaactcctgacctcatgatccacccacctcagcctcccaaagtgctgtatacccatgtcttaatatctgaaaatcccacatttgccccactttatggaagatgtgttggttctccagccctgtttccccctctaagacctgtgatctcctgtcccaggcagtgagcacaggtggagggggccatgtacagttgctccgtcgggcggcagctcagctgacctactgctccctctgtcctcctgacgacctggctgaccggggcctgctgggactcccaggtgctctctatgcccatgatgctttacggctctgggagatcattgccaggtgagtaaggaggagctgagaaatggtggggysgggggsgggggggctctggcctgaggccagcatggggcaaaagcaagaaggtccagaaaggagaagcagagaactcaatcctggggagagatgaggaaaagtgaggacacagtgggtggctctgaaaatgaggagactgggatgaggcagagagaggaggtgaggggagctgtggggggagactgggggaggtgtctggaaaaatcaggattttctgacgatgtatgacagcaaccatgcgaattcctagaactaaggacccacatcttccatgagatgctagtgtgtttagagggctgaggatgtcccaaaggcgaggtgtcttcccagatactgtggaagcattgggcagatgccacagaaagaggaatagaggtcagaggcgggggctttctgccctcaagtgccttttccccctgggcaggtatgtggaggggatcgtccacctcttctaccaragggatgacatagtgaagggggaccctgagctgcaggcctggtgtcgggagatcacggaggtggggctgtgccaggcccaggaccgaggtaagatccattctagagacagaagaagctcctgggagactctsccagggcgccttcccagccctgcccttctggggacaggaccccagcctctcatcacgcctcccttcctccctccacacgggaaagcatgtgtatcccattcccacctcctccgactcaggacaattctagagacccaagractgtcctcctcagagaccctggccatcaacccctagtcccactacaccccagtcacagatgcccctgaactgccatatcctggggccccccaggccatatccacagctgggaggggtctgcacagtccctgctgggctcatattctctcctgatggttccgttttcctaactgaggatgtaaatgggaagattttccctccgaagcccacaaggacccaccctggctttccctccctctcttcctgcctgccactgtgcagcacgcacagagggtccaggaataccgcacgcttgctacagtgcaaggtcagctcttgatgcaagctcaatcctatacatgctttgcctcaaacccaaactcagcaccctgatccttggggctcaggtttctttggctaatccaactcttccaccctaaccaccccttggccaaaatctagccactacctttagtcaactctcactccccacatttgaacctctgaggaagaaaaagcctttgctgagctcttaggtttaatcacacaggcaccagcctggactgctgtcactcatccttcggcccctccccctcacacttcagatctaggctgtgaataccatcctctgcctctgtgagacaactacagacatttactggggagcccttatggcgaatcctgggaatgtggcaaacctccttaccctggagggagcctctccctggggaatctgcaccaccctacccttccaggaccaaactctctctagttcttctcagtacagtcccttaggctcctagcagtttgggctactacaacaaaacactagctgggcacagtggctcacgcttgtaatcccagcactttgggaggctgaggtgggtggatcacgagstcaggagttcgagaccagcctggccaacatagtgaaacccgtctctactaaaaatacaaaaattagccaggcgtcgtggcacgcacctgtaatcccagctactcgggaggctgaggcaggagaatcgcttgaacttgggaggcggaggttgcagtgagctgagatcacgccattgcactccagcctgggcaacagagcgaaactccgtctcaaaaaaataaaataaaaaaaaccacacaccatagactgggtggcttataaacaacagaaatgtattcctcacagttctggaggctgaaagttcaagatcaggttctggtgagacccctcttccaggctgcccacagccgatttctccctgtatcctcacacagcagaaagatagcaagctagcactctgtcctctgctcataaaggtatcaaacccattcaggagggctgcaccctcacaccctaattatcatgtggggctccacctccaaataccatcacaataggattagatttcaatataaaaatttttcggagccaaagacattcagttcatgacacatgttaactttaacctccactaaccaccctcccccctgttctctttcagttctcatagctcacttttgtctagttttcccagcagacattttagaggctaaaattaaaaatgccatgggattagcagtcaggaacctgagttcaagatcagcctctgccttttcccaactatgcagtcctgacagtttattctctatgggctttgattttcttacctataaaatgagagtaattatatttattccacttaactgataagattattgggtctcccagcactttaggaggccaaggtgggcagatcacctgaggccaggagttccagaccagcctagccaacacggtgaaactccatctctactaaaaatacaaaaattagctgggcatggtggtgggagcctgtaatcccagctacttgggaggctgaggcaggagaatcacttgaacctgagaggcggaggttacagtgagccgagattgtgccactgcactccagcctgggcaacagagcaagactccgtctcaaaaaaaaaaaaaagattatcgggtctctgagcccccatatccactgcaaaatgagtggactgagataacctttgtgggagcccctctcagctgtgacactggaaatccatgacttattccccacattataacgcagacacttgtaattctgtcygggaataggattacgcattcctaaattatttatttattttttaatttttaaatagagacaggctcttgctctgtcacctgactaccagcaatcctcctgccttggcctcccaaagtgctgggattacaggcatgagtcaccgaccacgcatccctcaattggtttttttttttttttgagacagactctcgttgtgtcgcccaggctggagtgcagtggcgggatctcagctcgctgcaagctctgcctcccgggttcacgccattctcctgcctcagcctcccgagtacctgggactacaggtgcccgccaccacacctggctaacttttcgtatttttagtagagasggggtttcaccgtgttagccaggatggtctcgatctcctgacctcgtgatccgcccatcttggcctccccaagtgctgggactacaggcgtgagccaccgcgcccggccgcatccctcaattcttaaccactttttgaggcaagggatatttggtcactcagaacttttcagcccccaatccttccataacaataattattacttacttattgagcatttattacagaccaggtgattttgatacatcatctcatttataatgtaggtatcgtccatattttacaggtgaaaaaaactgaggttcaaataggttaagctggcctatggtaactaagtgtaagtgactgagccaggacttaaacgcatgtctgatgcaaatacgtctaaataaaataaacaaattcatcaattctaaaatatgggcatcccaaaacaacagcctttgttcctctcctcttatgctgtagcttctaactgctattcctttcctgcccaggtttccctgtctccttccagtcccagagtcaactctgccatttcctcaccatgtgcgtcttcacgtgcactgcccagcatgccgccatcaaccagggccaggtatggacagctgaaagcccaggtccctgaaggcaaggtgacctgagggagagatgggagttcaaaccctaagtaccagggttctagggttacagtttcttcctccagctggactggtatgcctgggtccctaatgctccatgcacaatgcggatgcccccacccaccaccaaggaagatgtgacgatggccacagtgatggggtcactacctgatgtccggcaggcctgtcttcaaatggccatctcatggcatytgagtcgccgccagccagacatggtgagaggggactctcgggagagggaaatgacagttggaaaggaaacatcagagtgaggggctgggctctaggtgcgtttgtctttagaaactgactgatcctttgttctgtctcaggtgcctctggggcaccacaaagaaaaatatttctcaggccccaagcccaaagctgtgctaaaccaattccgaacagatttggaaaagctrgaaaaggagattacagcccggaatgagcaacttgactggccctatgaatatctgaagcccagctgyatagagaacagtgtcaccatctgagccctagagtgactctacctgcaagatttcacatcagctttaggactgacatttctatcttgaatttcatgctttcctaaagtctctgctgctaaggctctatttcctcccccagttaaaccccctacattagtatcccactagcccaggggagcagtaaactttctctgcaaagactagatccttttttacgctttgcagaccgcatagtcactgtctcaactactcagctctcctgctgcagcatgaaggcagccacagacaacatggaaatgagtgtgactatgttccaataaaactttatggacactgagatatgaatgttacatcacaaagtagtcttcttttggtttattcaaccatttaaaatgcaaaaaaaatccacaaacaaatgtgctttgtttgagacatgcacagccaggctacagactggatttggcccttgaaccctgcactagcctgaggccctgaccctacttccaaaacatccaagatcatggagcagggggatttcttagaaaaatcagcttacctcagctaactctccattcccaggaactaaccttcatgcctggtggccaatgtacaaattcctgactcagttctttggcaaattccttccacccatatttctcctattcacccatgtaccccaaaagtccctgaataagaatcatgtttttggggcagaatacaaaccactgccccaaaatggcttctttctccaaacagtcccagatgaaaggcacataattcatgtcttaaggctacttttccagcccctttaatactctgggatctatgtgtttcccacattccaagttatctttcacaagccttttaagaacaacatgcacaaaataaatggacaagaactacaaagttattctagccaatgatagtgtttatttgttaggtcctggggtctcaaggtcaaatgatccctctcaattattctgaggtcactgtcctcactagagtgggtacaacttgctcactgcaaaactgtgttcttcaaacatccctacttcttttcttttctttttttttttttttttagaagtagtctctatcgcccaggcgggaatgcagtggcgccatctcagctcactgcaaccttcgcctcccgggttcaagggattatcccgcctcaccatcccgagtggctgggatcacaagctcatgccaccacatccagctaatttttgtaatttttagtagagacagggtttcgccatgttgacctggctggtctcgaactcccgacctcaggtgatccgcccgcctcgacattcctatttctaaataattattacagatctgtcactcaccagttaaacatacaaacggcttttttggaggggatgacctatttatatttttaaatcttatatcctaccttattcaaaagtcctatcagttttcctagtttagagaagcaaagtgacatttttgtgtacatttaacaggactgcttaccttcacaacctgctcagtcggctttccctggacttctcctaaccgcccatttttcctggatttggcaccgagagttacagtatttcacgtgcgatgataaaatgttacttaggagaaacagttccaataccaagaaacttcagcaattttaaagcattttaaagccacaaaaccatgcccgatccccaaaagggggtcctaactcctttacactgtcagaatctcaattttaaaagggaggagtagagaagagatagaaacgctctctgttggtgaaaatctgtcttacttaccatttccccaacacaggagagactaaggaatttcaggtaaaaatcagatggctccaatcctccgatactaagagcccatcgccccagttcccaggagttccgccagttagactttttcccccatggcctcgctaaggctagttcctcgtcacgtgacgtgacaggcttggtcacgtgacataccagctccttccattcccgtgtgcggggggagggggaccaacaaaccggaggccctcgctcttccaatactcacgccctagctacagaggtcaaggaaggtttccccaggagcagttttggtttcagacggcgccgtctcccgcgaaagtcctgagaggagcccagccttttccgcctgccgcccccggatgggatggttgaggccggggccacgccccctctgcccccctgcgagggcatcctgggctttctcccaccgctttccgagcccgcttgcacctcggcgatccccgactcccttctttatggcgtcgctcctgtgctgtgggccgaagctggccgcctgcggcatcgtcctcagcgcctggggagtgatcatgttggtgaggggactccccggcaaggatcggagagggcctgaggggctccgggctgggagggctgggaggcgaggaaactctgggccgcaggcaggccggaggggccggggatctacaggccccggagaaggagacagactgaaattgaaaaatgggaactgttcgagaccagcctgaccaacatggtgaaaccccgtctccaataaaaatacaaaaattagccgggcgtggtggcgcccgcctgtaatcccagctactcaggaggctgaggcaggagaatcgcttgaatccgggaggcggagggtgcagtgagccgagatcgcgccactgcactccagcctgggtgacagagcgagactccgtccccaaagaaaaagaaaaaagggaactggagcggagggccctggagtgggaggagccagggctggtaaaggtggagacccctcaaggtaggagaaacaagagcggggttcctgagaggtgcttgagttgaatggaggacatgggaggaaaagagagtgcttgttccagaaatgtgtagctgggccttgttttcccagtaatccacccaccgccacttcaagaagaaatgatatgaagaagtgccggttctccctcccctcttccgcactgtcccgtgatgatgacgcctccagagaggacgataatctgggttcctgggagagatggcttggtcactattcccacccttgcctcgaccacttgtctcaatgtcaccacctcacgccctgttccaggtggctgagtccgaatccagtaaccaccacctcgttttggttaatctcaggctcgggtgttgtagcaacattggaaatgggaggggtttacgaagtgaacatgaggtcaggtgcctgaattcaacagtctacccattccccttttccagataatgctcggaatatttttcaatgtccattccgctgtgttgattgaggacgttcccttcacggagaaagattttgagtaagtattcgggtgggggaggcgggctgggagcaggtgggaggtggcgaggcctagggtcagaattacgtctgggaggcccggtgcttagggcccctaggttagaggacttggagaggagagcggctttcttgagaatgtggttaggagccagggagtcagacctcagcggccatcccaaacccaccaccttaggtgtgacctctttaggtattttacttttctgtgcttctcagtccacctctgcaaaatggctatgacagatctcaccccataggatggtcaagaagattgaataaagtaatacacgtaacagcgcctaaacaggtgtcgggcacatagtgctcagaaaatgttggctcctattaaagtttgacccctttgcttcattcccacccccaggaatggcccccagaacatatacaacctttacgagcaagtcagctacaactgtttcatcgctgcaggcctttacctcctcctcggaggcttctctttctgccaagttcggctcaataagcgcaaggaatacatggtgcgctagggccccggcgcgtttccccgctccagcccctcctctatttaaagactccctgcaccgtgtcacccaggtcgcgtcccacccttgccggcgccctctgygggactgggtttcccgggcgagagactgaatcccttctcccatctctggcatccggcccccgtggagagggctgaggctggggggctgttccgtytctccacccttcgctgtgtcccgtatctcaataaagagaatctgctctcttcagccctgtgtctgtgcttgagtgggggcgagcacggggctgagactagaggtcggcctctgcctggaaagtcccgatctctgagcggaagtggagcgaagtgtggcgcggaagtgaggcgaaggctttccccatcgactgggcgcgccgagcggtctaagcgactgcgtctgatggggcggggagccgccgggttgagcctatccgctgcggggagggcgggacttcctgcgcgggggcccgagccgctcagtctccctgctctccgtggtcccggctcgcgtgtagcggcggcggcggcgtctccgtgaggaggcgcgcggggccatgacgtcagcgtccacaaaggttcgacctccctcgcggacagcgctccctggcggccacgggagggcgggccccccacttggctcgcggctcttccgccccgggcggggggcgggcgggagccgagcctggggtggggctaggggctccgggcgggacggggagggcgggcgccggccccccgtgacgctgccccgcccccaggtcggagagatcttctcggcggccggcgccgccttcacgaagctcggggagctgacgatgcagctgcatcccgtggccgactcttctcctgcggggtacgtgagcccggactgggacgtggacgctgagagcgggcgcttggactcggtcacagacacggaccctctctagcacagggacagacattagtttccctttgtgcstggcacagcacagagtcggtgttaataaatgatcgttgggtgagggaatgaatgacagataaaaatacagacaggcccatagcccagactcctgtttcacagttctccctgctgcgaacgggtcgaccacaaaccaccgccactcccaaccaccccagttcatggaattcccccagacggctgcaggctgtgttggtgggtctgttttgaaaagcccttcctggcgagttggtttcagtgtgctgtgtacagcagccgtttaacgttgatggtggaaaggggtgtctaaggtggaggtggttgtgatttcttgtgattggggtcctcccggttcccgcagggcctcaagagctttccgcctccccttacggaggacctctttatgcatccgtggaaggggtcccagaaatcggaaggaggcggctggttggctgtgggatgcatagcctgtgggcgggctccacaccccccctcccatttttgctatcccccctctccccttctgacagygcgaagtggacggagacggaaatagagatgctgagggctgctgtgaagcgatttggggacgatcttaatcacatcagctgtgtcatcaaggaacggacagtgtgagggagggtggctgccagaaaagggcgggtgggcmgccttcttcctccttacccaaggttccatcgtcctcagaactcctttccagctcagctgcttccctactttgtcactagttttttagaatccccttgaggactgaaagaatagaattgtcacagttggtcagaagttcctaaaatgytgtggtaatccttccaagaatgtgaatttaggttgcctgagatgctgttattgtatttgatgatggaagtcccctggttatttatataaatgtttgaggaccccactgcagtgtttccagggatatggtgaccctgaactagttgatcagtaaatctcaatccacctgtaaatcaccaagctctacctgatgtctctcccagaagagaattaggagatgggcctttcccactactcagttcagggactccactctccacactccatccatcctgagtgagtgtaaaacttcgagaaagtgagaaccctaccaatgggttggggccccgacctggattcttatgaagggactcccagaaccccttcccctcccgtcccctcttctgttagtctctctgatgactcctttcctaacctcttctctcttttcttcagggcccagataaaggccactgtgaaacgcaaggtatatgaagattctggcatcccccttccagctgagtcacccaagaaagggcccaagaaggtggcatctggtgtcttgtcacctcctccagctgcccctcctcccagcagctccagtgtccctgaggccgggggtccccccataaagaaacagaaggctggtgagggctgtggagttgctgcctaggggttaaaggtcccatctgaggtttagtgagy

SEQ ID NO: 5687 - DNA, 40185 bp, Homo sapiens
cacactggctgatggtacagaggaggagaagggaggaggagggagaaagaagtcaggcgtgttcccatttgagcagctctcccctgcgggggctgacactctcggaggtgctcctgagcaccccagagccccgggcttgggctctcctcaacccggctcacctggggtgtgggtggcggtaggggtggtgtgccaagatgacgtgctcatctcaggacgacgtcagcttctgttgtgcagctgagaggtcttatgcctcacaaagatgctctggaatttccactgcttaagaaatgcaactttttaatcataagaaatgatatatggtgattgttgaaaatttgcaagatatgccaaggatatggaaaaataatctttaattttgccagccagaaataactattattaaaattgtttaggccaggcgcgatggctcacacctgcaatcccagcactttgggagccccagccgggcggatcacctgaggtcaggagtttgagaccagcctggctaacatggcaaaaccccgtctctactaaaaatacaaaaattagctgggcatggtggcacatgcctgtagtcccagctacttgggagactgaggcaggagaatcccttgaacccggaaggcagaggttgcaataagccagtagaaattaggagcttctgcttcttgttataaagcacttaagggttgcttaattttgtattagcaaattagatatttagaggacttgaagaaaatatataaaataatttttttttgagacggaatttcgctcttgtcacctacgttggagtgcagtggcctaagggatttgtcactcaattttttgctcagatatgcctttacgcatagtattaagcattttatttattcatatatatttttaatagagactgtgtgttgctgtgttgcccaggctggtctcagactctgaacacaagtgatcctcctgtgttggccttccaaagtgttagaattacaggtgtgagccaccgcgcctggttaacgaagcattttagaggcaaattgtgccacttctactatctggttttggtttaactctggggtcctgtttaactctattttttttcactgtggtctttttttttttctcttaagtttgcttcttagaaaatttcacacagcctgttttctgtaatatagtacagtttatcatttaatataaaatttcttctagacaaacaccagaagttgaaaagacaaaaagtatgaaataaatcctcaaaatagagtagttaggaaaaagaattataaatctggggcttttaaaatagttttttttccatctcagtcagaaactttaaagcagtcactttatcttccctgactcagtttctccacaagtgaaaagacataatagtccacagtgactagttaggatcctttatagtcaactgtgaatggctggaaacgtggacagctaatatgattccactattgtatgggagaggcatcatgtgaattagtgggaatcacctttattagtgaagaaaaaaatcacttgatgatttgtaggaatccggggagaatgctgagaatttgtggctgaaacttctcttaggaaaagagagagattgagtgagagcgagagcgagacagagagagagagagagagagaaagcgagaggcacatgctagaacaaagctcctttcatttgttcctgggagtggctgggtgtgtcaaatcatccctcagcctcgatgctgagtaatcaagtataatatttgcaaagcttcaacctataggtaagaaaaagcaccaacaaaacagtctcctaggttattaaatatttagtccaatgattacttgtgttgaactagaggaagttattgcttcatacaattgtataatgaatgaatgaataattcattctttgagctatgtatctcccctccaaaaaatctactcttttaaatatatagtcaataaaatggtttttgtggcaaataaagagaggggaaaacattatggattatttttgaaattatagagcaaatgctttttcctacaaacaggtgtattctttgtcactaaatttttttaaataaatcatttatttggttgggtgcggtggcttacgcctgtaatcccagcactttgggagtctgaggcaggtgggtcacaaggtcaggagatcaagatcatcctggctaacaaggtgaaaccccgtctctactaaaaaataaaataaaaaaaaaattagctgggcatggtggcgggcgcctgtagtcccagctacttgggaggctgaggcaggagaatggcatgaacccaggaggtggagcttgcagtgagccgagatcgtgccactgcactccagcctgggcgacagagcgagactccgtctcaaaaaaaaaaaaaaaaaaaaaaaaaaaaaaaaaaaaaaaagaatcatttattttacaaatgtaaagtgtttgggatgaatcagatgtactggtcttcatatacaaagagaactggaggaaaggtagctggtatttaaggaaatgtcaaactgacttcaaattttgggttgaattcatccttagttgaattcctgtcgggtagggttatttcccactcattcattctctacccactatgtgctaagtacccactatgtgccagatactattctaagttcttggactacatcagtgaaaaaaacagaccaaaaaaatctgcttagatttcagctgaaggaggccatcaacagtaaacataataagtgaattgtatagtatatcatatagaaaactataaaatctggccttatatctgcttcttataggttcaaagttcatcaagaagaagggagatcaaaaatactctggagttgactattcatgggcccacataaaaagcttttcatgaggcaagagactgaagattataacaggataataacaccatattgttatttttatgttgttgctctctgagttattagtatgagtagaaccttttttcttataagtctgatgcttctaagtccacttgttaacataattgacatgacaactttgttctttccaggcatttccttcaggatgtatgttttttttttttttttttttttttttttacagtataacaattagtgtaggtatctgacttatagaaatgcaaagctaaactgtagtcggcttgagatccatagttaggtcttattctgggtcttgcccagggtctgacacactcaaaaaatgcttattcagtcaatcacagactccaatcaaaatgtccagttaaaacagggaagcagagtagaaacctattgaatgcagaagactttattgaggccactctttcctaaaattaatcagcaggcatgttctccagaaactagtttgaaattctgtaatttaaaaaatgtgaactgcttgtataactccatcctctcccacttttctgttttctagtgtctttttaggtagaattctaaagaacttaaaattttggctgccgtggaaaagaatattactgggaaatgggtcttctcagtcaaatagaatcacagttttaatactctttccactgaatgggaaccacttttttttttcctgcaattttgcctaaatcaacagtgtgttttgtcaatgatgttacacctgagacttgtgagtccttgccttacttgggttcaatgagagggtgagaacattcacgtacagggtctgacctccagagatacttcaacaagtgaaagcttttgacaggaaatgttctgtttaatcttttgttaacatatctgtccaatataccttgtatcatcccagctctggacctccgttctcaggcttaaatggtctcctgatgtccaatgatgctgcctccatgatccttccccagtcatagccagactgaaaaggtcacacccatctctgaactacttttgtcatttgcacctctcttaagtcccttattacatgcctccagatactttcttttgtttcttgtcttcctactgtaccctttggggagagggaacatgtcttatagccccagtcgaatggtgcctctaattttcacccagttagaatcacccaaaggcatttcactttgctagaacttccttgggtattgttgaattcctgtcattggaaatgtttctgccccggttgagcaagcactgaacaggagtgttttagagggaattaaaacttcaaaaaggagaatagagaggctctaccatttaaatgcaagtcgcttgaaatctgtagaccacagtagcaagcacgaagcaggtattcaataaatgtggtgaattcaatgtcaataacatgctccagtcttttgtccactattccccgagcctacctaaccaatgggcaaagtggtactaattgccatcattaggaagcacatgctatgtgtcagaaagtatgtaagaattgtctcttcatccatctctgtctatatctcattttatcgatcttattgacaaatgagaactatatatagatctcattttacagatgaggaatctgaagctaaagggattaagcaatttgctcaggatttctcaagcaatgagtggttagacttagtttgcaaatttatgactctgctcccaaattctcattttccctcctacagctggataatagaatttttaagaagcatccttccacacctcctcacctatgaccttccctccacttgctccactgatgcctaaaattctgtttttggagttcacttagtttatgactttgattctggttaacattaaaatacccaggacatgggggaggggaagctgttatcaatcttagtttagtcagttaatatagcgagttgctcttattcattactcaacaagcacttattgactgcatactgtacatcaggtctgtaccaagctttggtgttataaaaatgaatgaagtttggcacttacctttaacattgttgtagtcacatataggagaatgtaagagattattatgaaacaatgtagtaaatgtacaatagggaattctagataagcacagcagagaagcaaccagctccgtttcaggtcctttcctgagactgattcggctggaagggagtaggtcccgccaaatgaagaagctgtgggaagacaggaggacaagaacaggctccacgaagagatttcagagcagagctgcgtactcctttttctttttgtttcttttgctctgtcacccaggctgaagtacagtggttagctcacggctcactgcagctttgacctcccaggctcaagtgatcctctcgtctcagctttccaagtaactgggaccacaggcatgcatcaccacactaggctattgttttacattttttgtagagatggggtctcaccatgttgcccaggttggtctcaaactcctgggctcaagcaatccgctcacgtcaacctccccaaatgctgggattacaggcgtgagccaccgcgccaggcctgagtaatcctaatcacaggattttaaaaagaaacttcctgcgccacccattaaacaatatctcctaccaatttggtagtaaatattttgctaatagtacctaatttttaggtaggcactgtgtttatacatatatccattccttcttttttgattgtctttctgtttaatgggcagctacctctcttggcatctagcagaatgagctgctgcagtttacacaaaaagaatggagatcagagtactttttgtgccaccaacgtgtctgagaaatttgtagtgttactatcatcacacattacttttatttcatcgaatatttcaccttccggtcctgcgtgggccgagaggattgccgtacgcatgtctgtacgtatgcatgtaactcacagccccttcctgcccgaacatgttggaggccttttggaagctgtgcagacaacagyaacttcagcctgaatcatytctttcaattgtggacaagctgccaagaggcttgagtaggagaggagtgccgccgaggcggggcggggcggggcgtggagctgggctggcagtgggcgtggcggtgctgcccaggtgagccaccgctgcttctgcccagacacggtcgcctccacatccaggtctttgtgctcctcgcttgcctgttccttttccacgcattttccaggataactgtgactccaggtaagcaaggtggggtagcagggctggtgacttccttttttcagggaaattcataaatatcgttatttgagctgatttgagatrgtgaacaaaayggacttaggtccattttggggctgttttcaaagacgggctgttgggttgagtactgtcgcctctcatcccccatgttggcagtatttccagctcccaaccctttgagcaccaggaacactgcagagggagtaaaatcacttaaccatacaaggtaagaatatgaagaagtcacgtggctcggaggttttggtggtagaggggtgcaaccgtgattcacggaggagaaaatacttctgaggacattttcaggcctactttggaactcagaatgaattttgcaatgctagtttcagaaagggtgtggtacccgcaaactggggaaagttgagaagtattggtgggtctggctggctcttctccctggctgacgttgtaaggctgagatttaggcatatggactgcccttctttttggcatttttaagcatcagatcgctgttcatctacttgcaactgcattcttctaagcggaaattattctcccttcagttttctgggtttcagcataactttaaacaagttacacatttcagatgcrtattcttggacttataaattgtaatagctgcttgtagtttcttactcatatgctgtacactttttcttatggcttcatttaagcatatcatactaaaaaccaacatgccaggytattccagagacttgtaaccagatcctcagagctgggggctcttagacatatttcagcccagccccctcattctgtagatgaggagcagaactcacagaggtgatctggtgtccaaaggcacacagcttgtaagtagcaccgctgagatcaaatcaggccttcacacttgcagctcgggatgtttccacaacaccgtgggttctgttaccatctttttcatcccctacatctcccgggaggttttcgataatgggttccaaacctcagtccctgtcagttagtgtaagtgttcgatgarttccttcatgggtggagatgaagcctgtctgaggaaaggagtctccaaaggaaatgagtcagcaggtttatatctttgcttcctaacgccttgaattgtgccacttcaatccctctgggttgyggattgactttggggctatgcagtctcagcgatttgggccattctggtgtggctgagtctggctgtaagtttactgcttggcaacagtgggctgggtcagtggtcaagatcaggcttctaaagagacaggagcagctatgatgcttcagarcaaagcagacgcccccctgccatgggaaattaaagcaattactaatagctgtattgtactttcttgcccacaaagcacttttcatatacattgattcacttaatcacttcgtttagtcctcatagtctttcacattgcagaaacttcaaaatatcctattttcttaatcctgcacatcctttgctcctcaaagacttagaatgtggacaacagaggttgtgttttttggcattccattactgatattataataggcaaggtttctcatggcattccctaaggactggttataccaaatacttgagagatgtttttcaccatgtctttccatctttaaaatgaggcaggccaggctaaatgatatctacratactctgacacagtaaaaacgtagttttttttttttttttcttgagatggagtcttgctttgtcacccaggatggagtgcagtggcacgatcttggctcaccgcaacctcaccctcccaggttcaagtgatttttctgtctcagcctcccaagtagctgggatgacaggcacgtgccaccacgcccggctaatttctatatttttggtagacacagggtttcaccatgttggccaggctggtctcgaactcctgacctcaagtgatctgcccgccttggcctcccaaagtgctgggattacaggtgtgagccactgtacccggccaaaagttaaggttttaagggatgaaaaaactatactcatagctctgtttaaatatgcacgcccgtgatgtgtgggtgaagagtgtggttgatggtctataagtaaaatgaacatatattgttcaaatcaggatatgtttgagagtaaacggggcactgttatcaatgtcaagacaacagacataaaccaggattgtcccaggcaaagtgggatgtatatatcctacccacaggacttttttctcacctaaatggtctaaagacaaaaaatgtgaggaccattggctcagatgcataaaaaacttaggaaatcttcatacaaagaccagtgacaagctataagtctagagaagtgagcacggccctacccccagcccagtacatgcgtctccattcactggggcctctctgaattgagtcagttctccctgtcccacgtttttgcaaggctaactcctacttatcctgtaggactcacctttaatgtgacttactcagttgtcactgtctctgaggaggtgtcactgaggtttctagtatggggggtctatcactcctggggatcccatagtgacttgggtgctcatcaaaacacttaaaacagtcatcataccactaactgacagctccttggaggcaggggctatgtcgttttcaccttttcttaatgcttaccctgacacaaattaggtactcagttaatacttactagatgaaagcaacgtcataccaagagtttacaacataagtggcagaaagggaacaagggcttcttcacgtaggaaaatcatagggaagaagttttgtgtcgattgaacaaaccatgcaggatatgttgatatcttcaaggggagacttcaggacatgcaggatttttggaactcgagagacttctgagagaacaaatgccagcaaagatgcaattaacaagaaagcaggtgatcaggtgtggcggggaagtgccaggctgggagctagaagcaatgaattctaggtctggttttgccactctcactccctgcgtgggtggcctgggagactcacttcatctttgtctgcctcattttcctcatctgtaaaatgaagaggtgtggccagcctagatcctctccaagatcttgtcccactttcaaggtttataatttgcacagattgcgaaagcaaggtacttggaaataagttcttaaaactgcatttgtattactgcttgaacttccatctatctcactttcctatggttaaaataaagttccttttaaacttttaagtgctgaaagatgtagcgttttctacattgcaactataaacgaagttctccttgttaaaatggttacagggttttcacagaaatggaagaagacccttgtgacaaggcaacagaatgaaaaaaaatttgtagcaattttagcactttcaacagaagtcattaggcacattaaatttattatataggaattgctaatctctactctggtacttgcaattttatagcatttgatcatgcaaaatggtctgtgtaggaagtttgtattttttccaggtcatgtattgttaacattgctgaggtttgtttaaatgctttgattgtcttgcaacacagtcatgtggcaactgtggccaaagtcatcttttgagctacctcagaccagatcaactttatagtgtttttaggtcacttgggactaatcacagagccactgatcagatttaccgggcagtatttgattgattacttagtgggtgattttttgcaactacaaccttttccatgtacagaccttttctgtttcctttagccagcatcaaacaatgctcttgccactgggaccccagatactaagggctgtatgaccttcccagacatgaaggagaattttctgagaaaggagccagtcagcataggaacaggaaggcagatctctttgcgttcatgcactgaggattagcatgcaaaggaagggactcactcaaagggaaggtccgccaatggtgagagaaagccccagagatgttaggatgtcagatgtgcactgatttacatctccaacagggacctggatctaagccttgaattgcaacacagcattaattgtattgtgtaattaactacactaaaagccacaatgatcttgtatccacaatcatttagactaaatgtatctcaaaatgttgtgacaagtgaatgaataatgctttagtgaaataaaatggtaaaatgaacatctcctcaccatttgatccactcctaagatccatttgtaggtgtttgcagccaaactccctcagcacattaagatcttaaacaccatctttctatacaaaggaaatcactaaaagtatagtttgttattgactatgcaaaattattctagtttctcttggaggataataaatacgtgcttggaggagctacttgtgtttgttaaagcagtttgtgtgttttcatattattatcagtgcgattagctctccactggtggaagtgttaagaagctttcagggatctgggtttaggcttctctatttggtgaagaaataactcattacttcttgtacatgttgagttttacttgtagatgaacttggcattactaatattaaatgtgctgtggaaggaagccaggtttcctattctgaaagtctgtccacagattccccaaaccttttgtgaagagtttctttatgttttcccagtggcaggcacactgggtgaaacactcaacaggctttcatttttgcctcagtataccctgctgacctcagtatacacctaatgccagtcacctttccctggggtgtgatgtcacctgtaggcccttgcccctgccctgaggggagaaggagtaaggttgtgggctttaaagaaaagtgagaggcccacctgacttcagggggcctcgtggtatatttgcaatgggaactggcctgagcgcatggctgtacttatcagggacatatggagaaggaggaagcccatggaaatgaccagtgagcatgaacagagtcaataaaacattatttttggataatgaactcgctttttcagactctgagatataatcgatttaagtccatcctacacacaagccatatatcccataaaagggagaattctgaagaaatgtttaaagaccaggagtcctctcctccatcttattctcgtctttgcattctgaatttgtgtccaggtataaggtgcaaattgcaatcctattcatcatgcctttgactcttgacacacgtttgggtactggccaaagggagtcctctatcttaagcagtggagcttactttctaatgccagggtgcatgtcctacctgaagaccttcaatgtcacattcggcccttgtgtctgtgtgtgtgcgcctgaggctttgggggaacacttcgagtttaatccctgtactgctcaccccggggtagtaatatcaattcatttcccttagaaacatgctgtcctggcttaggcagaacctcaggagttcatgtagttcagctctgctcccagaaagggaagccctgactgcctgaatttacctaattgtctttggagtcgatcagtaactaccagactaaataggtaggtagacctttattagaacagtgaagctttttaaatctgaggaccctgttacactcttaaaaattaccgaggaccccaaagaactgtttctttaaaaaaaatgtagattatatctatcactatttaccaaactagaaatgaaaaccagatacattttgaaatgttcatttactaatttattaaaataatataataattaaatactaatatgaataatatatatattaaaaaacattttctaaagtgaaaaaatgtaatgagaagagtgatattgtttttcatttttgcaaatctccttaatatttggcttaatagaagggatgtcatatagcctctggaaaactccgctgtctattagagattgagaatgataatgtcttagtattatcatgagaatagttttaacctcatggacctcctgaaagggtgttagggactgccaggagtcaagacacaacactttggaagttgctgtgttaaaattaaagagctctgagatgtgacaagatgcctagttgctgctatatccactttaccaggctacatattttgaaactgttccctcttttctttaactcccatattacttattataccactcacatgtcttgggcagctctgtattctagttatttgtctgcatatctgcccaaagagactatgagcttagagaaggaggaggtccactgatccttgtaacactctgggtagtgtcttacacacagatgcgtattataaacgcaaacaataaccgctgctgtttattaagtattgttatgtgctgggtgtcctgcaaaggcattagttactttaagggttttctagcacttctcacaaagcaccacaaaccaggcagcttaaagcaacagaagctttattcacccacaggcttggaggccagtactttgaaatgacgatgtcggcagggtcatgctgtctcaaaaggctccaggggagaatgttccatgactttctcttggtttctggtgttgccagcagttcttagcattctttggcttgtggaagcatccctccaatctctgcctccattgccatacggcatgcccttcacacaggtgaagacatttgtgtcttcacatcttccctctgtgtatgtctgtttctgtgtctctcctcttattcctttaaggacaccagtcatatcggattagggctcacctaactccaatgtaacttcatcttaactaattatatattagttaagaaataggacataccctgtttccacgtaaggtcacattcacaggtaatggggattaggacttaacatatctttttgggggacacaattcaacccattacacttactaaatattaaactgaacaatgcaaaactgctgcaattcgactgtttttgttttataaaagttttaactttgtagtttaactgaaatcctaatggaaacaatatgtgataaataaaaccaactgatgttgattagtgctgtcaacttttctgacatatgctggagaagagatgtgaccactgggctcccgacaatggccactgtggctgagcaggcccaagactgcagagtctaggcagagctggacacacagaggacctcacatgccttcagacatttgcctggaagtttcttcacaactgatcttacttttgaatttacagaaagttccytgtttcttctgagatcaattactttgtttaaatagaattcttatagtgttggcagaatgcagttgagaagacgttaaagatgctttagaaactaactgctcccttgtccttgcttccaggccckcaatggatgccctgcaactagcaaattcggcttttgcygttgatctgttcaaacaactatgtgaaaaggagccactgggcaatgtcctcttctctccaatctgtctctccacctctctgtcacttgctcaagtgggtgctaaaggtgacactgcaaatgaaattggacaggtaagccccaaaaccttgtttctactttaagtgggaatacagttattagaacccataggcagtgcctayggaaaaaaggaatgtagactttgtggccagaattggtcaagattcagaactgtgccattccaggactctcttaatcttttttttttttttttttttttgtgagacagggtcccactctgtcacccatgctggagtgcagtggtgcgatgttggctcactgcagcctccaggttcaagcgattgttgtgcctcagcctgccgagtagctgggatgacaggcgcgtgccacaacgccaggcaaatttttgtatttttagtagagacagggtttcaccatgtggccaggctggtctcgaactcctgacttcaggtgatccgcctgcctcggcctcccaaaatgctgggattacaggcatcttaatttatttttaaatgtgaaagctcgcttgtaggtaatgcaactcacatctgggacaggcaccaggctgtgatggagaacctggagatctgctgggtaatcacagctttttcattctgacttataatattttcaatttacaatggttttattgagatgtaacctcatcataaatcaagcagcatctgtatcgttttagggtttctttctggctatggttgattatctagctttgtaaagttcttagaccttcaaatgagacaattttcctgattgttccgttttaagtcctcakgtacttttacataataggtgaatgttcttctaattctatttcattattactcttaygctaatcattctaggttcaatagaatttcttttctattagctcataagcatttaaaaaggcaacaccttcttgtattcatatgtgtccagaaagtatggcccataaragttatttaggtaaggatgaagaatttacacttgggacttgaagcagcttcactcctgygaagaggagatgtatcttgacatcaagccacatctctgaactgcgcaactccactatccctacccaatctcccattcctcatttctcatctaccattagagaaaggccagcgaaagagaacttccgggtagtgggtctgttcctcagtaattcctcaagctcttctcagtatatgcaactggttccccagcagtagttacctgggctcttaaattttctggtctccttcatccatctttaggcatgagagttatgcactgtctgggaccagcatttgaccctgcaatgctgaggctatgtaattcattgggacaatgtgccggtttggcagcgttcgttatctgggttgtggaatcacagcatggccattatgagttatggagcgaggagggtgtcatcttatgctgacattacatgttgtggtgttgcaaggcagaaaagatgctggactattgsttggaacaataaaaaaaaaaaaggaamaaaatacaatgatttaagccctccaaatgatagtatcctggttttaaatggcttacaatattattacaagaataattaacagtttgaatccatataatattttacgtgttttacatataagtaatcctcattaacaactcaggaaagcaggtattttcagcccattttacggagaggaaaggaggctctgaagagttggagaagattctctgaagagttggagaagaggtggtgaaggctgggattcacaggcagggccatctgactctagccagcccagggcagcccaccatttattgtagctgcccatcagaaatgacacatctatttacctggcatttgctaaagcacccagagggactagacagactctggctagaggcacttgtcctgaaatctgattcctgcctgatgatggtgtctcttgtatcaatctctctctctggtctttgaattggatagaaattataacccagcttcatcgttctccaagtttggaaatccttctgtgtgagtattaagggcatcactttgaagaaaggacaaatgttctcgatggttgatttggaagagtacctttatggtagtgtttctcagtggggacaatttgtcctccccttcccactctgggataatctggcaatgtctggagacattctgggttctcacaaataggaggaggatgccactggcatctagtaggtcagcgatgctgctaagcatcctgcagtgcccaggacagccccacaaagactcatccagcctgaatgtcaatagtgctgaggtygaggagccttactttacgggaactaggcaggaggagtctgtatgcccaaggacgttggtcattatcacgtgtccacttcagtacagcactactcagaggcaatgytttttgggtaacggatttttctcttaacaggttcttcattttgaaaatgtcaaagatrtaccctttggatttcaaacagtaacatcggatgtaaacaaacttagttccttttactcactgaaactaatmaagcggctctacgtagacaaatctctgaatctttctacagtaagttgtttaaagcaagtagcaagacttaactytttacaaggagtggcattttcatgctgttagacctayaactttttttcagtgaaattcctttctaggatgttcacttgtgatttgaggctttaaataaataaatcctagtggagaggttgagtatagtgggaatcaattgcagtcacatcttctaactcaaaatacagagaagcttatgggctttccttttctctctcaaataaatcttaccctttcttttaccttcctctgagagaatggagaacagagtaattaactctctaataaatgtagctccatagacaatgagctgtcttacagagtgtaagacagctaatgatttaaacttctttctccttaaagagcagggcatatggcctgggacaatgttttaagctctccacctcattttttatgcacacattcttctgatgtttctcaaaatcagtaagaaaaataataactatgaattcacaattttcatcagtcacaaattagttttgttggctgggctgrtcagatggggatctccacaggcagctctggttatataagtttagccattgctctaaggaatcatacaaacaccactacggtacccattgttgtaatatttaaaaatctgtatttgaaacacacagacaatattctagactacatgmagtttccctctgtacttcagtaacacagagttgatttagttcctgtttggatggtcagaatttcaaggtttccaaatcgaaaagctagactaccagcttttaaatattttaccatgattttgcaactttctgcagtaggtatttttgtggttaagatcttttgaggacatgggttactagatattgtgagtatattttttgttgcttaaagatacatacacacaaccatttttcttccaacaatcatctgaagaatttaaaaaaaaaaactgagatgtgagttgaagcctgagcatacaacatttctagaagctccctaaatgatcattaaagagacaattaacacatttttattgctggcagtgaggacaatggaggccctccttcatctggctgaggctttctaatgttttcaggtgagattggttctgtcagtcaatggtgacagtgagtcccaaggttgatttgcaattaactgaagctaagttaattggctaaggctgaagctgctctgaagaaattcaagaagccctgtgcttggaagtgaactgacatgacactgaatcaagttatatttagtttcactgaacttccatgcaacatctggaatgatcttaaccagactaggagttgtaaagttttgttttgtttttttccttggagatggagtctttctctgttgcccaggctggggtgcagcggcatgatctcggctcattacaaaagattttttaaaagactgctttccattgctcctgctaggtgcacagcatctgcaaatttactagttaaaggtccaaacaagtgtgctctgtggaggatctcttgcataagaactatctgggtgttaaaagggcaagttcttcaggcccttttaacacccaggtagttctgattgaacccaggtagttctgattaaacccaggtagttctgattgtcaaggtgggaatggggtttagggttgcacattttaaataagcattagaataagaactcctgttatgttctctcctgcattgtgtttccaaccttaatttgcagatggcacacctggaaattttgttaaaatgcattctgattcagtatgtctggggtggggtctgagattctttatttctaacaaggtctcaggtgatgctgtacaccaccttggaccacagtttgagtagcaagggtctacaggatatttagttcagcaaagacaagagttttctgctcataattctgttttctatacatttcctatattctaatatatatgtatctgtagacatacaaaattttcatgtttctgaaattacaacccataagagaattgggcatatttaacatagtgttttccccaaagctgatattaaattgatagatgcatttaataattgaaattgtcttataattgaaaaaaatgaaacattcaatacaaagaaattcactgacttctacatgaggtttcaattcatatagtgttaccaattttgaaagtgtacatatagcagttgatattyaataatccttttgttagaagagaataacaatgcaatagcttgactacagactctgattttatgaactgcatgtttttcaggagttcatcagctctacgaagagaccstatgcaaaggaattggaaactgttgacttcaaagataaattggaagaaacgaaaggtcagatcaacaactcaattaaggatctcacagatggcaagtaccctttaattgttctgctatcaatcaccaagtaaacagggccttccatctcataaatgtttgctccaaggataaaaaaaacatctggaggattctctggatatttttactacacaagctaaattctttcccttcaagcctgtaaacaacttggatttctgggcaattcttgtatcatctcatcacttggtagaaactgttgatgcttcagtgttagtttactttgtcttgctctctgacgagctgtcacaggccctagtggaatcctagctgcgcctctaacaaagtatgactttgggccaatcatgaggccatttttcagtctggaaatagagggactggattataacttcatgatccccgaggcccctttcagctgacaaattttacaaatttgttaaggaaaaagggacataggcaacatatgtaaaagaaaaaccggctggacgcggtggctcacgcctgtaatcccagcaytttgggaggccaaggcgggcggatcacraggtcaggagatcgagaccatcctggctaacacggtgaaaccctgtctctactaaaaatacaaaaaattagccgggcgtggtggcgggcgcctgtagtcccagctactcgggaggctgagacaggagaatggcgtgaacccgggaggcggagcttgcagtgagcagagatcgcgccactgcactccagcctgggcgacagagtgagactctgtcttaaaaaaagaaaaccaaaccaaacaaaaccgtagtgtcagcttgtcctcggtgccgcagctccccatgctggtcgttcctctgatagccccggggtccaagaagctcctaggttctttctccggctcagtgcttcccccaggcgtctccctcgtcggactcctsgtccctcccttaaaattgccggtgagtcgtcttccttgctggaaaagaattagggttatgatgattttgagggcaaatcagtgactttgtccccctccccagtggatatatttataattgcatctggagggacccgttgggaggccgggccgaatctagtcatgaaagaatgaagcctaggcagtcgctgctgtctagggagggatacacttccggggcaagggagacccacttcctgcgagaatgactrgcgcccccagctactctgtctctgtactgactgaggaagttctaacaggacagtaactgcaggatgagaacatgggaagaacagggtctctggagtcattcagcacctaggttcaaatccagacactggtacttactaactgatatttggacacaaagcttcaatttactgaactgtaaaatgaggcacatgttacctgatttartttttaaaattgtattatattgtgttttatttcaataggttttggggaacaggtggtttttggttacatggataagctctttagtggttacttctgagattttggtgtacccatcacccaagcagtgtacactgtgtgcaatgtgtagtcttctatctctcacctccttccactcttcccccaccccacaaagtccattatgtcattattatgcctttgcatcctcatagcttagctcccacttataagtgagaacatacaatgtttggttttccattcctaagttacttcacttagaataatggtcttcagaccaggcatggtggctcatgccataatcccagcactttgggaggccaaggcagctggatcacctgaggtcaggagctcaggaccagtctggccaacatggtgaaaccccgtctctactaaaaatacaaaaatcagctgggcatggtgtcacgcacctgtagtcccagctacttgggaggctgaggcaggataatcgcttgaacctgggaggcggaggttgcaatgagctgagatcgcgccattgcactccagcctgggtgagaagagagaaactgcgtctcccaaaaaaaaaaaaaaaaaaaaaaaagaataatggtcttcagctccatctaggttgctgtgaatgccattctttctttcattttttttttgagatagaatgttgctctgtcgcccaggctggagtgcagcggcacgatcttggcttactgtaacctccgcctcccaggttcaagggattctcctgtctcagcctcccaagtagctggggctacaggtgcgtgccactacgcccagctaatctttgtatttttagtagagatggggtttcaccatgttggccaggctggtctcaaactcctgacctcaggtgatccacccgcctcagcctcccaaagtgctgggattacaggtgtcagccaccgcatccagccatgaaaagacttctgagtttgaaatgggaggctcagggttgaagttgaagctctgtcgtttaccggctcccacacttctttgttcttcaggtttcttcaataacactaatatatatttaacatattatatagcattggcaggaccagttacataatttgcatggtccagggcaaaagtaaaaatgctgggcttcttgtttaaacatttattaagaattttgaggtagtgacagctgaacattaaaccaagtgcagggtccttcacacaggggtcacaggcctgtgaagtgggccctgaacattggtctgaaaattggagattaggtgaatgaaaaccctttataaaaaacctgtgggctattcaaatgtgaggagttctttttattaagggatcactccccttgaattgttttggctattgggatttagctttataataactgcaattgtgattgagccctatggtgattacagttgaccttgaggcaatcagcctgcccgcaaggagtgcaattgagagagtggatggagagctgtggggtgaaggggacaaccttcagacatgttttccagctgaggaaactagaacagctccttggcctctctgagcctcagtttactgcactgtaaaatggagataatgatctttgccttataggaccattgtgaaaagactgagataatatatgtgaaattctgccataaagaaagtgattacgtattttcattcaagagcacaggctttggagtcagaaagagctggctttgaaycctgaatccacccttgtttatatatcatccttgaaagtgacttatcatcgctgagtctcagcttcctcattcataaagtaggaagaaatatatataatrtgtatcaaatagcttgtatactgcctgacacagaataggcattcagaatggtagctgtgctttccttcttatttctcttcctttcttccctgctccttcattctcctctgctgacctctttggtagatctggttgtgtcaaggtagaaggagagaaargagtccttctgaaatttgatggttggaaccatcaggccttacatggtgtgactccatgaagtggtaaatactcagtgaatatgcatgtgaatttcagatgtagtttggaagaataattctgctacttgtgttttcctaaaattgttgcaggccactttgagaacattttagctgacaacagtgtgaacgaccagaccaaaatccttgtggttaatgctgcctactttgttggcaartggatgaagaaatttyctgaatcagaaacaaaagaatgtcctttcagastcaacaaggtatgtggggcagcrtgtagcagtaaaaggagcccaattatagatgtgaaaaatgayagggacagagtggggcataaatccattccaatgaggaacctgagggcacggccggcaaagtgcctttcctgagatgaacagctggaaggtaagtggtacaaaaagagccagaatccagaggccccccctcctcttttccataatgtcttcaaggatctgagctgagtgaaactttatagaatttgtaacccagcgaggaaagctaagtcaccagctgaaaaatagctacaaacatctgagaactttagcagaaaaggaaaagaccaaactctgttatcagaggactttggattatcatgaaaccttgacatctaggaatcttgttcctgattgattaacttctctaacatctcatttccttatcggttgatagcgaagtatattgttctgggattttaatttataatttataagatgctttgatggctgggcgtggtggctcatgcctgtaatcccatgactttgggaagccgaggagggcagatcacctgaggtcaggagttggagaccagcctggccaacatggtgaaaccctgtctctactaaaaatacaaaaattagctgggcatggtcgtgggtgcctgtaatctcagctacatgggaggctgaggcaggagaatcagaccctgggagacagaggttgcagtcagccgagactgcaccactgcactccagcttgggcaacaagagtgaaactccacctcaagaaaaacaaacaaacaaacaaacaaacaaacaacaagaccagatgctttcaggcacttgttggctgtgaaaaaacaaagtatggcttactcattgacatcactggaagtcattatgggaagaattaagggcctgttttgcaggccagtctcattgatactgttgaagtaaatatgttaaataattaatagagggtgggcacagtggctcatgcctgtaatcccagcaccttgggaagtcgaggcaggcagatcacgaggtcaggagtttgagaccagcctgaccaacatagtaaaaccccatctctactaaaaatacaaaaattagctgggcatggtggcatgtgcctgtaatcccagctgctcaggaggctgagacaggagaatggcttgaacccaggaggcagaggttgcagtgagctgagattgtgccactgcactccagcctgggtgacaaagtgagactccatctcaaaaaaaaaaaaaaaaaaaaaaaagaaatgggtaaagtacctcttttgtaaatgagaycaaggaactgagactggaaatttgacccattttattggaaaacccagacatctatatgatgatgtgatgtggtctccgtgggtgggatctgacttgtgttagactggaagcagcacttcagttagtacaatacttgaaggtagcttagttacctgtagctcctacgcgtcagttctagttttcatgcttctcccagtagttagagtacttagcatcaatatcttgtttttgccaaatatagtagcaccttcttaatgctagcatccatgaggaaaagccctgcaagatacaatctatgcctgggttagccggatggcttccattactctttctttctttgttcccatggaatttttattcatactctcccctgtccactgccagaatttgcttttccacagtgaaatctgtttacttacatagatcccctactagcgcatgggatttttaaggtagggacaatgccttattcacctcagtgtctacaatttctggccaagtccctaacacatcagtaggtgctcagcaaatttgctgaatgaatgatcagtccctaagggtcagtttgcttaaacaatcaatagcagacaaaacctgactggcctttgggactaccatggtttcctatgcaagacccattgggcattttcactgggagaagacaatgatgactgttactgctccttaccaactcaaaatatccatgggagctgagggatgggtaggaggtcctcctaacttcctgartttagcttcccaactgcagtggtcttctcaaagctgactgcagagacaggattgaccctgcacacaagaggtctgtctgagattctagagacatagcttatgctcttcacactcttgtgttttgcacacacaggtccttgagttttaagcatggctttttgaccttctcagtattgtcttttatctggagtggaagtggaacgtgactttacccagcctctactgtgagttagggaggggtgttggccccactggccctgacggcatccacacagcctttgctgtcatagagtgacccttctggctcctttgattagtgattggctctcctccatagcaagggctggcaaagggttcctaactctgtttaagtgaaatctgaaacrggttgccaatggtgcctctcttcaagaccccagagccagcctggaaggaacaccatgaaaatgttgcaatagtcaatgagtagaatgtggacttttgtgtcaaccacactaagggtcgtacttttttcattaagaaagtattaacgtgtgttttttgagaagggaggaagaatgtgtgctattcctttattcttgctattaaatcataaagctgggttatataagatcctggaaactcagcctttatgaacagaattaataaaagtttgaaatgtcattgatctctcagtgtttcacttgataaagcaataaaatgctattcayagctgcatgaggctmcacccttcttttgaatgcagatgctattacttctcctttgttttctttgaattgctttgtccaccctagaactttttgagtgacattactaaaccttttcttatgccccgtggtgtctccggtaagggttagactaaattggtgaagttatatcattaaaagtttagtatagtacttattctgataaagatatctatccatatatatctatattagtatatatgttgtattatattttctggggtagatagtctttatttggtcctcttttcagaagatatgtcgtctcaacatgtgtttcagaaaataaagtacctgtagtcagtgccgataagtgaaattgatgacagtttttggaggccacaactatgtgcacattcagaaactatgagcagtctaacctgttggagatttttagacaaatttctttaggaggaatatattttaagacaatatcctctttaggagaaataaagggaagaattatctgttaacctccaaagtagtatgttttcctataattctgtttttggttacacatagagttgaagtcttccattatttatcagccaaatattcagtgasaaactacaagctggggtagaaaatgagacttagtttctgccttgactgtattctagttggggtgggaagtggaaagacaatcactagataatatttctaacactgtggcaagtgttaaaatagaggtatatacaaaagtaaaataaataacgtttagctctgctggagagaggtattggggaaggttcagcttagtatttgaagataccagatgcaagtttactggagtattatccttgcaggcttgatatgaagyttgaaatttctccccaaagagatttagttaacaggcaaatatcccatgggaggtatatgtcaataggttatacaacattactgtcagtcttttacaacttagcgtgaattaattttccttcaggaaatcagtcatctctggagcagagacaggaggccaggtgttaataggagcaaagagaagaaaaggcctgggcagtgcttggasataaaagacctgaacgatcagacccttccatgggctccctttaagaagagcagggagagaccaagggctaaagttgggagactgagaaaatgcagcccaccggggcattacttatttctccagctctgatccgctgttgtactaggggtctaatccggcctgtgtctgcctccttcttgaatagcccagagcattcatctaaacagccttcctacagcagctccccactttaggtgtggccagacaggagttctagaccaggttgtctcctgggacattgacaccgcagccaagtttattggtgctgaggcagacacagttggtgtggttggttcaggggctagcattggaatagcgtttggcagcttgatcattggttattccaggaacccatctctcaagcagcagctcttctcctatgcgattctgggctttgccctgtctgaggccatggggctcttctgtttgayggtcgccttccttatcctcttcgccatgtgaagctctgtgggggtcacctgcctgtccctgctgctgcggctgcacaccattcttggtgctgggctgtgctaagctttaccattgaacacaacgtttctgaaaaaaaaaaaaaaagagccaagcatacagtggagctcaaagggacttagagataattttaaaaagacttagagataattttaaagaacattttcctttttaaaaattatgcaatactccaagcattcagaaaatgatagagaataataaaacgaacacccatataccgatcaatcatctttttgaacttaatattttgccttaattatttcagatattttaaagaaaaaatataacaacagttgcattgctttgtatgtatcccttcactgctcactccactgtcctgttcctctttcttcctccccagtggtaaccattattctgaatttacaakttcttcattctactgacaagaatactgaggcctggagagattgagtgatttgctcaaggccacagaatctgtttatgtcacatttgggactaaaaaccaaggttcttatcttcaatttagactttgttaattagctcagatctgagtaggtggcagtacagtggggagtgggcaattcaaaccaaagacaaacagagaggtcacaacaaatattgttttgttctgctatgtgctaagtttgttgttgttattgttctgttttgttttgagatggagtctcgctctgttgcccaggctggagtgagtgcagtggtatgatcttggctcacaccaacttctggctcccaggctcaagcaattctcctccctcagtttcccaagaagctgagattacaggcgtgtgccaccatgcctggctgacttttgtattttttagtagagacaaggtttcaccatgttggccaggctggtcttgaactcctgacctcaagtggtctcccaaggtgcaggattacaggcatgaggcaccgtgcccagccagtttttgaaattaggcattttattaggaaaagccgtataaatggttatgtgggtttgcagtagaatttactttcaagtcagctccacyaggaatagtttaaagatctcataggcatctgtaaagaataacaaacgttgcctatatktacagccatacagtcttatttttaaggtttgatctatgcaaatacagtattatatatacttcatgtaatgtgtaacatgtagattataaagtatatgaataacttttcaaaggaacacaaactcttcacaggacagtctctggtttcagtgcaatacagtttggatctgagtggatgatgaattataagccataataatctgacactgtgtcaagagcaaatttgtgtatatatatatatgtacatatatatttatgtgtttgcctatatatgtgtatatatgtgcatgtgtrtatatatgtatggggtatatatatatagtatgtatatataagtgtgtatatataggtgtgtgtatatgtatatgtatgtatatgtatgtatgcatatatatgtatatgtgtatatataggtgtatgtatatatgtatgtgtatctgtatatatataggtgtaggtatatatgtatgtgtgtctgtatatatacatgtgggtatatatrtgtgtgtgtgtgcgygygtgtgtgtrtatatatatatatatatatttatgcatgtgtaaattgaaaagtaagcagtccaaattttcccttttacagacagacaccaaaccagtgcagatgatgaacatggaggccacgttctgtatgggaaacattgacagtatcaattgtaagatcatagagcttccttttcaaaataagcatctcagcatgttcatcctactacccaaggatgtggaggatgagtccacaggcttggagaaggtaaggagaaggcaggtgctctccacaaaggcaccccctgccttggcaaagagttgtgccaacaggtctgtgtgggccgtgagagctgggccggtagccctcccttattgccactggctcagtcacctccaaggacccatggttctttctggggcctttcctccttaatattaacaacagccaaaatttatttggcacttacagtgttctagggactgtgctaagttgcctaygtgcattatctcatttaattcttacagcaggctgatgagttagagactgttaccacactcttgtttaccagtgagggagctgaggcacagaggggtgggtaactggttacataattagtcaagggtgtgtgcaggatcaggatttgggcccaggtagttggagccaggttcttaactgaaggctagagtgtctccctcacctcctaggcagttaaggcactacgttgctacgcactgccaggtccactatcatgtgacctgatgtcaagcatcctctctcttgctctttctttttttttwaaattagtagatgttatttttagagtagatctatgcctacagaaaaataagcagaaagtacaaggagttcccatatactccccttcccgtcccaggcctacagtttcacctgttattagcatcttgcattagtttggtatgtttgttacaattgatgagccaatactgacatattactattattattattattattattattattgttttagagacagggtcttgctccattgcccaggctggagtgcagtggcatgatggtagctcactctaacctcaaactcctgggcaggctggagtgcagtggcatgatggtagctcactctaacctcaaactcctgggctcaagtgatcctcctgcctcagcctcccaagtagctgggactaaaggcacacagcactatgcctggctttttttttttttgtaaaggtgggatctcactgtgttgtccaggctggtcttgaaatcctggcctcaagcaatcctcagcctcagcctcctgaagtgctaggattayaggcatgagccaccacacctggccttcacaatttacgttacggttcactctttgtgttgtacatttatgagattttaatacgtacacatatatgcttcaaaattttgaattatgcagatactattttatagtacacattatatataagtattttattttatatgataagggttattatattattttatttatatagatttttaaggcacaaagtttaaataagagtagcagttttctctgcaggtgaatggagttttagcttcctctctgctccctcacctctgcttagctggctgaggcctgttctccctttagtccctccctggcttccattctagctccaccccgcctggcctcaacccttggccaggaaggaagaaggggctctttgaaggcctggatcacttgctatatatccacatgggcctcagtgatttgctgactttccaggggaccatccagtctccagcttgctcctttggttgccattatgttttagccaccactttattaactgaattataattcctgtccttcttcttctttggtgcattaytctctctgttttttttctttccattttatgctttgatctttcagccattatccagctgtcttggattttacctttcgttcttaaaacgccctccaataaacatcaattattttcttcttcttcttctttttttatttcaataatttatttttcttttttttaattatacattaagttttagggtacatgtgcacaatgtgcaggtttgttacatgtatatacatgtgccatgttggtgtgctgcacccattaagttgtcatttatattaggtatatctcccaatgctatccctcccccctccccccaccccacaacaggccctggtgtgtggtgttccccttcctgtttccaggtgttctcatggttcaattcccacctatgagtgagaacatgcagtgtttggtttgttgtccttgtgatagtttgctgataatgatggtttccagcttcatccgtgtccctacaaaggacacgaactcatcattttttatggctgcatagtattccatggtgtatatgggccacgttttcttaatccagtctatcattattggacatttgggttggttccaagtctttgctattgtgaatagtgttccaataarcatacgtgtgcatgtgtctttatagcagcatgatttataatcctttgagtatacacccactaatgggatggctgggttaaatggtatttctagttctagatccttgaggaaytgccacactgacttccacagtggttgaacttgtttacggtcccaccaacagtgtaaaagtgttcctatttctccatatcctttccagcacctcttgtttcctgactttttaatgatcgccattctaactggtgtgagatggtatctcattgtggttttgatttgcatttctctgatggccagtgatgatgagcattttttcatgtgtctgttggctgcataaatgtcttcttttgagaagtgtctgttcacatcctttgcccacttgttgatggggttgtttgattttttcttgtaaatttgtttgagttctttgtagattctggatattagccctttgtcagatragtagattgcaaaaattttctcccattctgtaggttgcctgttcactctgatggtagtttcttttgctgtgcagaagctctttagtttaattagatcccatttgtcaattttggctttcaattattttcttcttaaagtatagaactaaagaaaatgaccttttgagttttggaaatgattttttttttttttttgagatggagtcttgctctgtcccccaggctggagtgcagtggcatgatctcagctcactgcaagctccgcctccygggttcatgccattctccttcctcagcctccygagtagctgggactacaggtgcctgccacgacgcttggctaattttttgtatttttagtagagacgggctttcactgtgttagccaggatggtctcgatctcctgacctcgtgatccacccacctcggcttcccaaagtgctgggattgcaggcrtgagccactgcgcccagccgcatctctctcattttttaaaacagctaaaatggatgcattcactacctatgaccctagggcatggctcagagttagttcaaattcccattaaaaaaaaaaagtaactttagctttaatttaattttctaaatctgatgccattcctagtacatgaatattctggatttcctcgtagagaaattacaataagcattcaagaaatatgtgtaaaaagctttctaattttatattcatttcactattgtgtatgcaacatcatgatccaggcatttgtttctataaatctactctctaacttaaggttgggtgcggtggctcacacctttaatcccagcactttgggaggctgaggctggcacatcacttgaagccaggagtttgagaccagcttggccaacatgatgaaaccctgtctctactacaaatacaaaagaaaatttagctgggcatggtggagtgtgcctgtaatcccagctactcgagaggctgaggcacgagaattgcttgaacccaggaggcagaggttgcaatgagcgacgatcacactattacactccagcccgggtgacagaacaagattgtctaaaaaaaacccaaacaaacaaacaaacaaacaaaaaactactctctaacttaaaatgaaaaaacagaaccctgtcctcataaatttcagtgcacatggaacactgttataggctggggaggaggaggacacagctgggtggctgctgggtctcctgagtcacataccaaaaacttctgggccatctttgatgttccacccagactgctttgaarctgggcttatcataacaccttatgttttcaatygagccaggtcttttacagttggaaataaataaaaataatttcttttcatttttgtccttcagattgaaaaacaactcaactcagagtcactgtcacagtggactaatcccagcaccatggccaatgccaaggtcaaactctccattccaaaatttaaggtggaaaagatgattgatcccaaggcttgtctggaaaatctagggctgaaacatatcttcagygaagacacatctgatttctctggaatgtcagagaccaagggagtggccctatcaaatgttrtccacaaagtgtgcttagaaataactgaagatggtggggattccatagaggtgccaggagcacggatcctgcagcacaaggatgaattgaatgctgaccatccctttatttacatcatcaggcacaacaaaactcgaaacatcattttctttggcaaattctgttctccttaagtggcatagcccatgttaagtcctccctgacttttctgtggatgccgatttctgtaaactctgcatccagagattcattttctagatacaataaattgctaatgttgctggatcaggaagccgccagtacttgtcatatgtagccttcacacagatagaccttttttttttttccaattctatcttttgtttccttttttcccataagacaatgacatacgcttttaatgaaaaggaatcacgttagaggaaaaatatttattcattatttgtcaaattgtccggggtagttggcagaaatacagtcttccacaaagaaaattcctataaggaagatttggaagctcttcttcccagcactatgcyttccttctttgggatagagaatgttccagacattctcgcttccctgaaagactgaagaaagtgtagtgcatgggacccacgaaactgccctggctccagtgaaacttgggcacatgctcaggctactataggtccagaagtccttatgttaagccctggcaggcaggtgtttattaaaattctgaattttggggattttcaaaagataatattttacatacactgtatgttatagaacttcatggatcagatctggggcagcaccctahaaatcamcaccttaatatgctgcaacaaaatgtagaatattcagacaaaatggatacataaagactaagtagcccataaggggtcaaaatttgctgccaaatgcgtatgccaccaacttacaaaaacacttcgttcgcagagcttttcagattgtggaatgttggataaggaattatagacctctagtagctgaaatgcaagaccccaagaggaagttcagatcttaatataaattcactttcatttttgatagctgtcccatctggtcatttggttggcactagactggtggcaggggcttctagctgacttgcacagggattctcacaatagccgatatcagaatttgtgttgaaggaacttgtctcttcatctaatatgatagcgggaaaaggagaggaaactactgcctttagaaaatataagtaaagtgattaaagtgctcacgttaccttgacacatagtttttcagtctatgggtttagttactttagatggcaagcatgtaacttatattaatagtaatttgtaaagttggttggataagctatccrtgttgcaggttcatggattacttctctataaaaaatatgtatttaccaaaaattttgtgacattccttctcccatctcttccttgacmtgcattgtaaatagsttcttcttgttctgagattcaatattgaatttttcctatgctattgacaataaaatattattgaactacatgtcttgttttttttttcctattaagttagactattttgaaatagaaccaagccgtgcgtttacaaaagcatccctgaagcaggcagatcacaaggtcaagagattgagaccatcctggccaacatagtgaaaccccgtctctactaaaaatacaaaaattagctgggcgtggtggcgcccacctgtagacccagctactcaggaggctgaggcaggagaatcgcttgaacctgggaggcggaggttgcagtgagccaagatcaggccactgcactctagcctggcgacagagcaaaactccgtctcaaaaaaaaaaaacaaaacaaaaactcaaaacataaaaacaacaaaaacaaaacaaaacaaaaagaacaaaccccaaaaaaccccaaagcatccctgtaggtaaaatgctcttttgaagattgaggcagactaaaaagaaataagaataattacttcctcttttcccttgttttcctttcttcctagccctcagctctgacttctttctcccacactcctttcatcctagggagtaaaagaccagggcagtgctagaatgactctcaactgcataaacatctataatggaatcagacaccttgggacatagagatcttcccagcccttttcactctaaacccaccctcaaaagtcattatattaggacactgtatgtgcttaaaacattgtttcttcttatgaagagtgtttttctcaatgccatgcacatttgttttaaattagttatggtgtccctgaacctaatattcaacatagcctcttttctgtccctattgtgtgcttgaactaaacgtgtctcctctttcaacaaatgatgagtacaaaagctgacaaatgcccccacatccttaaaagattatttgtgtgggattgctgggggtggtcaaagccagattttgcccgcttggttcatcatccctcttatccaggctatgaaatacaaaatgtgagatgactgtgaaaaacattagtgagtttttagaggaagggagagatttgtgcctctttaaaccaagaatgcagggagcttaaagtgtctcctgcaatttggaaaacactgaaaattttggtcatcttatctgggacagtcttaattcagtgatttttcaaccaggggaaattctgccccctaggggacattttcattgtcacarctggggtactgtcatctagtggatagtctggggggttttgtctaggatgaggaggaagatgaaagagggtcggtttggaaaggaagaattcagtgcattctgcaagcaccctgcccagcccagctcactagcaaactggtcacaggtatattatctcattttgtcctctccacagacctttcaggaggaaaccatgatcccatcttataaatgaggacgctgagacagagaatggatagacaacctactcaaggtcacagagctaatgcatgttggtggctatatttgaactcatgaagacagactccagagctggacttcctaacctctctgctccatgccctcttccaactgacagcgatccctgacaggggtcactgaatgaacctgaaagaattcctctcttccagaccttctctatttaggaggagttccaaatatttgtcatatcctggcagtcctttccttgtcaactaaaacatccctagagtcagagacagtccaccagtaaggggcccaattactgcctttgcttattctcacagtgaccctgaagttaagggccatgcctatctattttatgaggaaatatgggcttagaagaattggataatgcctccaaatgggtaaatagcagggcttggatttgtgaacattatgactatgaaaacatatatttagttatttccttactgatgaatattcagctagtttctggtttttctgttatagataatattactatggacacctctatacttaatcatctgtaattattattattattattattttttgaggcagtctctctctctgttgcccaggctggagtgcagtggtgcaatcttggctcactacaacttccctccctcccaggttcaagtgattctcatgcctcagcctcctgagtagctgggactacaggcatctgccaccccacctggctaattttttgtatttttagtagagacggggtttcaccatgttggctaggctggtcttgaaatcctgacttcaggtgatctgcccgccttggcctcccaaagtgctgggattacaagcgtgagccactatctgtttaagatttctaaaatctttgtgattgatatgttatgaatatatcacaatttattcattctactcttgatggacatgtgggtatttccaggtttgggctattacaaatagtaccattgtgaatattctagtacatgttttttggtgaaatatgtgtgcattcctgattgttacacacacacatatatatattatatatatatacattttatatatatataaaatgtatatatatattttagtggttttcccagtgcctctctatctttcattatgattgtataataattatgagtgattactttttccaactatgactcctaccatcaccactgccattcttggagaaattattatgagccagacactttgctagacatgacatatgttataattcagcttccacagcaaccctatggggcaccatttgaggtgaaaggtgctaaagttcagacatgcgacacaaaaaagcttgctgagcacagatggctactgagttatatggttaggacttaaaccccagctctctgactccacagtccatactttttaatcactatgatttgattatattacaaaacttacttgtatttggccataaaaaagaattaaatcatgtcatttgcagaaacatggatggaactgaaggtcattatctgaagtaaaataagacagattaatcatcttaggtgaaataacccacataaaaagacaaatattaaatgttctcacttatatgtgagagctacgatatttgatcacatggaggtagagtgtggaaagatagagatcagagactgggaggggtgagctgggggaggaggggaagatgaagaaaagtggcttaaagggtacaaacatatagtgagatcgaaggaatagagtcaatgtttgatttcagagtagggtgactgtacttaacaaaaatgtattgtacttgggtgatggacagccacataccctgacttgatcactacacattttacacatgacatggaacaaaatttcatgtgtgcccatacatttttacaaataaaaaatgaaagagacctaaagtccctttagcctgtttagtgttggttgctttgcatcaagaaattgatgattcataggaaaaaacaaaacaaaaagcttcaagggcagattttcctctatgttaaaaatgaaatgttatgttgaatagaagacaaatgaatgtagataaaaataaaagttaaatgtttacataataagtaaacattccataaatacttgcttttcaaatatgtctggttaaatgtaatttttggaaaattctgtttctttctcaggagtcctgttcagtcaactgtatggcatttgtgatttatatcagattaaaaagacttcccttctaagttttagctcttggactagaaaccactagcacaacattcttaccctcaaccccaccctacagtcatggaagatttaggtgatgggcgtttccctgttcttttgtccttgtcaccatcctctgccagacagtaacagctgcttgagtttgtgaaagctttttgagaaaagagatcaaactgtttcactaacggcaaatgactattcctctcccaaggcctggaacagacaaaggaaatggcattattctccattagagatgagatagatacagacgtgtccctggaacttctgaccgcatttgaggagtcttgccagttgcacgtggcctgaaatgacagccctccctgtctctatcacaggctgctttgcacttctcacatctcctgggacaggatctatcacacagtaaaataaataccaaggcatattttcaatggatggaaaatagagtttgaatgggcaggtgatctatgtgtttgtgttggttgcctcttgcatctaatgagggcttctctgatgacataaaacaagatcgtcttgtgtttctgaaagtgtgtctggaggaacagtagttgtgtagggtatgagaagctgctatgaaataggagtccgtggttgaaaaatcttgaaaaagctgttttgaaccaaattaaacaggttctgcagtactcttcaagctttcaagaagttgatgtggccgggcgcagtggctcacgcctgtaatcccagcattttgggaggctgaggcaggtgggtcacctgaggtcaggagttcgagtccagcctggccaacgtggtgaaaccctgactctactaaaaatacaaaaattagctaggaggctgaggcaggagaatcacttgaaccaggaaggcggaggttgcagtgaaaggagattgcaccattgcactgcagcctgggcaacagagcaagactctgcctcaaaaaaaaaaaaaaaaaaattgacgcagttgacgtcttttctgaatatctggaggagggtacagtgtctcgttccttatttattttattttatttttagagacggagtctcgctctgttgcccaggctggagtgcagtggcatgatctcggctcactgcaagctctgcctctcgggttcacgccattctcctgcctcagtctccagagtagctgggactacaggtacacgccaccacgcccggctaatttttgtatttttagtagagacggggtttcactgtgttagccaggatggtctcgatctcctacctcacgatccgcccaccttggcctcccaaagtgctgggattacaggcagtgagctaccgtgcccgtcctggtttcttaaatttatacgacctctaaacctggtagtcaccctgcatcttggaggacaattgtttagtagagtgagttttgggaaaagtcaacttagctgggaaatagacttagtaagaaaaatcaagatttttccggttgccatgtggatactatggaaagaaccctggtgtgggaggaagccctggattccagcaaccaaaccactcctatcaatacctgtatatgagggagggagggtctttatctcagggatttctgagattcctcttgaagctaatagttcacggggcccaaacaaatcctccatcctgagccatccctcacccatccatctatgtggagacggctgccatttccatccctaaaagcatggtcaagggtctgacactcctctctgacactaggaacaaaggttgtcctcccaaaggtgaagaggcatgattgctatgtgcgccgcccccctccccccaactttggcaggaaaatgagaacaagtgaggcaaagactcacttgttatgtcaattctaggaccacatattagtggtgaaatgactttttctttccagcaatcccaaagttactgagggaggtaggaaatgtcaagacaatgcaaccaacttctcttccacaccatatagctgcttttcccctgcccaaatataaacacagacttgcctctttcttgcaggctgcctagtcttttactgtttattcaggctgttgcccacacgagcaccattgcatacaggtgtgtaggtagatccctgcacaaggatatcctacagagatggttagagggagctgaagtcaagcttgtagtccacttgcatagcagggctccagggtgtggggctgtgcctgtctgagaaagggtcacctcttttgcattcacaaaaagatagggtataggctagcagtggccctgttcagtactcagaaaaatttgcagaagaaaaaagagcatcattacatcttcagtactactatcattaccattactgacatcatcatcatcaattcgatatgttaccttgctaaga

SEQ ID NO: 5688 - DNA, 17150 bp, Homo sapiens
ttgcttgggagatatttctctttaaagtgtcaggctgacattaaaccaccaactggacattcaaccctcagggacaagggacatgggacaaataaacagtattagctcttacagccaaaataggaacctaatgaaccaggcttgcaggtaagttttgggttctgtcttgattacatcagctgacacatgattgccactgcctgccacgccatccacgggctctaccctctaccatgtaaaggagagcttggtgggagtcctaaggtaaatcatgggaaggcctcatgtcatacaacaaggacattcctaacaagttatcatgtaaaggaaaagattgttcattcaatacacttttctgtgtagtataattcaacagtgcaaaccaccacccacaatttttgtttagcatatttttatttttgctcctccccatgggttcttttagcagggaagcctctaaaaatgctaaggatattgaatggttccttagagcaggtctcattccaaatactgtacagctgttacaggggaattctttaaagaacttaccatgattgaagaaacaaaattggtgtatataaaataagtcttagaaatatccttaaatagttttttgttgcggtttgcacatcctgaaattctaccaaaaggattgaaaacagcacatagtaaaaacacaagactttcaggaccaacgacatggccaatgaagctgatgcaaactcttcccgcagcatggctagagtgtccaggttgaagcataataatttttcagctgaggtcacaagaaaaaaggaaaatcccagatgctaggaacacagaaggaattaaaagtcagagcagtaagcagtgagctgagtctggggcacctgaggtggttgccagaattgaaaattactcagatggccaggagcttgggttttgccatctggagcaggagatgaagcctcagcactgcacaagacacagctgcaccttcaggaaaccggggaatggaggcactacccactggcccagagagatgggaaggaagctcgtccccaagccaggagattgaaaaattggtcctcgctggtcatacctctgggacatctgacagatgcaaatgcaaagtgctccgatcccctgtcatatgagtgtcacatttctgaaggacttgacagtttacacaattctttttaaatttttttatttttacaataaccacttaaagttttttaaaaaaattttaacttttattttagatgcaggggtacatgtgcaggtttgttatttaggtaaaatgcatgtaacaggggtttggtttacagataatttcatcacccaggtagtaagcataggacccaatgggtattttttctgatcctctccctcctctcaccctcaccctcaactacgccccagtgtctgttgttcccctactagtatccatgtgttctcattgtttagctcccacttataagtgagaacacacagtatttaattttctgttcctgtgttcgtttgcttaggataatggcctctagctccatccacgttgctgcaaaggacatgatctcatgcttttttatggctgcatcatattccatggtgtatgtataccacgctttctttattcagtctactgttggtgggcattaggttgattccatgtctttgctattgtgaataatgctgcaatgaacatactcatgcatgcgtccttatggtagaacaatttatattcttttgggcatatacccagtagtgggactgctgggtcaaatggtaattctgttttaagttctttgaggaatcaccacactgctttccacaatggctgaattaattcacactctcaccagtagtctgaaatgttccttttctctgcaaccttgccagcatgttattttttgacttttaatagtagccattctgactggtgtgtgatagtatctcattgtggttgtgattcgtttacgcaattatttcacaaggcaaaaaatgttgtgaccatttaacagataagcaagtagaggctcaccaaggctccacatcaggtataaagaagagctgggcccaaacccaagtcctttccctctgcagccctgcctgtagcagaattatgggctcctcgggccacctcctatgttcaaaacacccaggaaatgggcaggctggcattgcaggcactgaggtcaaaggcgcttgttctaaaatgaacacctgtcatatcctggccaccaagaggtgactcccctcctttcccacacctgcacgctgcccgtctgagtagggatgtgagaagaggggatgtctagtgtggagtgagcagggccagaatctttggacactccaaagctgtgcccacagagtgggagtctctttttttctttcttgaaagccacttgaactttgtcattgcaattaagcttatctcttcttgtgtttgctcagctagtgggtggaagatgtcattaccctctcctaactttatggaaaactcatgagtattagtttttgaaatggctactgatctctgtgccctcaagattcacacacacacaaaaaaaaaagacaaagggaagtcatcgggggttgcctaagaatggccatatctcagacctgggggagagggggagtcctggcctggcgttgatcagctcaatttacttgtcaggctgcccatctgccagggaaactgtcaaggcttcactggttgtgccaggcccttgaccaacctctgggtcagctgcattcccaatgctgttctgagtctgcaggcgttgcctggacagggtaggcaggaagtgcagggtgaggcagagtggtccacaaggagacagctcatgggtcctgctgttcctcagacaccaggaaaggtgcacctggtccctacttcacctgaggcctccggggttggtgctgacttgctctatggagaagctttcatgacgctccttcccactcccctccgtagatcccagaaagcagcagtgtggggcatgatacttgacatttgcgatcaaggggagagggcctagttgtggaatgtataagccagacatccctttatctgagcgggatgtcaggcaggcagctgggggcatgagataacatgggcacttggagcagattctcccaaacgaagcaactgatgggtgtgatgggagttgggcatggtaatgactctatcacggtcattttcctcggtgattatttcattgattttaggctgcaaaactcctaagctccccatctaagcaagtgtttacgtattccttccttgacaaatgctagaagagctctttaggtaggtagtgaataggatctcaggtatagagctgaatttagccctgggctgaaccttcacatggtcattagacagacatatgccagctattggtgcaggctttaggtgtcacatgtaacccagaagggatctaaataaaatgaccttgaattcctccaaagcccttcctaggatgtctagggacctggggaaccctgtagggaatgcatccccacagacactccacttcctgcagtctgggggagggacaggaagacacacccagcctctcctggtctcctgcatgagggagctgcccttctcttggtactgcttctgcatgtgccatctcagcctcatcacatccatccagaaataaagctcagccttgcatcattttccacttgctcacatattgattcaggcactatattttactgaagcttttgaaatagttggggtggaaattaaagaaagatggatggggattcactgcagcaaatgagcagcttcaaagccaatgccatcctggagctcctttctgcagtctgggggagggacaggaagacacacccagcctctcctggtctcctgcatgagggagctgcccttctcttcaccagcttggctctcgctgacacacgggtctgaggtctggggtctcacacactctgtctcccaggcagctaatccagtcatttacacacacacacacacacacacacacacacacacacactaggaattctcatgccagttcttaagacaatggattttttacttccttacatatacaaaaatgaaaaatcagcatcccatctggagaccagggtctaatatggacccctttagtacaatagacatgttaaaagatgtataatcaaagctcagagcaagatgagagaaggactgtgggtgtgcccatacttctttgagccacctcgccccttcctgcccgctgttcaggtagtcgtggtgattataaaaagccataagttctcagcatgcaggcccacttcgcttgctgcagggacagccccaattcatggcctgggaggcaccttgtgtcctagacactgtcagaggagggccaagcagggagggccagagcacccctctgtgctggagggaaaggtctgctggtgccagaatctgcatggcaggacactccattagtgagtgttctctgcccacactgctccaaaggtgaggacctccctgtggcagggtacaccttaacaccacctgtcagggatgctgtagaaggaccctggcactgggactgtgggtggaggagagaacttctgaagtgctttgctggatcaacatgtccaaatgctggagaccacggagggcagagagagtggcatggacgcccccgatgtgtccacttggccctgtggctggaactgtggcttgaggagaaggaaggaaaaaggatggaaaggtagactggagttgccttttgagggctggcagccctgctagaagtttaggcaatgggagtcattttccaagccaaaaattagaactcatgatagggacatggaagtgttattgggggtggccatcatgacccgtcacgtgacactaggccatccaggacctgtggcctctgaagtgatgggaaccactgaggctcatgcctggagcagtggcccgactcagcctatgcttcaggatgatctgtctaaccacagagtagaggaggcccagaggatgaaggctggaggctgcaggtgaaaaggttgacgccaaagtccagacaaagaagggagagaatctaggggtgagggggtgcttgtaaggagctgcctcagaggcaggaactgggacgtgcacccattgggcaccacgcctctctgtgcttcacaacaaactggcacatcccaaggccactggaagccctgctgggccatctccccaaggccagtgctgtacacataaccctacaagaccagtttcctacacataaccctacaagaccagtttcctacacataaccccagatcccttgtcctgtcttctcagtggggctggagcaagtcagcaggtgccactttctcctgccttgtctctgcctaataaaatgcgtctcaatgttttacacctgccatttagcatggactgctttaacacctcaaaaaggcctgtggaggagcctataatcatcaaggaggaattcccagaatacaaaataacactagcggctgataacaactctaaaaaataagtttgtgtaataatgggggtgagaagagatcataaggttatgtaaataaggtgaggttttgagttcaaaggaattctctggtatttttctgtgtgtgtacacatgcacccacacacttgtgtgtatatgtgtacagacatatataaacacatgcatataatgtgtatatatgcattacatatatgcacattcatacatctttatgtacaaaatacatatatgtatatataaacaccgatgtacaaacacatacgcacacatctatatacatacacatgtgtgtgcacatatacacatacctgcatatacacacatttcgtggggtgcggagagtcacttaaaggctgcagggccataaggcttcctgcttgactgatattcattaatgtttgctgaattacagcaaacctttgctgtgcccatcctgttctttatcattgaccattgctctcaggagttaatgtttgaacctggccataaaggaatcaacagctgctgacctctggccgctattcgaagggaagggagccccctataaaacagcctacagtggacagtctggtcggcagagccgcaggtcagtcgtgaagagggagctctattgccaccatgagtttctccggcaagtaccaactgcagagccaggaaaactttgaagccttcatgaaggcaatcggtgagtgctggactgaaaggcaaagctgtgggtcacatcagtgagggtctagctctaccagcagtggctatttagggtccaaatgttgagatggggggagagattcaggctatatacacaaactagggggcattttactgacttctggagttatttgcagcaagtcctcactgcacaaggccaccccataggcaagtggaaagagcactgaactagggtgtggtctggattgatggccatgtcattggcacttcgttgtgtgatcctattcctgcatttattcattcttcaaacaaacagtgattcaaggccaaccacacactgagcactgtgctggatagataccagggagacagatgataaaggcaataaggcattttcttatcagggaagagaagagaagaaataaaggtaataaggcattccctcaggtgtatggagcgctgactgtgccaggcgactgtgctgaccatgggatatgcaataccccatctattccttgccaaaaaactaagctgggtaccattattttcccactttacagttaatgcaactgaagcccagaaaggtttagtaatcacaagcaaggtcatgcaagtaggaagtgtttaagttaggattggaagcaggcactggttctcagagaccctgctttaacccctgtgcctcctagggtcatgtacaggaggatgtggctcacagagagcatggggggatggctcagtggaggtaaagagaaggctcaggctgagctttggaagacaggtgtctagggaactgggggcagggagcatgctccaggcagagggagccctataagcaaagggtgtggcatggcaagggagggtgccaagaatgagaagggtgctgaagacagcaggggcagggagagaaggaccttcagtgctgccagagaaggatcttctgcaggcaagccataccacctctgtgtctctcatctctccctcatgcaacaggaccctctgtgctcactgtccacccacaaaatttttgtgaacctcawtttgtataacagcatagacaagttctgaaactggtaaagctctatcccagggcaagggattgctggtatgtcttcctccagagccttgactgcagaggtggacacaggcttgcctggcacagtgccgctttgtgtatgttggcctggcatgattatcagcagctcccctttcacttgcaggagggacctagcttggaagatcaactctctggtcaccaggggtatggggaatgaaatgctcacactccaagagcaaagtcatcaaaggaggagggaatgaggaaggagagtgagcaagaaccagggtgcttacaagaggaacggttcttcaggccagaagagtgtcctttttataaattgactggcaagatagcagcaggccaggccaggtcactgtcccttcctttctgaggccacagcygatgctgctgacaagcccccagtgagtttctgtggccccttkggagacacagtgcccttctctgtccctccatgtcatgtcgtttctctcacctacctaccacggtcatgaaactcccacctctgcccatatctaaacctcagacggtttccaccaggtctgccggaagagctcatccagaaggggaaggatatcaagggggtgtcggaaatcvtkcagaatgggaagcacttcaagttcaccatcaccrctgggtccaaagtgatccaaaacgaattcacggtgggggaggaatgtgagctggagacaatgacaggggagaaagtcaaggtaggagggcatcccttctgctgtcagaactttccttggaacctggccctgggacctcattcctcaaggctcaaacctcacaattccacccacagataccatctctgaacccacctcccatgtgggagaagcagagagacaaaggcagctcttagggaagaatcttatagagaagctgctctcctcttcccagggactgtctggggggtgttccagcccctaaagtctgagctctcccatatggaggatatgggagaaccaggcatacagcaggattctaagtctcaggttctcccaggcccagtgctcctagcactaagagtcctctaagcagggcccaggagtggggcaagtgggagtttgtgaaaaacccttaactgagcccaaagtcaactggccttcactgaacctagagctggtggtgatagggagagacttcttgaaggaggtgctagcaataccagaataccagggccccagacaggtgctcagaccctgccttcaggggtggtcacaaagtctctggcttcagccaccccatctgtaaaataagaacagtcaacctccctagactgaaggcagtgcagggcagcatcacttctgctgggcacaactcatggtgtgcaatgacagctggggtgtgggctgtgtgagtggttggcagatggtggcagggggatcctggcaatgggggtgcccgtctcctcctccctctgaaacactccatgctctagcagccctcttctctcctccccgtggacagctctgttcattgggctgggcgtgtttgctttttatctcttctggtcactctttatttctgcctctccaattagaacattacaggtcaggatgattttaggaggataatattcttgatgtgctcatggtcaagggatttaactatgggccttttccaaattttctttttggaggcaaaatgtttaatgttgcccagggtctttggctccctgctgggttcctgtcrtctcttccaggatgtataagggcttggaaggaggccacaatatgaaaagttaacgctctgggaagaataatacatacctggttgggcgggtggctcatgcctacaatcccagcactttgggaggctgaagtgaaaggactgtttgagcctaggagttcaagaccagcctgggcaacatagcaagacctcatctcaattaaaaaaaaaaaaaaaagaagaatacataccaaagcaaaatatgtattctctactggtcaatatttgaattttgccactacctccctccattagcttgggagaattgagattttacttgatttgattttagcatttgtatttggggccacttaggtgttccatgctcatttctagatcacatgccatgaattaaagttctgacaaaagaagtcgtgacattttatttagttcttaaatgcacctcacttctatttggagccagagaactagaggcttgggatcataggaaccagagcattttggttgttatgagctgagacctgtgcaaaggaagcaacttcattagcaaggctcttgccccccaccaccccttcctcacaggtcacctctctgttccctgcagacagtggttcagttggaaggtgacaataaactggtgacarctttcaaaaacatcaagtctgtgaccgaactcaacggcgacataatcaccaatgtaagttggtggtgctctgagcgtgtggctcccagtgcttgaggggagaggggaggtgaagcatggggagcggctcacataccctaatgccacccctccaccctycaacccccaaacttctttcctgtggtcagtatctgccagcactwactgaggatccatcatgtcccaggcagtttacacacattatcactaaycctttctgctcagcgcaaccaaccagccacagaggcctccacctgccctgcatgcccagggtgcttcataaatgcctttgcccatttagcgtttataaagagaatcccattcatggtcatattatggcagcttacaagcctggcacagtccagttatgcagtcagccttggtgcctggctgccagccacatcctrtaccctatttgggggtgaatggtgcagtgtttctcctgcaggtatgtccccctgactcttctttgcccccagaatatgctttagggagtcacagacaacagaacactgccycagggcgctgtcatcactctattcaaatggaaaaattcttaaactagagagagtgtgagcatcaaccacccaatgtgcagtttccacctccgccccagcacattcccaggagagcaggggagcaggagatgagctrtcctgcagtaagtcctggccaacgccctttgataggttccatctcacctaatcctcctgtctccttcgagggaggctggatgagggattcaatagacaggttgacctgtccaagtcatcagctaataaatgttaaatccagggctcaaacccatcaagcagcaactattgcattgctgctgaaactgaggggctccttttcaccctgatgacatggtatgtcattccagcagtcttattcaagagaactggcaggggtggaggaaacatccttaaaaactcaaaagctgatgcatccactgtttttatatgcttcacagctataggaggacaattatgcactacccactgccttccaggctgtgtgcctagttgtgtccatgtacatgtatccttggtgctcaacatgtatttggtgcatagtaggtactcaatgaaattttgagaaattagattgggctggtttggatggtcttgctataacagtcattgatgtagaaaagaattcagtcaaaggcaggaggactttccaggtgaggaggagaagtgacaaagacttggcataggattttggaaaacattgccaacctttcctccggtcctacaggaaaccagaygaatttttgaattgtttcatatgccaacatatttggtgctgttttttaagcttaattttgttttttatgcttaattttgttttttacaatacaacatcagatgaacacttcataatttcttttctggctttcagaccatgacattgggtgacattgtcttcaagagaatcagcaagagaatttaaasaagtctgcatttcatattattttagtgtgtaaaattaatgtaataaagtgaactttgttttaaaaaaaaatgtcttctcaatgccttttcattgatggtgctattgctcaccatattctcgtaaatatactttcgtaaatgttgataatccacatgatccacactaccaggtcaaatccgaagagtaattccctgaacacaaaacccatgctgcacacccaggtgttctgccaggaaagccaggtgtggctagatctgcaggaaggccctggaatgccctttcccagtcaggcacacgggcaaggagctggagccagaggatgtgcagtgggctggccttgagggtgctctctgtggggacagggagcaggaagactgggcagaaaaggagagctatacccacaagcacagccacagtaccagcccaccagcagacaggtgcagaaaggtcgacactgacccgcccaataaacttttcctcctgtgggaggctgagcaaagggcttagtgagaggcgccagaagtggacagaggaggctcagtggaagttccctccatgctatgggcaggggcagaaggtagaggaaggggaggagtcccttcaacactactttatgccaaactgttaggggttgagttgcattcccccaaaatttatatgttgaagttctagcccccggtatcttgtaatgtgacttcatttggaaataaggtcattgcaaatgaccataggtgggcccctaatccactatgtctggcgtccttataaaagggggaaacttggacacagagacatgcacatggggagtgtccatgtgaagactagagctatgctgccacaaatcaaggaactgttcgaagctgagagagagtcctggaccagatccttccctaactcctccagagggggcatggccctgctgtcaccttgatcttaggttaatggcctccagaattgtgagataatacatttctgttgtttaagcctcccagtttgtggtacaatggcagtcctagcaaattaataacagtactcatacccctcagagctgccatttctaccttcacaagaccgttcggcacccagaactgtaagccttgatgaatgactgaatcattcacattccccctcttctcttcccacttctagagttgaaactattacttgttacttggattgtttcccaggccacctgtagcacctccctgccccactctcacctgcaactctccagcccacaacagcgtcctcctccttaaacaggccaccaaccataatgcatcctacctcattgtccagcacgtaacagtcacactcctaaatctggcatccaagcccctatatcatgggtcagcaaactttttctgtaaagatccagagaatacattttctcagctctgcgggccatttggtctctgtcacaaatacttatttctgccattgcagtgcaaaagcagccacatccaaatggtgtggctgtgttccaacaaaactctaccagcactgaaatttgaatttcatataacttgtacatcataaactattactcttcttttaatttgttccaccatttgaacatgtggaaaccattattagtttgtaccttgtatagaaacaggtggcagccagatttggcctgtgaactgaaaggatgctgactcctacagtcatagcctgtccaacctcttttagcctgtaatatacattctaatcgaactaaacaaccttccactcccctcacaattcaagcaccacctgctgtgagatgtcttcccaaactgctccgctgaaagtgctctctccctctctctgccgttttatctggaccagtctttgcaatgccgttcctcctgcctcgcactattattttctccatatatttgttctccttctctcacctgagacttcttctcagccttgaggaagaaacagatccattatttggagaactaaggcagactgaaggaaacagtttcagtctgcctttagagaatgatattacttcagtaagaagtcagagttgggagttacagggagcaagaaaacaacagcacactatgatatgccattcacaaaagtaaactccagatgaactaaaaagctaaataggccaggcgcagtggctcaagcctgtaatcccagcactttgggaggccaaggcaggtggatcacttgaggtcaggagtttgaaaccagcctgaccaacatggtgaaaccctgtctctactaaaaatacaaaaaattagccaggcatgatggtgggtgcctgtaatcccagctactcgggaggctgaggcagaagaattgcttgaacctaggaggtggagattgcagtgagccaagatggcaccactgcactccagcctaggagacagagcgagattccatctcaaaaaaaaaataataaaaataaataaataacaagctaaataaatatgaaatgttagagatagatatgactgtagatagcttccaattatagaagacttttttataccagattttttatgcaaaaaccatctaggaaaagattaataaatttgactacctcaaaaacttaaagttttatataaaaaaggcaccataaacatagtttcaaaaaaaggtgtggcttacataacaaaggttaatagatataaaaatattccccaaatcaaaaagaaaatcaacaagtcaatggaaaggtgagttaaggacattaacagacatctcacaatataaaatacgtttagtcttgtagtaaccagggaggagggatacaagatgaggtaccatttaaaaaatcaaactagtaaaaaattaaaaggttgataacacctggggtttataaggatgtgatgagctctgcctttggtggtaaagatataaagtggtgggctgggattggtggctgatgcctgtaatcccagcactttgggaggccgaggcaggcagatcacctgaggccaggagttcgagaccagcctggccaagagaccagcctggccaatatggtgaaacctcacctctactgaaaatacaaaaattagctgggcatggtggcgggcacctgtaattccagctgctcgggatgctgaggtaggagaattgcttgaacccgggaggcgaaggttgcagtgagccgagatcacgccattgcacttcaggctcagcaacagagcaagactctgtctcaaaaaaataaataaaattaaaaaaaaatatatatatatatatatataaagtggtgaaccccatatggagcaactttgacagcatccattaatattttcaatgtgaagtccctaaaacctagcaaagccactgttgtgtctcccttaaggagagtttacacacatgcacaagaagcgaataaaggatgtaatcgccaaaaactggaaacaaatgctcctcagtaaaaacagggttcgattaactgtggtacagccatactctgtcataacctacaatagagtaaaccaatgaagtagatctgtatgtactgacatagaagtatctctaagacaaagcgtttcttttaaaaactaagttttagaaataatattgacagtatactatattcaaataaatgttgttaaaacatgaaacaaaattatgttgatacatctatgtatgtgaactcatagaaaaaaaatctaatagttggacatcattatccagaacaccaaataatagccattacctctgggaacagaactggtgggaggtcgagagctttttgcattatttatatcgtttgaatcttctgcaaagaactcattttgtgaaactattattttttatgagcaataaatttttttaaaggcagatgacaaagtaaaaatattgggcatgaagacatggttctagttaactaatctacaactgtggacctcagctttctctcctgtaaaatgggtaagacaatcccttccctcgtggcttttgtaaggagcccatgaaatgatgcaagccaaatgccatccaaataaaacatgtcattatttccattctcagattcctcaggggatgtcagttgggtttgatactgagattgttagcagaagctgtggtgcccagagaagtgaacctctgagaacagatgcagaggctcagggaggaaaagaggtttgctctggcccaccaagccgacagacagtggcactgaggtgctttgactctggagtcatgggagaagaaagtaatgcagacaaggtcttctcagcaaagcttccagggatctgacaaaattcccagtctccccgctaaaggggttcttcccctgagaacatctatgggtttttgaggggattgtttgtgctttttcctgaaaaggagaattaattttatatgttgaatttagattttgtacaggtgcccagagaactttgggccggaagcctgcttaaataaatggaataaacagctgttgatggtgtgggctatttttaccttgacccctccygcacttcgggaccctccacgcctcctctctgcctgtcctgtgggcatcccaccaacagaaagtgctgtttcccggtgacagaccattaatttgcaaagagccagtttggatatctatgtccacacaaaagtagccttttatttccttttttttttaaactcactgccattagagtaagtacagtgattggtgggcaggggaaggggcgggggtgctgcctaacttagtccatgctttatcttcagagcactttttctgtatacaccagaggcatgttgaccatcccatgattttgtagcatgttttactagaaaaacatggagatgtggaattaaatgcatcttctccacatagcctagcctctttcagccaaagcagggctgggcagtgctaagccctgaggatacagtgatccccgggtgactcactgtcagtgggaccataagcgtgacagtgtcatccactgtgatgcaggtgggtactagctccagcccctgctgcagaccggataggggtggtgcctagaaaaaacatctcagaggcggtatgaaagcatctaagggtatttgcttcacagggagatgtgtataaatggggcttggcagaagaggaggcagagaaggaacagaatctctaccatgagtatcctatgactctagcaatgagtctgaatttgatcctgaagacagtagagaatcattgaggggttttaagctctaagagtaacatgatactaaatggtttgtaaaaaaaatttttctggccacagtgtcaaggaccagtgaaaagaaccaaagctgaatagagagaggcaatggtccaggcaagagatgctgggggcctcaaccaaagccgtgcccatgaggacggaacatagcaaaaggtttaagcatatttaggaattagaatccacgggctctagttactagacctgggatgtgcgttagcaagatgtatcagttaagatgtatcagcaggaactaacgcacactgtgagaatttaatgaaagtgttagagtaggtagctaggtagacatgagcagggcaggagagggccccccaccaaggaatgtcaggcaatcatcaggtgatggtcaggtagttgttaaactgtctctctaaaataataattggtcacagccagcgccagggaaaagcagtctcccaatagatagaaaatcccttaagatggtggtcagcagcttcccaataagagctcaggatttgggcaagtgggttcaagcatgttcattaagagacaaaatggcggagcttaactaatacatgaccttcctctaggaaccttcaactagtgaggaaaaaaacacctcagatgagcatgtgcgcaactccagtaaacacactgcgcgtgcagccccgcccaagtgctggcaggccactgcacatgcggacagcctgccccaaagaaaaatcaggggaggagagacacaaaaacccaggagcatgccaacatataaaaccccagatcaaaggtcaaacagggcacttggatctctcaagtcccccgcttggtcctcttccaaatgtactttacctttcgttcctgctctaaaacttgcctcagtctttcactctgacttatgcccctcagacgaatgctttcct

SEQ ID NO: 5689 - DNA, 101046 bp, Homo sapiens
  misc_feature (1)...(101046): n = A,T,C or G, or insertion/deletion polymorphism (see Tables 1-2)
tcagaagtaatcctaaatcaagacaatggggacaaaattcaagaatatcagttatcagtataaatgtgaaataaccaaattctctgcttaaaggagaagacagattggcctgaaaaaccaagggaaaaaaaaaacaaaaacaacaaaccgtccagctataacgtatatgcttaaagcaaaaggaacaaagagaggctgaaaataaagggacaaggtaaaaaatagcaggctagtgcaaacatggaggagagacaacactactatcagccaaggtgggaattaaagtaaaaataagcagaataacagggataacaagctataatgataaaagaaacaatttatagggaagatgtaatattcataagcctgtatattcaaataatcactgtagataaacacataaagcaaggactaggaaaaatacaaacttaaaaaaaaaaattcaagtgagaaactttaatagagttctctgagaaccggacagattcagtaaacacagtatgtgcaaggacagagaagaactgagtaatacaacaaatacatctgatttagcagacatagagaaatttgaatcaataccttaaaaaatgtttgaagtcatgtatctaccataaaaaaaagcctaaacaaaatttgaaaaacatttttacagtcaatgttctcaaataattatctgcttaaattgggtggaaaaagatgaaaagtaactcccagtaatttgttacattactggatatccccaggatcaaggagggtaacaaaagcaaagccataagcaatctctagaaagcaatggaaggaagataaaagcaaaacttaggagataaaacaggaaatcaataaagagaaaaaatgaattatgagggggggaaaaagaagggtaaacaaatccaaaagctggttttctttttgttttttgagatggagttttgctnnnnnnnnnnnnnnnnnnnnnnnnnnnnnnnnnnnnnnnnnnnnnnnnnnnnnnnnnnnnnnnnnnnnnnnnnnnnnnnnnnnnnnnnnnnnnnnnnnnnnnnnnnnnnnnnnnnnnnnnnnnnnnnnnnnnnnnnnnnnnnnnnnnnnnnnnnnnnnnnnnnnnnnnnnnnnnnnnnnnnnnnnnnnnnnnnnnnnnnnnnnnnnnnnnnnnnnnnnnnnnnnnnnnnnnnnnnnnnnnnnnnnnnnnnnnnnnnnnnnnnnnnnnnnnnnnnnnnnnnnnnnnnnnnnnnnnnnnnnnnnnnnnnnnnnnnnnnnnnnnnnnnnnnnnnnnnnnnnnnnnnnnnnnnnnnnnnnnnnnnnnnnnnnnnnnnnnnnnnnnnnnnnnnnnnnnnnnnnnnnnnnnnnnnnnnnnnnnnnnnnnnnnnnnnnnnnnnnnnnnnnnnnnnnnnnnnnnnnnnnnnnnnnnnnnnnnnnnnnnnnnnnnnnnnnnnnnnnnnnnnnnnnnnnnnnnnnnnnnnnnnnnnnnnnnnnnnnnnnnnnnnnnnnnnnnnnnnnnnnnntaaccttggacaagaccaaagtcatttaactattccaagcctctatagagaaaagggaaaacaatttgttttatgaagacagcacagttttaataacaaacccagatggagacataagaaaggaacaaaggaatgaatgaacgccataggccaatctcactcacaaatataaatgcaaaaatcctgaatacaatatttgctagcaattagattccaggaatgtatcaaaagcatctaccaatattaatccaacaacacagtataggggaaaaaaaatcatgcattaatagatgctgatgaggcatatgaaattcagcaaccaatcataatgaaaacagtaagaaaactgctggcagagtgtggtggctcacgcctgtaataccagcactttgggaagctgaggcaggaggagcgcttgagctcaggagttcaagaccagtctggacaacatggtgaaacactgtctctacaaaaaatacaaaaaaattagctgggtgtggtggcgggcacccgtaatcccagctaagtgggagactgaggtgggaggatcccttgagcccaggaggtgaaggctgtagtgagccgagatggtgctgctgcactccagcctgggtgacagagtgagactgtctcaaaaaaagaaaaaaaggaaaactgcttaaatctaattcaggatatttctgaaaaccaaaggcaaatactgttttctaaacaatagaaaattaaatctatttaaattacaaccgataattcggcaggaatgcccttccataattatttttaagcacttacatgaaaacttttacatgaagacctatacaaaaagcaaacaaaacccccatgtgctatccattatccagcttcaacaattagcaactgaaggtcaataatgtttcatctatttccacaatcatcaatgccactgcctggatgattatgaagcagatacgagatgtaacatttcatttatattccactacacatatctaaaaataagggcttcctaaaatgacaaaccttacacatagctagttctttaatgcaatcaaatatccaatcagtattcatattctctattctctcatttttttcatgtgaatcaagatccaagtaagatccagatattgcaatttcaccatgattatttaatactaccttggtgagtttactgaatataatgaaacaagaaaatcaaaagaaaacacttttttgctgattggactgaatacacagaaaatacaaatactcggctgggtgcggtagctcatgcctgtaatcccagcattttgggaggccaagacgggcatatcacgaggtcaaaagattgagaccatcctggccaacatggtgaaaccccgtctctaccaaaaatacaaaaattagccaggtgtggtggcgcctgcctgtaatcccagctacccaggaggctgaggcagaatcacttgaacccgggaggtggagggtgcagtgagctgagatcgcaccactgcactccagcctggcaacagagcaagactttgtctcaaaaaaaaaaaaaaaaagaaaatacaaatactctggttaaaaaaattctagaatacgataatttagtaaggtagctaaatataagatctcaagtaagtcaagtaccagcaacaaatatcaaggaatagaaatgggggcacatcatttacaacagaatttttaaaaatccaaacaagtagggaccaaactagaaaacaggtcctacataaatcaaatcatttttattttccccaaatgagtatgttatttagtccatttctaactggaatccctaatggtgtggcttttttcttaaaggattggataaaatgagctttaagttcacatggaaagattaaatgccaatgctgaggatagaaaagagcaggcacttaccttatcacctattacatgtatctgatttcaaacccacacagtgcaacatagaaataccatagagcacctctcccgcacctccacagaacccctcagcctcactgaaccctgtgcacacatatgggaaaatggagaaactatttgtcttaaactgacatttcaactttgctttgactttaccaagtttctcctgccatcttttttttttcctgtttttttttttctgaaacataacttggatccacaatgttttctctcataatttattaactaatgtgaaatggaaggtgaaagaggaattatgaacctctgaagcacatggttttcagtgagaaagccttgatccagcaacacaaactgccaagcactgtgattaacttaaacactgggtgcaaattggaccaaaaatgtagtcaaatgaaaattttgttccttcagatcgtgtttattccacatgccagaagttgtttaaagttctttaatcttgacccacagcttatttcttccacagaataaccccaatacacataaaaaaccaattttcgcaaaacaaaagatagaagatgaacaacatctggcgatgtagaacccggaaggtccatgatcttattcaaagcatctggattctttggattcggggaaggtccacgttcagtatacccacataacactcctaacagggactggggcagggataagtggcatgtatgactactaacagaacagacaatacaaatggccttacctcacctctgctgccaaatgagttttggtgtccccattcctccagacaaaaaaaaaaaaaaaaatacccacaacttcttcttttacagcagtttctgtatgctggtattggggataaaaaggggccctgaattacatttatgaatgatagagggaaaccctggcccctttccctaggtcaccttgctagtttaagagccagtcagaatgtaaatctgatctaattaaaacgctcttgttctttattcctggctgtggcactggtgagagaaatcaaggtggaagttgaggaaaaaaaatcaggacaacctttatagctaatgagatcaatgccaagattatacataacagtacacatcatgagttaggatgctgggtggtgcaaagaacccattaatgggagctatcaaaaatcactgaaaacaatgaggctcaaatcagaagtatcaagaatcagctttcatgacccctacaccatgatgtttttctttatgacggcagaactattttgaaacattaaatatatcggcaggcactgtgattcaaaaagtatttgagaacctactaggtgctagacaccaaccgaggcaatgagtatgggtgacaacatgtgccctgccctcacagcaccaatagtccactggacaaataccatctggaacatcaggtaaacacctaagcctgtctggaggaaatctaatttgggcggaatcccacaagcacagactaggtaaggagaaggcagttaaggtgggaagtagccagatttaagagtttgggcaatggccaaaggtgcagaagtttgaactacaagaagttcagtgtagttggttcgtgtgtttccgtggagagaggacaaggtctggtggcactgacaagaattagaccgaaaaggtaaaaaagcaagccaggtttgtctgggccagtaggccaggtcacagttgggactccactgagaccacggaagccacaggtttgctcctcatccccgggccaactcggcggcctccaaccctataccctaccccctgctgcctgtccgtgcctcgctggtgcagaccttcgtcgcctctcctcgccgaaggtacccgcagacagggcctagtcgctctcccctcgcttatccacggcatccagccgatgggcttggaggtttgggggctggccagtcctccacgcctcagggaggaaatggcaccgttagaaagacaagatggccacacaagctctaagtgtttgtcgggcctaaacctgtatcctccctccaagcaccaaacctcccgacctcgaccgcactcgacgccccgaggcccagcaccgacgacagtgcagaggaattcccgcagggtcaacaaggggtcaccggaatccccactcccgcgcccgggcctgcccgtgtcggagccactgtcgccggcactaggaccgcccgggacgggggagcccacgataagtgccgaagagcctgggctcggccgcccctcccccacaccgccccgccggcaccccagagccagccgaccaccgcccgagagtatgggacgagcggcgcgtcccccgcagctcctcgggagggccggcccacaacttgtgcggggtacaccggcgagacactcacccgccaaacagcccgagaataggcgccgaccgaccgcgccgcggacccgcccagcgctcgcggtccgctcacagcccgccccagcccgccccgccccgcccagcgcgcaggcggattgcgtcaccgcgtcaccccgcccctttgccaactgcttcctggctcagtgcgacctggccttcttcccctcccccatgcggccggcttccgagtgcgcaagcccagagtcgtccgcgttgtccgcctctgcgcaagcgccgtgctcctcccacggcagttggccatatagaggctgggggtggggggggaggtcaagcgtagcctcttctccttttaccaagnnnnnnnnnnnnnnnnnnnnnnnnnnnnnnnnnnnnnnnnnnnnnnnnnnnnnnnnnnnnnnnnnnnnnnnnnnnnnnnnnnnnnnnnnnnnnnnnnnnnnnnnnnnnnnnnnnnnnnnnnnnnnnnnnnnnnnnnnnnnnnnnnnnnnnnnnnnnnnnnnnnnnnnnnnnnnnnnnnnnnnnnnnnnnnnnnnnnnnnnnnnnnnnnnnnnnnnnnnnnnnnnnnnnnnnnnnnnnnnnnnnnnnnnnnnnnncggtcaagagattctttgccttcggtggtaaccgaatgggggaaagccctttgttaaaaggaaccaagtcccccttaaaaagaaaaagccgtcccggaagggcaattgttgcgggattccggaccattcccggggagggagcccttggcttctcttcctgtcttccaagaagatggcgccagccccgagctggggcgccgagtacgactgggcgggggacggcgagcgcccgcgcgaaactcgtctagcccaccaccgccgccgtctcgatgatcggggggcctctctgggattggctgcgcgcacgtcacgtggggccgacgggccctgcgcagaccatcgagtcgggcgtccctccccggggacgtggccttcctgtgcccgggctggggcccgccgccccgcgggggagggcggagctggcgcggcccctagctttctccttctggtgtggggcccgaggtgagacctggggagtgctccgcgagcccacgagcagcgacgtggctcggggacgggagggtgccgtgcctggctgcggcctgagcgggatgggcgcgggcggctccggcccgcgggttgtgccccggcccggggtgtcctttcctccctcccgcgtggcctggaggcactgcaactgttcgagactcacgtcaaggcttggcgcaaatacccctcgttcaggaagccttcctaggtttcccccgcttagaggaaacacttcctgagttcctaatggctgacccgcatggtgttgggaacctgagcctttctgacaccgtggcatgttgctagggtatttttgtgcgtagctcctttgaaaagtggttaggtgctcaaggctagctgctacatatcctctccattcgacttaaaaaatgagagggtcagacttgacatggtgtttggacgccatgtaaaatcgaaggaagtcgacttgggctttgcttattaaacagtgcctattatggtgaaattaaacgkctgaaggaatgtggatgagtcgtaatcttaaggaacatgacgatttgcccctcagttttgcgttttatgtcctcagattcatagctacctataccctaagccctcaatcaatgacttcacatttatttggtgtctgcttaaggatagtcactttcttagcagctaacttccttaaaaccctattaagataggttaagtcacaattagggttttgtctaaggctcctggtagcggcacattgcataataagcttaatgttcatttagggaagcaaatctgggatgctgaaacactggatgaaacgtagtgcttaggtttatattttgattttttgacatgtaaaagtatccctaggctaaattcattaagtacacatgatattaggatgcttggcaacagtatttaaaaatagttgaaaaggtgtttgggtaagaattatttccatcatttggattaccgaatctctgagtctgaaacatcaacctatcaagttttagacttggggaaaatggagctggagcctactgcctcaagtctcagggacagcgtttgaaaccccattaaataattcatcatgaggattaaactttcctgttactgctattagttttgcttggtgccaagcactgttgaagggacttagctcatcttatcaggagtcaaattaacgtcattcgggtaaaagtgcattgagtgtaaggagagcacctcaaagatatagttgacctatatcacgtccctcagcgccactaggcttacttgaatccctgttacagtgtcctctccagtgggcaaagctaacttctcagtggcctggtgggagaatttcttcttgagtaaatacgtatttttccaggttttgttgttttggccttccagttgtctgacttcagcctcatgacctcacttcttcatttcaattcaaaaaaatatttgctggaaattgctgtgtagggttaagggttctgcagatacaaaggttgagaggatatagtcttttcgaccaggtgcagtggctcacgcttgtaatcccagcactttgggaggtcgaggcgggtggacacttgaggtcaggagttcgagaccagcctgaccaacatggtgaaaccctgtctctactaaaaatacaaaaattagcctggcatggtggygcgcgcctgtaatcccagctgctcaagaggctgaggcatgagaatcgcttgaacccaggaggcggaggttgcagtgagccgagattgtagcactgcactctagcctgggcgacagagtgagactgtgtctcaaaaagccaacaaaaaaagaggatatagacttttcttttcctcaggcagcttgtggtctagtgtgagagacttatttgtagaagagtaattacattatggtgtgataagtgcaatgatagaaatatgtgtaaggtgtggacataggaaataggcwgtggttacctgttggaaagtcttcctacagaatgtggtccttgaactgcggtttaaaagacgagtaagagtttttccaggtggtgctgagtggacaggaagactaggaaagaggaggctgacatttatagttggtggcatacgtgagcaacaggtttagaatttggtatactcttgccatggcaaatggtagagggcttggctcagactgtgtactgaaggacttgatgcccttcagtgagttttatctaagatactctgacctgaacagaatttgagatgattgtgccgggtccactgggatatcttacgatccttcgtgggtcatatggattctccattagtgcgtcccagctgaaacttacagaaagggcttaagcagagaacatgctttttggagtacaaagtgatatttttatttggtatggcccgttcattgtgcatccatcccataggcaaatggtgatacgaaagcttttccctcttttggtaagaagtaaccaagttctgaaagaagcatatcatgcggctttcccaattgccaagttatgatgacacaaagtccaaaatgcgtgtaaaggtttttgaccaagtagaaaagcagagaaccccaaccagtataatgtgtcagaatgctttttctcttcaattgtaaaagcaccacaacgttcaacatctggaaaccaagaaaataatgaaaagaaccttttttcatgtgtataatattttaaaacttggttacatgttattttttggtatttctaaagtcagagacattttagaagtgaaatccctagtaggctattgttttaccaagcacactgaagttcctcgaataccgttgaagatgagctagacatttgttctgagacgtgtctggacatcatgtggttgtgttagtcatcttgttgatacttgttgttaatttggtaagaatacattgactacatactctcccttactactttttattagcattcatattaatcttatttcaaatcaaggttacagcttcatgtmatttgtagagtcagataatcctagaaaggcttgtaagaaagaagtgccaacatccttcccctaatcatgtttcctcccctgcagagtatctacttcagccttagtagatttccttgatctttgcctccaactctaaagagcatatttgcttgacgtctgtatttgtgtcccctacccctgtttcatgtgatgtctcttcgcttgacactgagaataggtaggaagttcctagctttctttcaccctctgccttctcagtgcaaacggatccatggctgcccaaagtgatatatccttaatttggttagttcagtattgattgtttatattatgactacatattgccatttacagctggacgaagtggtataataggattgttttcacttttctggataactttttgttttcctgggttattacaagtcttatttgtttttgtttgcttgctgcttgctcagttttctatattttgtcactacaattcaaccccaaattctgaagcaattatctaaatctttcaagaaattgtccgttttcttttgaagaaaattagtattcctatcattttatcttgaataaatctctcccagcgcctccaatctgctgcaggcttgtctgtgcctgaaatcttcctgtaactctcctcactccctcttgtgttggagcctcacttttctggaacctatgtcattctcttgatttgactgtctcacttcgatggagcacatccttcactagttgcctgagaagtgcatggcagatgaagttttcagaatttgtatgtacgaaagtgcctcgttctgctcttatcctgagtaggaatttggacatcattttgctccgcggtctctaagtttccagtgttgttgaagtcttaagccgttctgattctcttttattgatacgtaacatttttagagcctttgtgtgtgactatgttttcctccatgaaacctgaaggtttttgtttcttttttttcttctttctttcttttgtttttttttgagacacagcgtcttgctctgttgctcaggctgtagtgcggtggcgctgtcatagctcactgcagctgcaatctcctgggcttgagtgatgctcctgcctcggcctcccaagtacctgggactacaggcatgcaccgccacacctggataattttaaaaactttttgtagacatgagctctctatgttgcccaggctgatcttgaactcctggcctcaagtgattctcctgcctcagactcccgaagtgctgggagtgaaggctttgcatctggcctcagaggcttttctttctgtgaaattcagaactcccagaacagtgatgtcccttggagactgttttcatccatcgtcttgcctactctttggtcctgtttatttgcaactcatgttcttcaacgctgggcatttttttgatttattgctttgatttcttcytatttgctttctctctctctctctagaattctactcttggactttctggattggcactcataattttcttaaggtttctttttcccccctctaaaatttttgtttttgtttttatcttttaaattgtaaattgacaaattatacttgtacatatttagggggtacaaagtgatgttacgatttatggatacaataaataataaaatcaagttaacataattcatcacttcaaatactttaagttttttgtggtgaaagcatatgarattacygtcagcacttttgaaatcgacattattatttactatattcaccgtgctgtacaatatatctcataaaagaaaaccacattcctcctgtctaattgatgttttgtaccctttggtttttcattttctttctggaagttattctcaagtttgtcttccagcccttctaccaaggtttttctcatttctaagagctttttcttgttccctctattcctattttataacctattttttgtttcatgaatgtggtatctcctgttaactgttggaagatattgatgaggttttatttttccctgttttctttttccttaagtcactattgaggctgctctggtttgttgtgggtttttggcttttgtcagccttttctgggctatgcagtgatgttcttgtgcctgctcgtgagtcagagggcctctgagcctgtgtctgtggctgactgtggctttcactgcagaggcacctggctgggccatttccttacagcacccttgtcagcttctttgggtttcttcagattccccagagaaatatcttgtagccctttgcctggctgagtggccaagtgaggagagaggcctgggagcacagcagtaaccataaaagagcttacttccctcttttcagaattgtttccctcctctgtaactggtgtccccagtccaaagattctacttccctttgcagacagaaaagygatacctttttgccaggataggagagggactgtgcaggttggctctgtgtggctgtgcagagttgtggggtgcatcttagggatcttcgtgccttttaaacctatcagccaactctgtttttaattcaggtctcctggcttccagtcatattgccagttggccttccccattgccgatacaggattcagcccttttaggtctgtttccagtttctagcctccagtattttaatgttcttatctctattcttattctttgctttcgtgatttgtatcttaaaaaaagaaaaaatcgtttactatcattttagtggtgcttcacgaagtagtgtaaatgtattgatctgacaacggctcgtgctggagacactgttccaggaagtgggacacagtaaggaaaatgcaagtgtgttctcctgcactttcacggaggtcacgttttggtaagcggtgtcaggcagtcagcagaccagcagatatgcagtatgtccaatgtggacaagaagaaaggaggaaaataaagtatcgaggggagtggagtgggggacacagtggcagtttggcatagtggggaggccttgctgattgagcgacagttgattcaaacttgagatgagcaaacaagccatgggcagcgatctggggaagagcgttataagaggaatggacaggaggtgaaaagcacgggggcaggactgtgttgtgcacgttagaggaatgtggaacaccagttattagaccagtgtggagcaggaccagagggtgtaggagacgggcaggtcagggaagaagccggggctcctagcagtcggatcttgatgcctttggagagctggagcagagtgacccagtactggtggtggatcgtggtgaagtgaccatgggccacaccattcacgacatttcttacttttcctgtcacctgtaggaggcaagtattgttgttatcacaggtcgaggtagaccctgaggcaaaggctagagttagtggtttggctccagtttgtgccttcagctacttcactgcttccctaacctggccttgtcagtcagcctcagtctaccatctacccaggtctgcataccccgcaaaacagtatacactttgacgcttttctgcaagcacarttaccttttgggggagcccttctcttaaagcagagtaggttaatgtttgtgaatgaaacggaactttggcaggctgaggtgtctcaggtcatcagcttacgttgtctactgtgtgactaattgaggcaaaagatgtcctttttaatagtattttctcatcacttttgcctgggtgccctttaggaatgttatttttggcatacaacttgagtttcacttaaatttataattctttctgttcattcctactgctctgttgcccagatgtggattttgctttgtctcacaagcgttgctgaaacactggtagaaaggtggacgacggattggttgtgattagtttgatcttcacagtacagaaattcaaaaggtcaataagctcaacaagattgctgtctcactgatgatcagagttgccattaaaatcgtatttcccgcacatcaggctggaaaaaagaataaacatgatcattttagttgtcctcaaaggagaagaggacaggtattctgtaatcaggtgttgtgagtgtaactagttaaactctttgggaggtgggcagttttaccttggcaatatctatcaatgcattgcctgtcatcatataattccatttccaattcaatttatcctgtgggggtagaggcccaagtgagcagaggatgttctttccagcattgtttataatcgcaaaaaaaaaaaaaaattagttcaagggtcctatcagtaggggatttattaaggtatgtttactccactcaacatgtagttgttaacaaatgaggtaaatttgtatttggtactcggaaagatggccatggtgtcttttcaaatgaaaataagtgtagcagatggtgaaagaatgcatgtaagatcctatttttatttaaatcatgtattaaaattataattaaagtataattaaaattacagttttgaagatacagtttagaatatattttttggtaaagcctcatgggggggttgccagtttttacattgttttgttgagttatcttttagaatatttttaaagctaaaaaatcaagttccttggtagaccatcactacagcaagcccactgcagtattaatctattaatactgtcaatgttaattaaaccattattcgtgtagcccctacccatcccattccagtctctcaggaggcttagctgtatcccagagaccccagtgctatgaccgcaggtctctcctggggcaggaagaggtaagaagtggctgatgtcaaagtcaacagtcagcaagtggcgtgagcagtctcgatgaattctttcaaataagcgtttttcagatccactctagggcttgccttttccctctgttgtagtctcagaagttcttgaggtagaccttgtgagacctgcagcagtacttgctgtcttaggtacagaaggcaggatattgattatttctccctgactcaacaaagagttgagatgtttatccaggttaggatgacactgcccccctgtcccccccgccccccaaaaaagaaacaaaaatgaaaggatggtgtctttgactgtactgggagtcaggagacctcacttcaattttgggcttttcctcgttttttttttttttttgaataggttcagagctactccctggacctgttcttatcagccttatgacttggggacttgggatacttttttttttttttttaatttattgagacagagtctctccctgtcacccaggctggagtatgacagcatgatctccgctcactgcaacttccgcctcccgggttcaagcaattctcctgcctcagcctacctgagtagctgggactacaggcatgcacaatagtagagatagggttttgccgtgttggccaggctggtctcgaattcctgacctcaaatgatctgccagcctcggcctcccaatgaagtgctgtgataataggcatgagccactgctcccagcctgacttggggtactttttgacctgtaggatttcagctcctttcttttaaaaataagaaagctgaggccaggcgcagtggctcacgcctgtagtcccagcactttgggaggctgaggcgggcagatcacctgaggtcaggagttcgagactggcctgaccaacatggagaagccccgtctctactaaaaatacaaaactagccgggcgtggtggctcatgcctgtaatcccagctgtgggaggctgaggcaggagaattgcctgaacctgggaggcagaggttgcagtgagccgagatcacgccattgcactccagccagggcaacaagaacaagactccatctcaaaaaaaaaaagctgaatctctgagtgggtttttcatttttcatttttttttttaaacagatgcctcagaacctgggtaactcagtttatcagaaattcagttttcaagtttggaaggataacacttggagctggtagtcactcataaaacatctgattttgtgatcacgtttaagaatccatgaatgatataaaaatcctcacctattaaaactttttggccgggcgcggtgactcacacctgtcatcccagcactttgggaggctgaggtgggtggatcacgaggtcaggagatcgagaccatcctggctaacacggtgagaccccgtctctactaaaaatacaaaaaattagttgagcatggtggcggatgcctgtagtcccagctactcgggaggctgaggcaggagaatggcgtgaacccgggaggcggaactttgcagtgagccgagatcacgccactgcactccagcctgggcgacagagcgagactccatctcaaaaaaaaaaamaaaaacaaataaacaactttgtattcattgcttcctatatactagtcatcacgctatttatttctagcagtggttatcaccagggtgatttttgttacccagggcacatctggcagtgtccagagacctttgtggttgtcgtgacctacaatcatctggtggttgtggccagagatgcttacatcctgtggtacacagggcagcccccgcaacagaagtattcgactcaaaatgtcagcagcgctgaggttgaggagccctgctgtaaagggtcagtccttgaaagggctctagggtatagccatcacaggccccgtttttttggttggaaagagtagagcctggccaggtccggtggttcacgcctgtaatcccagcactttgggaggctgaggcgggtggatcacctgaggtcaggagttcgagaccagcctgtccaacatggtgaaaccccatctctactaaaaatacagaattagccgggtgtagtgacacatgcctgtagtcgcagctactcagcaggctgagacaggaagataactttaacccaggagttggaggctgcagtgagccaagatcgcgccactgcactctagcctgggagagacagagcgagactccgtctcaaaaatgaaaaagtagagcctggtagagtgaagccacttgcaggagtcgtttagttagggctgtgttgccttacagtgctggtgtcctcacagatgataatagtaataaaaaacaccacaccggtttattgtgtgccagctcgggttaagtgctgtctatgtatatgctcatggtaacacaaaaggcattaatatcaactttttataggagargagacaggcccaggaaatcaagatctgtaattatttcttctttttgttatcttggcccttaacttttagaagttcacacatttaaacattccatcttgacagatttacccagcgtttgagtgtctgtggggcttctctaaagctcagggtcaaaggggatatcctgcccacacagcactttctagttcaggagtgggaccaaccaggcctttgcagcaagataggtattcggtgctgaaatacacgctgtaaagttgtcctgtgtttcttgggattttgaatatctttcattgattcaattggcatttatttttcaccaagtacatattcagtaaatgtgttttggaaaaacagtgaacaaatcaaagtcccagccctaaagccatttaggcactcacggcctatctctgcagtaacctgctgcttgttagcactgggaccaagtccatctgtggctgccttcgggggattggcttctagtctagactcttgctgggttagtgtttccatcattctgtcaaggatccagctctaaggctgatagccacttccctgaattcatgtgatggatgcacaagcctcttggactaactcccctcttcattttactgcttccaccccaagcctgggttacacgtgaagccattggtgtgctattaatgtattggtgatgcttttacttggtttggatccctatggcttagcagagtaacttgatcatggcaggtgccatatacgtattttgagggatgaacagatagcatagtgttgattgctaaaaaggtaatgatctggccgggcatggtggcttatgcctgtaatacatacacatgcactttgtaatcccagcattctgggaagctgaggcagggggatcactggagcctaggagtttgagaccagcctrggcaacaaagtgagacccccatctctacaaaatatagaaaaaagttagctggacctggtggtgtgcctttgtggtcccagctactcaggagactgaggtgggaggcacgtttgagcccaggaggtcgaggctgcagtgagctgtagtcacaccactgcactccattctgggtcacagagtgagactccgtctccaaaaaaagaagtaatattctgaacttgtcctttcttgactttttggtgaattataacgggctgccagaatctagatcagctttttaggctctgagagatatgcttcatgtagaaataatccagtctgaaggccaggtctcaaggtgtcacttttgtattcttggatgactgttgaatgtgtggtctcgacgaatggctttgtggagcagctttctccagagacttgcatgtgcttggattaacaaacttgcgatccagggatgctaagcaggtgccttctgtgaccaagctcagtattgagggcgctgctgtccttgaggcagccaagtgttcttgtatacagctgtgttgtgtagcaggttaagtgctgcctctctcctgttgcttgttttctgtaatatgtcacctttcttggcatgattcctttgtccagtcttccagcgtcctgttgtatrgtgtgggtgggctggggactgcataaatgagttggagcagtgatgttcttggccttgctctgtcctgtgagagaggaccctgcaccatctggggctcctggagtggcaccctgcaccagcaggacgcagctcttcctggcccttctgtcggcctctaaacacagtgcaggctgactttcttatcacagctcgtttggctggctggaccaaatgctrcttgtttctttctggagtggggaaataacttcaaccaggtgcagtcagtgtgtattcttatctcagctgcaaaagctgttctaaatgcccttctagggaacttttgcggtgtgaatttagtggttgtgctgcgtgttagtcctgcccaacactaggcccaggcagctagagttaagtcgttgggcattggtagggcactgtgagcaaagactctcttacctcgggccaggcagagaaggacacagtggctgagctcacctgctccttggtcatccttcaaacctctgagtgtgtgtggttccttggggagagaaagcagttttctcgtgggtgccaagacagcagctacctgcatagcaactgctcctggcctagtaggagatttacatgtggagactctggagagagctgcacttctaaaggggttgccacaacagacagccttaggggaaatggggaaactggagaaaagggctcttatcccaaaaggaccagatccattggaacagatagaggtaaggaggcaaagagaaagcaacagtacaagtgtaaaattgggagaaatagtttttaaagggggtcatttatttggcacttttaccaatttgttttgaaacagagtctcagtctgtcgcccaggctggagtgcagtgctgtgatcacaactcattgcagcttctaactcctgagctcaagtaatcctcctgcttctgccgagtagctaggactatagggtgcctggctaatttttattttttttgtcaaaatggaggtttgctatgttgcccaggctggtcttgtactcctggactcaagtccttctgcttcagcctcccaaagtgcaaagtgctgggattacaggtgtgaaccacctaacctggcctctagtttgtttgtttgacacagggtcttgctcagtcactagttggagtacagtgacactatcatagctcactgcagtctcgaactcctgggctcaaatgatccttttgcctccgcctcctgagtagctgggaagcatactacaggcactgtacctggctaattaaattttttttttttttttgtagagatgggagttgtggggggtctcactctgttttgctatattgcccaagctgatcttgaacttccgacctcaagcagtcctcccacctcggcctcccaaagtgttgggattacaggtgtgagccactgtgcctggccctcggcctcttttaccatttttgaaattgaggttttgaaacaagtgacttgctcagaaacagttttaccccttagggcttccttttcaatattataagatgtatggtttctgatttatttattagaataggaaactttttgccttaaatctttttcttgaaaaattaaaaaaaaaaacaaaacgaaaggaaaggatggccctttgggatcttttctgcctgtctgctgtaaccattcgacagttgagaaccatgttgcttggtgtcttgtagcttgtaaatagaagactgaagtgtgtgtgagtagaaccttaaaattcacttttcctttgctttgtcttctttatgttggagtttgcttactcctgagtgtatattattagatgattacaggtgtgtagtattcaccccagtatttgctggctagtgtgaacaaaatgaaatacactgcatcatccgaatgtgttttattttgtagcaatgtgtatattactcttaattttcactcttcttacgtgatatgctttctaattttattaatacctagctcatttgactgtttcaaatgatattactgatttaattatatttactttttaaacatttgctgataagtagacgattaggtggtcttatagcattggtttaaatcagtatgtgtgyggccgggtgcagtggctcatgcctgtaatcccagcactttgggaggcctaggtgggcagatcacgaggtcaggagatcgagaccatcctggctaacacgatgaagccccgtctctactaaaaataccaaaaaaaaaaaaaaaattagccgggcctggtggcgggcgcctgtagtcccagctgctggggaggctgaggcaggagaatggcatgaacccaggaggcggagcttgcagtgagcagagatggcaccactgcactccagcctgggtgacagagtgagactcgtctcaaaataataataataataataataataataataataataatagtatgtgtgcatgaaatcagttcactttgaagaatacaatttttttcttttgaaacaaggcttctattttgatctaattgctcatgcttggagctgcctggccagcccctgagacccaagttctgtgttccctttgtcgtctgcacaacgagctcagcagactgctggctgcgtgttacagggctctggggtgtccccgggttcagccctactgtctcagagagaggaggacctggcctgtgaaggactgaggtggtgatgtgaaggtcttttctccatcaaatcttgcgccagttaccttgtatagtatttagattgttgttatcagttggtcatatggctttattgaaggctggtttagcatatttagaacttatttggcatgcattaggattcttcttcttagagtattttaattccagtatgtacttatgcttgtcttctctacctgcccccagtcttgaagtggtggaaatgtgtgtgtgtgcatgtgtgtgtactttccttaagcccttgctgattgatgcagtcacttgctttcaccctgcttaaatattcctaattctcgctgggcagtgttcctgttacatgtcgtgggttactccgatttgcctagtgtctgagttttgcctcttgttcgtcttttagggcagtgtacgactggggctcagcagtgctagtggctggcccagatggagcaccggggggcgcccgccttctactaggaagaactgggcggggtggggggagttccccatgtggacctcgaagttgtttgggatgtgctgctgtgcatatctaggttgtgctgtggctttcttgatgctttctggtggtttaaaaatctactttctcatgaaagaacgtgaaccagaaaaaaaaaatcttttatgaagtttgagaaaatgattgggtgacagactttagaatcgtgacaatatgctttgctacataaagtttgggtgcaatgtgcattcattttgtagttgaactcgtgattaaacagatatagtcaaaatttgttttttgtttgtttgtttgagacggaatctcgctctgtcccccaggctggagtgcagtggtgggatctcggctcactgcaagctctgcctcctgggttcacgctgttctcctgcctcagcctccccagtagctggaactatgggtgcccgccatcatgtgcggctaattttttgtgtttttagtagagatagggtttcaccgtgttagccaggatgatctcgatctcctgacctcgtgatccacctgcctaggcctcccagagtgctgggattacaggcgtgagccaccgcgccccgcccaaaatttgggttttgactttgaactggaatggtcagtgttatctgccatccctctcctatattgatgtttatttccaaattagggtgtttagttttcctttcyttttttttttttttttttttttttgagacggagccaggctggagtwcagtggtgccatcttggctcactgcaacctctgcctcctgggttcaagtagtgattctcctgcctcagcctcccgagtagctggtactacagatgcacgccaccatgcctggctaatttttgtatttttagtagagacggtttcaccatattggtcaggctggtcttgaactcctgaccttgtgatccacctgcctcggcctcccaaagtgctgggattacaggcgtgagccaccgcgcccggccttagggtgtttagtttttctaatcacagtagtagtacatatcctccattaatttttttaaaaaacgatcctgaatttacagaggaggtacgggtaccgtacagctctttatctgaaccacctgagagtaagttgggactacgaacctcaccctgggatattttggtatgtttacttatagacaagacaccttcctccttaaccgcaatacagccatcaaagtcaggaaatcaacatgaatgcgttgccgccttctgatcaggcagcgcattctcattccactgaaaggatctagttcagaaccacagttcattgtcagatctctttagtctctttcaaactggaatggttcctctgcctgagcttgacacttttaatgattaccagcagttattttgtggggtcccttattgtgggtttgtttggtgtttccttttgattagatctaggttttgcgcctctggctggaacagtacaaggaggaggctgggttcttctctgcatcctaataggtggtgcagaattcagttagtccccttagtggtgatgtgcactttacttgcttgattcaggtgctgccttccagcttctccactgtgaaatctttgtaattgttaagtatatagtagggagatacttttgaaataaaatcaaactttcagttatctcaactatctcaactttaatcagagttcaatttgcttatttatgtcaatattggctcatggtttccccagttaattcggttgattgttacccttttgccatgactttatttgatgttcatcatctcaggtttgcccctgagagcccctcaagctcctgtgtcctttatttatttatctatttatttttttcattattattattttttcagactgagtctcactctgtcgcccaggcaggagtgcaatggcgccatctcggctgactgcaaactccacctcccgggttcaagcgattctcctgcctcagtctcctgagtagctgagattacaggcacgcgccaccacgcccagctaattttctgtatttttagtagagacagggtttcaccacgtggcccaggctggtctcaaactcctgagctcaggcagcctcctgcttctgcctcccaaagtgctaggattacaggcatgagccaccatgcctggcccttttttttttttttttttttttttttttttttttgaaacagggtctcactctgtccaggcctggagtgcagtagcgagctctcggctcactgcaacctctgcctcctgggttcaagtgattctcccgcctcagcctccccggtagctgggactgcagatgtgtgccaccacgcccggctaatttttttatttttagtagagagaaggtttcaccatgttggccggtcttgaactcctgacctcaggtgatccacccgccttggcctcccaaagtgctgggattactgtctgtgtccttctgatatgtcctcattattctctgtctctttctcttctcttctctttctttcttgtaccacaggatattctgggctcttcatgtaccttccctgccccagacctggattctgccttttcttcaagaaggcctgcttcccttttatggcagttggctctcagagaaacagggtctaggcaccagctaggttgctggagtgttactatacccaggccctctcagtcaacagagtatgtgtatacatacatatacaaaacatacctacagctacatgcgtgtgtatttttaacacagtctcattttttaatatctccatgtattgaaaagcatgagtttattccagtacccccatttccaatgtagtagcacagggtttattctagtttctcgctttccaagtggataactccgtttcccaacagtgacaatcttagatcccagtgtctctaatatgtttacttccttgattattcaccctgtatggaacgaggctcctcttgttgaccttcctgctcggatgcccgctgcctcctcatctcactcagctgctgtcatcctgcacctccacccaccatgagcatcttcctcactccacttgggctctgataccctagctatgtagatattctcttatgtggaagcccgtatccccagtttaaaaacaaaaaaagtccaagtcctacacgctctctttttgcagcttgatcattttcatttaatgtacagtagtctgtgctttttccagactgatacgtgagccgttggattcttgttggtaacagcgccttactgtgtggtgtccttgtcccacttagtatgactgccttcgtgctgacgcacactcgtgttcttccagttctttgcctgtggcatgctgttgtgagcctcacctgtcacacctatgcttctgtattcttttgcaggcacttctggagagtagcatttttgaagtgtgattgctgacttagattgtatatttctattttttgttatgtgtttctaaattgccttctaattttatacttcctcaatggttgagtagtcttttttccccctcaccattataaacactgaatgatcacttttgttcatctttgcggatctcataaaggctgcatgaagatgaacatctattcgtgtgtttgtgggcaattttatgttaattttctgtgatttgtgtgttcatatgtcctaacctattcagatgttttccagacattgaaaaactccatttgtatcttgacttctatattagtgttctataaaattcttatgctctgatagggtcaaataaatcaatatcttcctcagtggtttttacagtatatgttgttggagactttttgcagccccaaatcacaggttttcctccttaatcttcagggcttcagggtttgattgtttacatccagatctccaatccagctgaaatttattttagagtatgttgtgaggtagggatcaaactttatatgttttcaaaatggataacaaattggcccaattccttgctgatttgaaatggcacttgtatcaaataataaattcacaggtacacgtgagtctgtttcatgcatcaagtgcctctttcttagccagtaacaccaagtgctaattaccattgctttgtagtatgctttgctaattttagttgaatcccagcttttttttttttttttttgcaaaattttctagcctggttttatgtttaggtgaatttttaggagaatccttgttagagttaaaaaaatatcctactgggatgttgtgttactttcccagggctgccgtaacaaattaccacacatttggtggcttacaacaggaatgtattctctcgcagttttggagactggaaatctgaaatctggcagggccacactccctctgggggataggagagagattgttctttgcttcttcgtcttccagctcctgccccacagtccttggcttgcagctgcatggttcccacccctgcctccctcttcacgtggctttctcgtctgtcacgggtggcatttagaacccacccagataatccaggatcatctcctcatcttagtatctttcacttaatgtcatctgaaaagaccccttttccaagaaaagtaaaacaaatttcagggattgggattccctatctttgggtggccatttttcagcctatcacagatgttatttggagtgtgattgggggtgtagatgaacttggaatagaacagacatcttttgtgatgaatctcctggctaagtcttggcatcatctccatgattcaggcttctcgtgtatatgtgtgtgtgtaaaatttttgttttgccaacttgccaagcttgccttcactgttactagagcttcrttataatagagaggttttctaaacaggtcatctgcagacagtggtatttgtctccttgcttcattctgtctctttagatggcctattggacagtctttgacaatagtaacatcttggtcattctgttgcttattttaatactatactattagctttttagtaaatatgttactttggggaaatattgttcatatagccatttgctgatgttaaactccatagaaagtaaataatacatgctgaatttcatcagttttttgggcatttttgaaatggtcgtcggtcagccacgtatatgtttatttgtcctttttttctttgagacagagttttgctctgtcgcccaggctggagtgcagtggtgcaatctcggctcactgcagcctccgcctcccgggttcaagagattctcctgcctcagcctcccgagtagctgggatcacaggcacccaccaccatgcctggctaatttttagtgtttttagtagagatggggtttcaccatgttgaccaggctggtcttgaactcctgacctcaggtgacccacctgtctcggcctcccaaagtgctgggattacaggtgtgagccactgggtctggcctatttgtcctccttttagccataagtatatattttctaattttaaaactgtatccctagaacagaccattcttagtcatgatgtcttgttctctaaatttagtgatcaattaattaggctcgtgttttgtttaaaattttacatgttttctagcttgggcaatatagcaggacctgtctcttggagaaaaaattagttgggcatggtgtacgcacctgtagtcgcagcgccttaggagtctgaggtggaaaggatggcttgagcccaggagttcaaggctacagtgagctatcttgcatcactgtactgcagcctgggcagcagagcgagactctgtctcaaataaataaataataaaataaaatagaaatttacgtgtctgtagaatagtctataatgattaatctctgcaacatctactcattgttttgggaagacaaaacaatgccgattttcctttggggaacaactctttctaccatgtgtaaaccatgtgttttagatagaatggctcagctgcatgggtggacctggttggctgtggctactagacataacacatgcccttggccccctgattatagttattggtccctaacgagatcagaacccaattaatgccaatgagttacaaaaataattcgtggcacccgtgagacaaagaagctcttatttccttgggagctaccagaagatacaattactgccatttataacacttcttatttcaaaaccaggcaaagataatattgtatcattgtaatctcgggtgtgtgttcttttcttttgtcaggctagagagagttaattgctcttcaattgcttttttcaaagaaactgattttgcttttgattgaccaagtagctatgtttctgtttttgtttttttttttttttgaggcagggtctcgcaccctcacccaggctggattgcagtggtgcaatcacggctcactgcaggctcaacctcctgggctcaggcgatcttcctgccgcagcctcccaagtagctggggactacaggcacgtgccaccatgccaggctaattttttgtatttttggtagagatgaggtttcgctatgttgcccaggctggtcttaaactcctggactcaagcgatctgcctgcctcagcctctcaaagtgctgggattacaggtgtgagtcactgcacttggcctgttttgttttgttttaattttttttgaggcagagtctcgctctgtcacccaggctggagttcagtggtgcaatcatggctcactgcaggctcaacctcctgggctcaggcgatcttcctgccccagccttccaagtagctgggactacaggcacgtgccacccaggctgggagtgcagtagcgtgattataactcactcactgtaaccttgaactcctgggctcaagggatcctcctgcctcagcctctcagtagctgggactacaggtgtgtgccatcatgcatggcttttcttattttattktattgtattttttatttttttgtggagatggggtcttgctttgttgtccaagctggtctcaaactcctgggcttaagtgatcctaaagtgctgagattacaggtttgagacactgcacctggtcttatatttcatcaattcttttgttccttctactttggttttcactttacatcttgacttgaatgcttagttcattcatcttcattaataaagtttacaagtttgattcaccctgtgagtgtagctttagcagtgctctgtagacgttgataagtggtcctctttgctctttcttcttttctgagacggggtctcgctttgttgcccaggccgagtgcagtggcacagctcactgcagccccagcctccccgcactcaagtgatcctcctgcctcagcctccctagtagctagggccacaggtgtacaccgccacacctggctgattttttgttttctatttttatttttgtacaggcagtctcactatattgcccaggtttcttttccttttttaaaccttgttgggaaaacttcaaaatataccacaaaataaaagagaatagaagagaatcatatgcctgtcacccagctttcacagttgtcagcattttactatagccctgcccactcccaatattttatatttttcatttgagtattttaaagcaaatctcagacttttagtcacctctaaatactttagcatgtattttttaggaaacggctttaaaaaacataaccacaataccttcatcatagctaacaccaccaaccacgctcattaatattatctaatatttattctgtgtttggttttctccagatgtcataaaaagcctttttacactttgtttgcttgaattgaaatccaaagaaggtctccacattgcatttggtttaagcctcttagctctttgaaaatctatagcttgcagcttcttttcccttttttagtttttgtttttaatgccatttatttatgaaggcaatagggttgtttgtgctgtggaacgtcccaggtttgggatttggttgactgtgttgtggcactatctaatgtgtttttctaatcctcatacttcctgtagctaggtcaggatgcttaattggtttcaggctgtttgttgttgggggggtggggggcagtggtttcaaggatattccacagactgtgctctgtgttgcacgttgagcagccaggttacatgatgtcgggtgcggtgtcagtaggttgaattatagagttctttatcaaccagttctctactgggtttaacggccatttgcttgttgcttgtacccgttatttagttggtgtattactttcctattgctgctgtaccaaattacaacactgtggctgaaatcagtctcactggtctagagtctgggtatctgggtgccatcaggcagctctggagagtatctgcttcctggccttttccagctcgtggcagccattttttggctatggccccttcctccatcattagagcacatgatctaaaggacacttgtgattgtggttacgtcccacccatataatccaaaatgatctcccatctcaagattcttaattcatctgtaacatatccaaatccagaaattaggacttgaatatctttggaggccattgttcagcctacagctgacaattataaagtgaagatttttctaattctattcttatttaaagaagatttcctgtatcaattttggaggttctgaaatgtggttcctgctggggagaaagaagaaatgaatgatttctttcctttatcagtgtttaggatgcactggaactaatagcttccaaagttgaagttcatttctgtagcatttccccctagtactataaacctggggatgtgattgtgcttcaacccgtggaagccgtattttggtgcttctgttgttctacccaagttggcttgtgtcatctttgggtgtgactccttggtttgtgactgctccctgcctgcctgtcacaggagggtgttgtacctcgtccgtgttctgcttagacctagagtcagtcatgtttctaaggaaccccagtctcttgccgtgagatggtgtttatatatcagtcagttcaatgtgtatcattttcttaggctaaaatcttggttcttaatgatattaactcgcttacctattctaaattttgtgactctgcttttcactgatttgtagtagccgacgatgcttaagcatcttttattccctttctagatggaggcatctttgaaaagtaaagcgcctcgtgtgatacagagcttcccctcctgcagataastctcacaaacacttagcatgtgtctgtccagagtttcctgttaaaacacactttcagaggcgtgtagtgtatgaataagtgccattttcatggcacatatttttcatacaatatattcttacagtaacgatactgacattattaggatatatcccatttggaatatattgtcaaattattgtgttttaaagttaaataattctctgatgcttaggccgccgctctgacattgttagatacatttgtttccattttctaagtagactttttattgaggtataataaacatgcactttttaatgtatatagctcagtgaattttcactaactgaactcactcatataaccagcattgagataaagaagtggaacgttttatttttagagtttagagtctgatttttttttttttcctttgagacagagttttgttcttgttgcccaggctggagtgcaatggcgcgatctcggctcaccacaacctccgcctcttgggttcaagcatttctcctgcctcagcctcccgagtagctgggattacaggcatgtgccgccacgcccggctaattttgtatttttagtagagacggggttcctccatgttggtcaggctggtctcgaactcccgacctcaggtaatccacccaccttggcctttcaaggtgctgggattacaggcgtaaaccactgtacccggcctcttctgatgtttatggttctaaaacagagctgttactcttgttctgctcagatgagcttgatttccatccctgtcccctgtcccttctttccttaccccaacattttcttcttgtttctttctgaaaatataaacagacatacacatttctatttctgactctttcttacagaaaggtagcataccctgcacctgctggcctccgttgctcttttcattaactgtgtaccccgaagactatgcatagtagtgtatggaggctttccttctaccttttatgctatgtgttgcttcactgcatggacacaamgtggtttcttcagcccatctgcatattgaagttgtgttactttccagattttttttttttagctttttatgtctcgctatctctgctgttgcccttctgaagtccattcatcccacacgtgcagtagctggagtttcctttttatctaatacttgagtttcccactgccatactcaccccacgttgatgcctaatgtcttcttgaggtttcctttagagggcactccttacctttggtgccagccattctgctattctgatcctacttcccctcattactgatcttccttctctgccatcctgaccccttcctgtccttggatgcctttggagttgcagagaagctgtctttatcttcctggtgtgatacttgttttctaatagtaggaaatagtgttttcttgttctgcccagttttctctctttatagatgagacatctaagttcctgctccctggatgtatgtcagtttttctcttacatggtaatgttctgatctgagtccggtatctccattgtctaactttgcatagaggaacatacctgtgctttggtggggacgttgtgcttgtattcgtgcagtttaatgttgaattarctctttgtggagacagttatataagtaagcgtttctagggagtctttatatccaaaagtgaggcttaatctctgaagagtagactgataggaagagagtacytggagagatgatgcagtcccaccttctcatgagacaaaggaggaagcaggccaagtgaagagggtgatgtgccaagcagtgtcagcagcagatcgcacattggagtgccacatgctctccacccttgagaggagaaaacctgaagacttgggttttcctgatgtgtgttttcttgtttgtagaaaagtattgtttctatttggataggactgagcccaagattaatctttcagattcttaagtattttccacccatggcgttagctagctttgtatccataacagagttctttataaacatgagctaagctaattctagctcatagaactttcctatgtaaattgtaggaaggaaaaaatcatcaagtgtaaattgttgccctgggtcaaacttcaaattattttgtttcttgtagtttaatgagatttatagtgaggagatggaagggatttttaaattgcaggactaaaggggaatggcccttcctacagccattctgttcccatccccttcccaggaacaccattacagttggggtgggggcctgcgtgggcttcaagccctggtgaggagtatgtgtgtgtgcaggagctgccatgaaacacctttcagcggctcagggtggcagactagtgttaccatggcagttagagacatcagtaaacccatgggtcatacggatgcatttccacctagaagcagtggtttgtttcttcagtgagtcaaagaaacttaagatggaggagaccctaaggagtcatgtaagttaaatgatcacccagtggagagtacacttcacagtgggaataagctctgcccattttttttcctaggtgctaattcaggaaagcatgctcactcttagtgatccttttcttcatgttgagatgaaatgtgtcttcagaattgttcttagttgttcttggttgtgcaggcaactggacagaactcagtccccctttaaatgctctccacatggtaaagacagctcttatgtatcttgttctcagtttccaaggcttgaataggttcatgtaaagtcatcaccacttcctcaaaaggaaattaacaaaaaaaaattttaattcagacgtcttgcagataacgtggcaattgtratgagaatagcacagcagagaaaataaattttgtgactctgtttttcactgatttgtagtacctggtgatacttaagtgtcctcttttccctctccaggtggaggtatttttgttgaaaagtaaagagcctcatataatacagagctttccccttctgctgataactctcacaaacacttagcatatgtccatccatagtttcctattaaaacacactttgggggtatgtggtgtaggaatatgtgccatttttcatggtcttccctcccgtcttcacattctacagcttcacagcagaattgtcttttcaagtccatcttttacccagctgttcatgttgatgcttgttgaggactgggctctggacttcctgtccttttgctattctcaatgacttgagtttccttctagagaggtcttatgcatgtacaaacatgtatatcttttaacacgactggttacatatcaacgtaacacatagctgcaggccaggcgcagtggctcacacctgtaatcccagcactttgggaggccaaggcaggcagatcactgaggccaggagttcaacrccaacctggccaatgtggtaaaatcctgtctctacaaaaaaatatacaaaaattagccaggcatagtggcgcacacctgtagtccagctacttgggaggctgaggtgggagaatcgcttgaacctgggaggcagaggttgcagtgagctgcgattgtgctgctgcactccagcctgggcaacagagtaagaccctgtctcagaaaaaaaaaaaaaaaagaaagaaagaaataggccgggcgcggtggcttatgcctgtaattccagcactttgggagacaggcgggtggatcacggtgtcagragtttgagaccagcctggccaacaatgtgaaaccctgtgtctactaagaatacaaaaatcagccaggtgtggtggcgcacgcctgtagtcccagctactcgggaggctgaggcaagagaatcgcttgaacccaggaggcggaggtttcggtgagccaagatcacgccactgcactccagcctgggcagtagagtgagactctgtctcaaaacaacaacaacaaactgcctcttcttgttcactgacactgggtgtatggttaaagcccccttaactgacctgttttgaggcacagaggtttatttaatcaccagtcatttgatacagggtgaagacctatttgaaatgggactggctggattctacatgttttctttttttttttttttggaaacagggtcttgctgtgttgtccaggctggagtgcagtggtgccatcatggctcactgctcaacccctggggctcaggtgatcctcccacctcagcttccacactgagtaactggcactacaggtgcatactaccatgcctggctaatttttatttttatttttattttttattttttggtagagacagggtttcaccattgtaaacccaggaaatctgacaagtctcagttaatttagaaagcttactttgccaagggtgaggacgcgcacccgtgacccagcctcaggaggtcctgatgacgtgtgcccaaggtgggcagagcacagtctggctttatacattgtagggagacatgagacatcagtcagcatatacaggacgaacattggttcggtctggagaggcaggatggctcgaagcaaaggcaggaagactccaagtggggaggggacttccaagtcacaggcaggtaagagacaaatggttgcattctttggagtttctgatgagcctctccaaaggaggcagtcagatacgcatttatctcagtgaacagaggggagactttgaagagaatgggaagcacgttggccctaagcagttcccagctagacttttccttttaacttagtgatttgggggccccaagatttattttcctttcagactatgttgcctgtgttggttttgaactcctgggctcaagcgatctacccacctcaacctcccaaagtgctgggattacaggcatgagccaccatgcctggccacatactctcttcttatgtaaatgaaattgataatatgtcgtctaggattttcagcattcatttaagtggaacaaaaatttaagaaactcataatcagtgtagattctctgagattttaaaggttttcctccatttgactttttcttttaaacaaacaggtcttgctctttttcccaggctggagtgctgtggcacgattgtaactcactgcagcttcaaattgggttcaaatgatccttctgcctcagtctcctgagtaactaggattacaggcacaggctaattgtttttattttttatttttttaagaaatgagktctcactttgttgcccaggctggtctcaaacttttggcctcaagtgatccttctgccttggcctcccaaagtgctaggattataggcatgagtcaccatgtccagccataatttttttaaggcaacttgtttttcttgaaatttcagtgtggtaaatttaatatccatagataaatttctcttcactctttcattattttgaattatttctaaatgtagttacattaactagtgaaactggcataaacaggtttgagagcaagtaaaactgagtcttactaagcacacatcatcactggtggggatcggtgttcagggcacactagaaggcactctgctcatgacatcaattaatattttactgtgggggtggagacttggtcattcatcaggtcgtttatggaggtcagtgatagtgctttgtgttctgccaccctttgtttacccagtcccggactgaaccaatgcaaatgtttaatcttctgactctacaaaaatgctacagtgcacatcgggcacactgcagagacactgcaggtttgtgataccaccacaagaaagcctgacatcccaataaagcacatcacatgagttttacgtttcccagtgcatataaaagctgtaacatgtttagaaaaacaatggtatatactttaatttaaaataatggttaaggctgggcgcagtggctcaggcctgtaatccagcacattgggaggccaaggtgggtggatcacctgaggtcaggagttcgagaccagcctggccaacatggtgaaaccccgcctctactaaaagtacgaaaattagctgggtgtggcggagcacacctgtaatcccagctacttgggaggctgaggcgggagagtcacttgaacccgggaggtggaggttgcagtaagccaagatcaagactgtgccactgcactccagtctgggcaactgagtgagactccatctcaaaaaataataataaaatattggttaaaaaatgctcatgatcattgagccttcagcaagtcttaatctttttgctgctggaaggtctcgctttgatgttgatggctgctgactgatcagagcagaggttgctacatgttggggtgactggcaattttgtaaaatcagacaacaatgaagtttactgcattgattgactcttccacaaaagatttctctgtagcacgtgatgttgtttgattgcattttcccacaatagaactactttcagaattggactcaatcctctcaaacactgccattgctttatcagctaagtttatgtaatattctaaatcctctgttgtcatttcaacaatgttcacaacatcttcattcagcatctacttcctgagtagattctatcttaggaaaccactttctctgctcatccataagaagcaactcctcatctgttcacgttttatcatgagattgcagcaattcagtcccatcttcaggctccacttttaattctagttctcttgctgtttctaccacacttgcagttgctttctccactgaagtcttgaacccctcaaagtcatggcatccggaatggtgaatcctttacaggaggttttcaatggactttgcccaaatccatgagaggaataactatctatggcagctgtagccttaaaaataatttcttaagtattaagtcttgaaagtcgaaattacttcttgatccatgggctgcagaatggctgttagcaggcatgaaaacaacattcatctccttgtacatctccatcagagctcttgggtgaccagatgctttgccaatcagcagtaatgttttgaaaggaatcttttttttttttctgggcagtagatcttaacggtgagcttaaaatactcagtaaatcgttttaaacagatgtgctgtcatccaggctttgtttcattcatacagcacaggcagagtatatttagtgtaattcttcagacccctaggattttcagaatggtaaatgagcattggctttaacataaagtcactggctgcactagcccctaacaagagagtcagccttttgaagctttgaaggcttctcttagaagcgatctagctattggctgggcgcagtagctcacgcctgtaatcccagcacttcgggaggctgaggtgggcggatcacgaggtcaggagatcgagaccatcctggctaacacggtgaaaccccatctctactaaaaatacaaaaaattagccgggcgtggtggtgggcgcctgtagtcccagctactcgggaggctgaggcaggagaatggtgtgaacctgggaggcagaggttacactgagcagagatcatgccactgcactccagcctgggccatagagcgagactctgtctcaagaaaaaaaaaaaaaaagaagccatctagctatcaaagtccttagatggcatcttcttgcactatgaggctgtctcatttacactgaaaatctgtttagtgcagctactttcatcagtgaccttagctaaatcttcataactcactgcagcttctacatcagcacttgctgcttcaccgtgcactttcatgttagagagatcttaaacttcaagaaccaacctctgctagcttgagacattttttcctgcagcttcctcacctctctcagccttcatggaattaaagagagttagggccttgctctggattaggctttggtttaagggaattttgagactggtttaatcttctagccagaccactcaaactttctccttatcagcgataaggctgtttcgctctcttaccatttrtgtgttcactggagtagcacttttccttcagccttttttctttgcattcacagcttggctatttggtgcaagaggcctagcttttggcgtgtcttagcttttaacaactcttcttcacgtgccttcttaatcatttctagcttttgatttaatatgagagacgtgcagctcttcctttcacttgaacacttagaagcaattgttgggttattaattggtttcccctcaatattgtgtctagggatcgggcggcatgaggagagggagagagatgggagtggccagttggagcagtcagaacacacacagcattgattgattaagttctctgccttgtatgagcgtggtttgtggcactccaaaacaattacagtagtaacatcaaggattacagatcaccataacagatacaatgacaatgaaaacgtttgaaatattgctagaattaccaaaatgtgctgttggaaaagaggcatggaaagacctgcagagttgccaaaaccttcagcctataataaacacaatgtctaaaaaacccaagtaagagaagcactgtaagctgaagtgtgcctctatctttgggcacatgtgtgagaaattcttagaagtaggaagtgttagatcaaagaatattgatgttttaaatctcagtccacaatcaaatatgtacgctctccaaagagaccacaccaattattcctccagccacacctgttttcccacacttttttttgagtcttcagattttatttttgccaaactgaggtgaaatgtagaatcttattctacttttcacttgcattttaaaatacaaattgaataaatgtttcctgcatttccatgaaaggcctgcttgtatcttttgcccattttttaaaaatgggttattaaagagtcctttaggaaatactgtaaacgtaacgtgctcctcttttccccagaaatgtttgagcctgccacgtgtgccatgtttgtgtttgtggtagaggagatgctttcatgattgagaagaagacgcattttatactctttycccctaatgtaaatttattcattaaacacaaaagatttgtaataaaatattttttccttaagattgttatataaagtttactaatgagaaaaactcccttgtcagtttatagtttagctttggtttgaaaatacagacactgtagcactgctgtccaatatgagccacatatatttaaaattttccaacatctgccttaaaaatataaaaataaacaagtgaagttaattttaataatattgtttcacccaatgtaagatactaccattttacatgtaatccatcctaaaactaataataaaatgttttagatagtatttcttgtactaaatcttcaaaatctgatgtatattttagacttacagcacatatcattttaaactagccacgtgtgaaggctgtagtgacatgtggccagtagatgttggccagcacagctcaaaagagtagtctatttctatgaaaatccatcaatttattcttttggacctaacatttgtcctatcctcttttttatttttttgagacagggtctcacttggtcagccaggctggagtgcagtgtcacgatctcaactcattgcaacccccacctcctaggcccaagcaattctcccacctcagcctcccgagtagctgggattacaggcacgtgccaccatgcctggcttatttatttatttatttttaagacggagtttcactcctgttgcacaggctggagtgcaatggcgcgatctcggctcactgcaacctctgcctcccgggttcaagcgattctcccacctcagcctcccgagtagctgggattacaggcatgcacccccaagcccgagtaattttgtgttttagtagagatggggtttctccctgttggtcaggctgatctcgatctctcgacctcaagtgatccgcccacctcggcctcccaaagtgctgggattacaggcgtgagccaccgcgcccagccccccatcttattaagaaaataaattgtatttatctgacacatgttctttaattaggctctaagtaaatattattctttactcagctgtagaaatatgtgctgattgtttctgtatttgtaaaattaatgtagtggcatactccactaaatgtattaatttagtggaaagtagtgagtttagtggtttagtggaattaaatgttagcattcccaaacagtgagatacctattaaagggcaggttcttttagataccattttccttgatctttttaacaacttgcagaaaaggccccaaaacttagaaatgtgaattattaaagttgagagcttaaacaactagccaaggtgacccaaattatatctgagcaagattctgaaagcaggtatcctggcaacaagtttggtgttctttatacaatttgttctcattataggtgcctataatgactcggataaaacacaagttacgtattttcaccttacctagaaatacgtgaatcaaagaaataagccagagaacagtgtcactggagaatatactaagttaccttttctgttacttcctgaaaagtagtgaaactgacagaattagttagtggagaaagaacaaggcaaatttacaggaaaccctggactgcaaggtctttgtttctgtctcatctgaactttcgtgagactttattttagggctgggagtttaatgtaataatatatactgtaatatatattagcagtaaatacatgtgagccaaagaaaagttgttccttattagaatatgctacaagtcaaattaaactgagtataaataagcttaattataaaattagtttgtgctaataaaaatgtaatatgagccacatataattttaaattttcagctttcaaatgggatggaaacatttctttgacctgactttgaccaccacactcagtatgggagtgcaaattgtgctaaacttagctcccatcccatggtgccaataacttcctataagactgcactgctgccaaggaagtggtgggcgcctgtcctccacatctctgctcccacagccttggagatgacccctggtccgctgctcctcctaaccccttcagcatggctccactgcagcgggttcctgtcaggtgataagttaaagcaaagagaggagtaggctgcataaattgtatacctctgtttatccatgttatccactgacaattaggttcttaaaaatttgttgactattactagcagtgcagtgagatgagcattcttgtacatatttccttttgcccaggaaagctttttcctgaagtacgtctccagaagtgggatcgttcgctcgtggagtatttgcttcttaagccttaataggccttgcaaatggtgtcaaataaggacctagtttttccctcctactgtagataaccagttttcccagagccattgattgcatcatccatctccctgctgatccacacgaccacatctgaggcaggcaatgtcagtgtctgtggtgtctgcgttgggcccactctgctgctcccttgttctctgtgtctgtccccggcactagcaccacagcctgaattactgacactggagagagcaagccctcctccacgttgttttcttcagagttatattagctgttcttggtccttgatcttttgtataaattttgttgtgtaaatatgattgtatttgtaactattctaaaaatggtgtatataaatawttttttttacaattcagtgtttgcaatgcaacattataaaaattacatatagaaaacttgtataaataaaaattgtataaaatctggttgtaaaattccatacacacacataccttttgggatttaagttacatttgcattgaatttctagtctaattaggggagaattactatccatgattaagtctttctttagatgaccatggcctgtctccatttattaaggtcatttctgtattttgacaaaggtttttataagttctataaatcacattttttttcttaattagattttaaaaaatttttttagaggggtggagaggggacagagtctcacgctgttgctcacgcggcagtgcagtggcgtgatcttggttcactgcagcatccgcctcctgggttcaagcgattctcgtgtctcagccccccaagtagctgggactacaggcatgcatcaccacacccggcttagatttatttttaatagtttgttgctggtgttttggaaacataattgattgtgtgtattggttttatttccagaaaacttactgaactttttaattagttctaatagtgtgtccatacatcctcctggattttcttccagcacagttatattgtctgtgaatactggcagttttggttcattttcaattctggtaactttcttttcttgccatactgccctggcttatattcctagttgctattaggaatgggttaattagttgagattcttcatttgaatttttttttttttggagatggagtcttgctctgttgcccaggctggagtgcagtggcaccatcttgtttcactgcaacctccacctcccgggttcaagcaatcctcctgcctcagcctcccaagtagctgggagtacaggcatgtgccaccatgcccggctaatgtttgtatgtttagtagagacggagtttcgccatattggccaggctggtctcgaactcttgacctcaggtatctgcctgcctcagcctcccaaagtgctgggattacaggcacgagccaccgtgcccrgcctatttgaatcttttgaaatgatcaaattatctttgcccctcatgctgttaatgtggcgagtaactttactctgtttttctaatattgtacccccccacattactggattaaacttcatcgtgataatatttgtttttctatttctgggtcagtttgcaagattgtttcaggctttggcttttaaatacctaggtgagattcacctactcctttgtctgtgatgagtccaagccccctagctttgtgtgggagataatctctgaaagcttccttacaaaagcatttggagacccgcctttttgttgtattattttgttgttgttgttttttggttttttttgagatggagtttcacttttgtttcccagactggagtgcaatggcgtggtctcggcccacggcaacctccacctcccaggtacaagcgattctcctgcctcggcctcctgagtagctgggattacaggcatgcaccaccacgcccaactaattttgcatttttagtagagatagggtttcatcatgttggtcaggctggtctcgaactcccaacctcaggtgatccgcccgcctcggcctcccaaagtgctgggattataggcgtgagccacctcgcccggccttgttgtaagttttatatttgtttctttgaagattggggaaggttggttattgaaactatatttctaactcagtttgggtaacttatttttctagaatttgcccatttcatctgttttcgagtttttgacactactcttctcaatagaattcttacatgatttttcaaagtctccattttagctgtagtttttgacccccttttaattcttaatattgcctacttatactgtccttttttcaggaatcatttttgccagagattgaacttgtcttttaaaaaatttggatgtaggttttgtttatcctttgtggtatatgtcttttagttcattaatatcttatctttatttccttctacctttcttttgtttattctggtgttttttgttctagtttcagtagtggatgattagcttattttatttttttcctcttcactaataggatggcttaaagttacaaggctttaagcaacaatcttgtttcattccacaaggtgggatatataattgcttaatggcttagttttaaatgttttcagatttcttccttgttccatgagttacttagaagcaagttttaaaacttatatagtctttaaatttttaagttgagttctaattgagtggtggtctgagaatgttactatgatttaattctttactatttgtttaattttttttttttttttagctcctggccaggttttatggttttttaaaaaggtgtcacttttaatcatgtgttcaataaagtagatttattaattgtgtttgcatcctctatacattttccaatcccataacctgtgttaccaagagagttgggtcagtctcaccctttaaccttggatatatcaatttctcctagtaaccttcagtttttactttatatgttttgcagctatgttattagatacatgtaatcagagttactgaatttttaagttcttgaccttctctgttcttaataatgatttttatcctacagtctgtgttatctgaaaataatataaccaactttcatatggttagtatttgctcggagtacttcttccatctctttatttcagcctatatgtctgtatggtttaggactgttgaatggcctatagctgctgttagagttggtcagtttagtctgttaacacgtatttagattactgatgggtttgaattcattcctctcatcagttttgtgttttatttaccttgctttttcattgcttcttttacttttcttgcctcctattcttttttcttgttttctctcttttctttaacaattattaatacagtataatgtaaccagtaataatgtacatcgtaatgaataccgctgaacctaccacctaatccaagatctagaacattgccaataacttccatttgagtaagagtttagtttgaatgttaaaaactctttgtttttcctagattgtctttaaatttttaacattcattctcaacaagggctaaaattagtatctctagcctctccccaaataataagaatcttgaaaccttgcaacttcatatcccccttccaccttatatattattgctgcctaagcattttaattctgtcttttattttattttgtacttgcatattctgcttacgtacctatctataatttaattcccttcaaattttattgttgatattagtatagggtcaccacttgtttcactttatctaggttgctggtttatcagtattccttctttctggtctctctggctttcattttcttgctgaaatatgtcctttagtaggtctgtcagcagggatctattggtagtagttgctttatctttgaatatgtctattctcattcttaaatgaaaaagaattcttaaatccaaattgacagttatttctttcgccataatttatatatagccattatcctctggtatgtattgttttaagtggtctgcctttggtctcatagtattctttatgagtaacctgtcttttctctctagttgcttttaaggtcctgctcttgtctttggtgctctgaggttactctgtagtgtgttttgatttggattagtttaaattatcctgctagacaccttctctgtcttttttgggatgagggaagaatgttgtatcattaaatcttagaattttctcagctattttaaaaaatgtttcttctctgttctttggattttttcttttctctttttgttttggaactccagttatagacatatgttagagtttctcattccatggttcttagctctttcattcgttccatctctcgattttttttctaaaatgtcacctttatgtctcttatgcttttttattgtctcaatcttagttytgtctcccgaagttcttgagtctaatcctacttctaatccatccttccttctttttgagctttgggcttttagcctctctaccatttgtgctgatctgtgggtatcctttttagcctggtatgaggtttattctttcctgaggcggggtgggggggaattgctttctgttttgttaatatctcagtttgggctaggggttcctggacaaatgggcttggttgtagagtactagtccattgtccctacagctcaagagatgcttctgtctgccagctcaggatagtcagagaaggcatcctgtagtcccctctacactagtgggcttttcttcttctttttttgatctacctatcttctggtaagtgtagcccttttggggatcatgactttatggaataggagggtatctcttctcacctcctaccttgagcagacccaaacttctcccccgtccctttgagggctgaaaactcaaatgtcacagacagacgttcacacttcatttggtctgaatattgctagccatggaatttctaaaatttgcttctacgaactatttattagtttcagtgtgctaagcctgctgggaggaaatgctggttgtgagcatcagcacagaagcattctggacggttattagcacaaagttagcatatgattttgtaatctcttctgctaacagtgttttttaaactaactctttacggtgtcctgtgtactaggtactgtgcctgtgctgacttcctagctttattggaagttccttgacagcggaccgaatccctacccgttactctttctccatctccctctgcagtgctgagccctcaaaaacaaaacagcaacaaaaaacacacttgcactagttgctgattggttaatccccacggaaaggttaccaacaaaccacagcagtgacacagaagggaatgcctatttccacatctagggaggcccacctgcccagttccgtgctgctgacttagagcacggctttgctgatgatatccttggctccttctctgcgtcaagccgcaggtgttctctgccttctgtgattctgctcccctccctaggtggtgtcatgaagtgcatggtatttctgctggctcctaggcttttcccctgaccttgcacatacagttgcctgctccacttccccacctgcccagtcagggcatcacacccccttatccatccagtcttccttgaattttacccacctcagtgagggcagctcttcccagtcactcaggccaagaacctgtgtctttcttaacttcttttacacccctcttctggtcaataaggaacttcttggtgcttctttctgaatatataccaaatctggccatttatttcctccattatgcccaccataatgcaagccattgtcatctttagactgaactatagtaggcctcccctgccctcccctcccctgccacttagtgtcagtgttccacgaaaaaaaaaaaaacacgtctgatcctgccttctgctgcttgcagcccccacccagctcccaccatcctcaacagcacccgtggccyggctgcaggctgtgcggacctgaccccattccctgggtaaggctgggtgtgcccctacctcttcccctgtgtgggacggtcttgtccccagatacctgtagttgatcctgtgccctatgcaggattctgttgacctgcgactttgccagaggttcagactgacatctctacagattgctcgactccctttatacccttaaaagaaacagtggcagttatcacttagtaaacacaatggatgcagaagtgacaagtccttcccggagggtggagacccygagagtagggattccgttccgcccagtcctgcgtatccaccgtgggctcagaggccacacaccggttcttttgcgtgtatacatctatgtagagatggagccataagtaatacacgctttaaaggaaggggattttacattttgggggggagattaagttgattgccaaggaatcgggtggggatagtttataaaagtgagggacataaggaataggcacgcaggaatgagggaatgaaagccctggagccgcctgggagcctcactgcgctgtaggacctcgtgccagtgtggccatccgtttacgatgtggtgggcatcctttgaggtttttcttctgattttggggaggtgggcggtactggtgacatctgcttccagagcagccgtccttcctgctccctttctggtcttcggttgtttccactcgggttcttgcggggcgcgctccctctgctttctggaggtgattaatttcccaactcctcggcaccgccttccccacccgaaaaaaggatgcagaaccacgcctgcagttgggtgggcctcccgggtgctgggcggcccggggcggcggggaccccagcggcggggcgggcgggcgctgacgtgtccaggcgggattgggccgccgccctatatagcagccggggcccgggcgccgcgcctcggagcgtcccggcttctcccgcgcggggggcgagtaagccagcggcaggaccagcgggcgggggcccacgagtgagcgcgcaacacggggctgggaggcctgggcgggcgggcggacggggcgggcgggctgccgggcgggggggtggggggtggctgctgacgtggaggccgcggagggggaggggcccgggtgccgcggcccccacccgggccccaggctgcggcccccgcccgcgggtgtcctgcttaccgcgcgtggcggttccgggccagacctggggccggctccgagtctcttctgcgcgtggccgtggcgcggaggggcgcgcacaaactttctcaagtccggtggcgccgctgggccgctcttggctgcaagctgggctcccccgcctcctcccggggcttcggtggggcacccctggtgccgtggccgcacggcgcggaggggcggccgacctgagcccaggtcgctgacgttggcggggccggccctcccctcccccgctccggcgggggcgccgtgtgcggccagggtgggggtccctgggaggccagcggggtccttccccccaggtggcggcggggcgggggtctgggcgcagaccgggcggcggggcccccgcagcacctccacctgccgcgcggggcccgcgtcagtctacgtgttcgggggtggggaaagctgctcttcttgggcctggagtgcaacttggacgtgccccagggtcgtggatgaaaaatacattacggaaaagtaccgaatttggatgaaaggcggggaggccgaggggttgctgtccctttaagcctgtccccgcccgcgggccctcgtggcctgtgggagggccgtgctgaggtggcatctgcgaaagttcctccatgcaggatgggtgccgacttccagaacttggtgagaagtgcggagcggagcctgccttctgctcgccagtcgcctgtggtctctcctagatttcgatcttgtgatctctgagtggatcaggattttattttcccattctgaactttggtttgtggtcttgagtaattttagttttggaagaggagaagtctgggtttcagccggaggcttttttggtgccctccatacccggtcctgtctggtgctttaaagcacttgcgggtctcattaactgaggctgaaatgaaattcttcctggagtattactgataattctcttcgaagactgttgccccttgaatatgtagttggcaaaacttatcacaagggaatcaacttaattacttcctcgtttaaaagcaaaaaagtagaacccctcatgtgaagccttttttgttgctgtcagaaacctgttagacttgtgctaaacttgtaagcaccaggtttcccacgcaacacacagctctgtcaggactccacgttttgctctacacgtattagggcggaaaggggtcttggttcctgccctccttcctttagttctagttctgtttgctgaaagttaaattctgagatgtgaccttttttgctttggatgtttgcactctgggaaacaaaattaaaagtccaggttcagtatagtttgaggtttacattaggtggacctggacactgattgatccgagcttcctatgggaaaagtagttgggagagccagaatcacgaagggactggggccatatgggagggactgaaggagacaggagatagggctcacctaccagaaggagccttggaggagagcggacttgttctccatggccagaaaggggaaagaagttgtagattttgtcataacttgaggtggagcgtttacagccatgcaggggtggacccgggccctgagaaggccaygaatttcctgtccctggtggtattaagaaatgggattagattaatatctgaggttcctttcaatcctgatttggacagtactgttagatccagtgagaatctgagatacccgatgttagcctctgttcttgggtatctaggcctgcccaaggtatcctgggaacttcagatagcaagtggagttgcctggcgctgtcctggggttgctgaaagatccacatggaacaggattaaaccctcgtgggtgttgtctgtgaaggcagagccaggagcagggcgtagcagtgcggggtggacatggggctgtagggtcagcttcttaggtgctgctttgttgaaccagaggcaggtggacccctgggctgtgcctcactggattgggagcacagaaggagaatgagactgacttttaagaaaatctcacccagaatttcaggtggggacagggtctgcatttacatgtgggtcatcaaatgcttgcttaaaacgcagtcttcgaaaacaggtttttgagttgtttagaagaaaaacaaaatgttgtttgatgataccagaaccctagatgttaaatgtgtctctagttgtgaaccattcgttacacgctctgacaaactgccacttggaatctggaggctagggacccagtatagcctgtcaaaccagtctggagttttctggaggtctgccttctgccttacctggctgcctgagggtctgtgcacgcctgaggaacatgagaggctctgctccagggtctccctcagacacaggagtaggttcccttatgttgagactcctttcagtatagggtccggctggacttggcttctgaagggtgtgtgagtggtctcagaagagactgacactgggtgcacagtggggattggctcatcacagctccgtgctggagagtcggtgcgggctgacatggacggaactgcattttgcagacttctagtgtggctgtcactgggcactagagacttgcccagaacctagcttgataagggggtgggtgtctgggtttaagaagtgacattggagcccgggacaaccttgagtgagagaccatgccaggtgagagtcagcaagcaagcgtgggagggcggagggtggatgcgggagaccagaggcaagtgtcactggacacctgttggggcaccttagcctggagtgccctgccctgttttgctcccagactggacagacacttggaatctcaaggagctcttgccgagttgtgaatgtgctaatctgacactttggagaaattttcttactttaatctttaaaacttgcaaactagaattttggtgatgcttttaaatggaatactcttgatcagtttgtcccagctttccccttcagtcttggggtacatctgtgtgtctggtgcatctggggccccatagtgtctctggtttgtggcaggttccctgtgtgactcaagccctgtatttagagtttttaaaaaactcatgaccaagattagaatccagaaataccaccagtccacatcctctgctggaaaggcgagaccctttaatccagtctactggatgctcccccattgccatgaaccgccttctcagctccggacccatgtgtcgtaaggrcaagattattgtcacggtacgagtagtcttctccagttgagtggggtgttcctgttactgtcattgcttttcccattttagacacatgcctcactcctgtcagcagttccaccttttcatggttgaggagcacatgtggtcgccagcctcccatctccagagtcccctaaggcaaggtgactcaccctcctacttcacagagttcttggtcctccccagacagcctttgaaggttcctttcaatcctgcgatttcatgacctggtttctagatccccagtggattagaaaggactgaaggacttttacaggctaacagcaagaagaacaaagtaactgcaaaatagacggagaattcttgaagacggtagctcttggtcaccataagcgctgcagagaccccgaggtccacattctgttgtaggtcagagcccagcacaacaacccttcttctggttcagccgcccagcggttatgtggggtacgggaaagatgatccagccatgcaggagagcaccagtggttctgtgaggattttacttcaaaatagttaagtttagaagtttggcacttaaaagatcactccctcaggtccctggaatagttgtcctctgcaagttggagctggttcatgttttgttttaatatgttttgtttcaagctaacgttttttttttcttccaagaaacttgcctgagtattggtgttagtaaccaaagcataaatatcttgaccttttctgattttgaggtaaaaagatctgagttgtaaaatgtagataagtaacttttctctggtttcctctctctcctctcccacttcccatcccataccagcaaaagctggcaggctgacagaggcggcctcaggacggaccttctggctactgaccgttttgctggtaagtttgaccctgtctgaagacttcctgtccctgggctgtgtgtggacctgggggcgcagggatgcgtattttcttagtcctgtgtgtaccttctttctttatatcacaccttcaagtttctcgtggttcgtcagagatgtctccatagcttcacctcccagcaggaaccatctatagacgtgtgtcccttagatgtgtcatctggcttccgtctgtttttaatcttttatttcttaaatgtgaattatgtttattcagtattatctgaattggggtcttgcttctctttaggattgcaggccttaacttttcttcaacttggggagaggtcttaattatgttataaaaattatgcaaaattcactccttattacttggccttgttgtgcgagtaattgatgcgtaattgtgtaaagaaaatgggttcttcctcactgtagtagtttggagctcacctggaactggggagagggaaggagagggaaggagaggaagctaacattcctacctcagaatgctgaatgtaccccatttttcacataagggagctgtggctttcggagcccatatcccgctgagcactgtggctgtgctaatgagaaactcagcgcccttgggccaggtttcccctgctgtgcgagttctgtcccacacctggagggatgggagaataaccagtcagtgtggatcaagggcatttagcgcaatttgtgggtctgttactgttgctacaaagcactgaggctgctttttcctgtcacgcagctaccacttataaccacctggttaagtcgagatttggaggtggtttagtttggggcctggatgcaccttgcagagagagaccgctggctttttgtagcaactgtcatgatgcattttgtaagcattaagaggtgtgtggtgagcaaattgacagaataaccaaggtcrctgttaggagaacgatcctggtgttgatctatgcctggagcctgggtcaggcaggtggcaggttccatggtccccccacccctgcggttaggggtggtgttgactgtgtctctgtggcccctggggtggagaaatggatgcagactgccccaagtggaggatgagctcctccattacaggcaacttttgaggggacagttaaccagctgttctaggacaaacttgtctaacccgaggcccaggacagctttgaacatggcccaacacaaatttcttaaactttcttaaaacatgaggtttttttttgtttgttttgttttgtttttgtttgtttattagctatcattagtttattttatgtgtgtcccaagatcattcttcttgcattgtggcccagggaagacaaaagattggccacccctgttctaggacctcctttacttgcattttcccccctttttatcacttggtgagagtttgggtatcagcttacatcagaggttgtgaggaaaataaaaaggtatagtttgctggtaaaaaagagagtaaaactttgctaaaactcttaggttaacaatctcatagataattgagggttgtactttgacttctgatttattcttctttgctttagtggttttcccggattgtgtgtaggtgtgagatcaaccatgagttccgttgcagttttgacccaagagagttttgctgaacaccgaagtgggctggttccgcaacaaatcaaaggtgacagcccttttatgtgctcttcctggtaatgtctaaggcattgctccctctaaagcctttaccaaatcccatgccctttctagaagtaccttttggccctgtggttgtggggcagggagggtccaacatcttgtgcactgttttcgcattgctgtgcgtgcaggggcgactggccaggcatgaggaaatgaatcaagtacagtgagatttaacatgtgggcagctttctggaaagccagcgaatttgaccattggtaattaatgcagtccttttcaaaactgctttttcctaattgtggtaaactaaaatctgggctctgaagcatcccagagcattgcttaagcctgccttgaggatgaaggctggaccctggcttcggagttctcgaacgccactggctgggattaagagcagtgctgtacagtagaatagactacaagccacgtgtacaatttttaggattctctggtacttattaaaagggaacaggtgaaattaattttgatattttaccccaatatgtctaatacactgtcatttcaacatctctaatgtaaaaaaaagggggggaaccattgatatttgagattatttctcttcgaagtctgatgtgtatttacaacggtgggacatttccttccatttgaatgccagattttcatccaaaatccttgatctgtgtttagatgttataaaatcttcatttgaaagagcagattgttctactccaggttgttcgaaacacacttaaaagttttccaataactaaattgagtattagttcttaaaattaattaaaatataaaattaacttttccttagtcacactagccacatttcagaagctcatttctggtggctgctgtgtcaggtgttggaacccgagaagctgctttgttctgggggcctgggatcctcctcctggagccagcttccctgtgaagtctgtgtttccctttctagagagggaagacggcactgaaagaatgcttccacctgtcctgtcagcgctgtcgggtagatgggcatgcagctgggaagcgatgggcctggacttgggcatgagcctgtctgattccagagatcatccccctgttctctgtcacatccattcatggtgtttttcactgggccttgctattgccaagacrccatgctcagtcctggggatttgggttatccaaaacagtcacacccttgatttcatggagattgtggctaatggcacaaacacatgaacaaatagggcactatggaagatggaagtgatgataatcagggaacctgatttccacaagccttgctgtcctctgccttgggcagggcagggggagatcagcggtgacaattgccactgcagtctttttttttgagacggagttttgctcttgttgcccaggctggagtgcaatggcgcagtcttggctcactgcaacctctgcctcccgggttcaagcgattgttctgcctcagcctcccgagtagctgggattacaggcatgcaccacccacacctggctaatttgtattattagtagagacagggtttctccatgttggtcaggctggtctcgaactcccgacctcaggtgatctgcctgcctcggcctcccaaagtgctgggattacaggtgtgagccaccacgcccggcctccacggcaatcatttttaaccttgtatgttacagtggaaaatcagagtttgcttcaaaggcaattctcacaggtggtgctgggtaggaccattgttttgcaaatgcaggggtctgctctgtgcctggcattgccatagttgtgatttttttaagtgtgttattagactctagaggacttaaaaattgacgtagcaaggcttgctttcaagggactcaccccgttaggggagtggggctcacaatgtctgagctgatgtttaccarggaggccatgtggatgggggtaggttcgctgtcagagactgggagtctctggcctcctctagctctcacactcagggtgctgggcctggtgacctcctggggccttttccyatcactatgaattagaagagaggggtggggggagttgtccttggagcatttgatggttcttgtttgtctgtttttaagcactaaaacccttaaaagtgtttttcatgtaatgctaaaagtagtgcttccttttaatctgtgttggctggtccagttgccactctaaattcagaagaggagagcgaccctccaacctacaaggatgccttccctccacttcctgagaaagctgcttgcctggaaagtgcccaggaacccgctggagcctgggggaacaagatccgacccatcaaggcttctgtcatcactcaggtagaaacaccattctttcttttaaaaattttatcatgtaacatgtctatgtaaatttttaaattttttttcttttttttttttttgagacagagtcccgctctgtcgcccaggctggagtgcagtggtgcgatctcggctcactgcacgctccgcctccygggttcacgccattctcctgcctcagcctcccgagtagctgggactacaggtgcccgccaccacgcccggctaatttttgtatttttagtagagacggggtttcaccatcttaacaaggatggtctccatctcctgacctcgtgatccgccttcctcggcctcccaaagtgctgggattataggcatgagccaccgcgcccggccagttttttaaatttttaaaaattaattgctgttctttcttaacctatccttccaagcgtagaatctgatggaagagtttctgaatgtgcaagattgagaatgctttgagtagctaaagggagaaggccttcaatttaaatcatcccccaccccagagatgtttctgtcgaccacttctctcatgtccaccctgtatgctagcactcagtaggacaggcacgtggtcgttttgcaggcagtgtttgtcagatgaatgggtcctgttttctgttctctattcattatcctgctttctcgaagaggttaaccagtttcctggttttctttggcttcagtagcccttctctctgctacctgaatttgagatgttagtgagtttcaaaacttttatataaattcatatcatctggtcatggtggaaaattactatctcgctgccagtgtcttccctgaattttaggctcataaacagttgcatcccaatccttccattttcacctgtctgctatcttgttaatggttttgttaaatgtaccactgtctacttggtgactgtggtctcacaccagggtagttgatccctcttgcttccaccttgtccctcctcagttcttctccataaagcaacgggagggaccctgcaccatcaagcagaatgcctcctgctgaaaagcctgtgttgacttttactacrgggtgggatgggtgatcctcttcactgtccccctctggtgtgtgcaccaggctccgcccccatccacctcctccgctttcctgcctgtacacccttagttccctcacctcttaacatggatagctgcctcgtgcttcaggacggtgtttcctggccgtccccagggtccacctcccactttctctcaaactctcttgcccctgttgatttcatcacagcacttgctagctgcctcattcatttgtgcagctgatgtggttctctccttaggatgtcagcctcttgaccttggccctttctccttgtctttcggctgctttatcccagggcttcgagcagtgcctgtgggcagggtggggctgctttgtgagtggatggtgatgaacacatgttctttactccctatctgttggccttcttttaatctcttaacctttccttttttgatcttttttgagcaggtgttccatgtacccctggaggagagaaaatacaaggatatgaaccagtttggagaaggtgaacaagcaaaaatctgccttgagatcatgcagagaactggtgctcacttggagctgtctttggccaaagaccaaggcctctccatcatggtgtcaggaaagctggatgctgtcatgaaagctcggaaggacattgttgctagactgcagactcaggtgggtagcctgaggcctacttctccccagtgactgtgtacccgttccattacccggctcctgatgcaggctagaacgtcactggacccttcctaccagtgggacagttccgtcttttggaggtaggacagcaacattcagagtcctctggcatttttagtggaaaaactcactaaactaataatagaactgggacacttaccatttttgctctttgagtgaatgaacttgaaagtaataataattttttttttaagagacagagtctcaccttgttgtctaggctcttgtgcagtggctattcacaagtgtggttatagtacactgtggcctcaaactcctgggctcaggcaatccacctagcctcccagttagctgggattacaggcacaccaccacatctggccaaactgaaaattagaagcttgtcccagagtttgagacacttaaaagaagctgggcttgctgaatggtaaagatgggtggttcccattgctttgctagtatgttcactaactacacatttccaggccccaaattgaggagattacaagttcaaattctgttttaagccagtttcctcgtctttggcagtctgatgccagtacttggactttatttaagaacatttgtaataagcaaatctctgatgcatttctccctaagtggtagcacttaaagaccaagaaaaatgtaaagaatcttactaaagtgttgcgtgactgctgttgtactagataggcttatttaggaatgggggttcttcccatctgctactgagtctccttgatcttgtgggagctggatctggagcaccctggagcatggtgattggacgatggggatttgatgggagagggcctgaggggtaggagtgcagggtgtagccaggaggcgaggcagaggagtgccacctaatgcaggtccagctgtgccacttaaccacatgggggcatcgggacagtccccaaccccagctggcttcatggagttaaaccattaagtgttaggaaggtgaaagtgttgcttataattgtccagcatggtggccagtgcataataggctctgaaagttttccaggtgtctgctagtcagtggatatttgagcttctgttttgtaatcaacactgtaggggaaagggccacttcactgaatatatggatcagaatgaagacattgacccctgacactctcctactcctcarttatcttcagacaaatcccagatacattattgtgccttagttcagatcttcccgttttcatgtatacatatatatagtcattgtgctcctaactcatgtaatcatattgatagtggtttcttaatattatacctttttaacccagtctctgtttggactttcctcatcatctccaagatgtttctttcagttggtcttttcaagtcagtgtccaaacaaggtcacaatgttgcatttgattatagagtcctgtctctcattctttaacagtgcttactccctcctacccccttttttttttttttttttgagacaggatctcactttgttgcccaggctggagtgcagtggtgcagacacagctcatggcagccttgacctcctgggctcaagtgatcctcctgactcagcccttcaagtagttgagactgcaggcatgcaccatcaggcccggctttttttttgtttgttttttggcagatgcgggttttcaccatgttgcccactctggtctcaaacccctaggctcaaatgatccactcatttcagcctaccaaagtgttggaattacaggygtgagccaccacgcccagccaatcctccccttttttaatgccattgattagtggggaccgtaggtttttggttctgctattgactgattatttttggtgaactggtgttagatctctaggggcttggttacttccacagtcagcttgttgggcaagaagaccctgtaggtggtgctgagtctgtgctgtgatagctggttgttctgctttgaactgattttgagattgatcattaggctcaggtctgggtcttcccttgtaaagttccctatcagtgctttgtgtaatcattttactatcaattggtgattgcccaaattcgttaagggttgcaaattatgcttttctaattctctccctgctcatacattagttgataattcttgtaaagaagaatttttcttcatcagcagttgggtgggaagtaccagataaataatcgattctttggcgctccggcgacttcagtgttgatcagtgactctctttagtgtcattatgaactcaggcattgtccatcattcttcatgctggagctgcttcatctttggccagtgggtcccctcctttcagttttgttccctgcagctttctgtcatgacctattaatatcaataccttctggccaggtgcagtggctcacgcctataatcctagcactttgggaggctgaggcgggcagatcacctcaggtcaggagtttgagaccagcctggccagtatggygaaaccccatctctactaaaaatacaaaaaaattagccaggygtggcggtgggtgcttgcaatctcagctacttgggaggctgagrcaggagaatcacttgaacccgggaggcagaggttgcagtgagccaagatcatgccattgcactccagcctgtgcaacaggagcaaaactctgtctcaaaataataaataaataaataaataacttcttaatttctaacacagaaagatgcctcaggctaatcttacatatttccttccacagaccttgagtcagctgtttctctctgaactctgaaccttttgagtaggaaattgcagttggagactccagtctccataggtgcacgtcgcaactaggttgtcagagcttctaggctttttcagaagacagagctaggataattgtacttttaagaaaggaaaagcaggcggtgactctcacgcctgtaatcctagcactttgggaggccgaggtgagcagattgcatgagcacaggaatttgagaccagcctgggcaacatggtcagaccccatctctacaaaaaatagtggtggcgtgctcacctgtaatcccagctacttagaagtctgaggagaaaggattgtttgagcctgggatgtggaggcttctgtgagcagtgtttgcaccaccacagcccagcctgggtgacagagtcccagaaaaggaaaatcatgagttcaaaatcacttgaagtaattccttttttctgagtttttctgtcatcttgatatagttaggtacatttgtttccatttactgtcaatttttaaagtatttcaacatttacatgcttgcaaagtcaacgttatataataaagtactttcagagaaatctcccctgcctgttaccttcaccctgctccctcctcacctttgcaggcggccattcctggtcctggtttatcctttgttgtttgttgtttgagagcagaagcaaaatacagcttgccatacaccctgttctatgccttgctttttttcttttattattttttggaggtgtctgcatatcagtaagtagtgatttttctcatttctttgttcagcagtgtaatattctgtgggcgtactgtaatttacccaggctttcctactgatgggcatttgggtagtttccagactttagctgttacaaattatgttacagtagcaatcgtgtgcatatgctatttcctgttttacccagtgtatcttgggatagattcctagaagtgagatggctgggtcagagggtggctgcatgtggaatcgggccatcggatgctaaatttccttccttaggaattagtgttttgccgtctcatcagcagtatgcaagagccaggctcttcacattcttgggttttagccgatgtgagaggcaaccaaatatactttaaatttgcatttttctgatgagcaagattgagcaccttttcaatatataagggccacttgcattttttattatcttgagtcattgttaggaaagttttttcactatcaggtcataagaaagtttatcttttcttctgctgcttgtaaatgtgttcttacatttcagtttctgatctatttggaatttattgcaaatagggttgaggcactgattgagtttcacttttttccatacggctttcgagttgtcagcactatttttttgtttgttgtaacacagggtctcagcctgccacataagctgaagtgccatggcatgatcacggctcaccggagcctcaacctcctaggctcaggcagttctcctgcctcagccaccccagtagctgggaccacaggcacacgtcaccatggccagctaatttttttttttttttttttttttttttgagacggagtcttgctctgtcgcccaggctggagtgcagtggcgcgatctcggctcactgcaagctccgcctcccgggttcacgccattcgcctgcctcagcctcccgagtagctgggattacaggcgcctgccaccatgctaatttttgtatttttggtgacctcgtgatccacccacctcggcctcccaaagtgctgggattacaggcgtgagccactgcgcctggccttggccagccttatttttaaaatttttgtagaagtcaggtctcaccatgttgcccaggctgatcttggactcctgggctcaaacaatcctctcatctcggcttcccggagtgctgggattacaggcgtgccatcactgtcttgaaaagacgttttgctctagtgaacttgagtggctgcttttatcatgtcctaaatgtttatattaacttagctctgtttctgggttttcagttcagaccagcaggtctttccgtatactggtatttcctgtgttaatgataatggtttcatgtttaatgtctaggaccactgttaacacctccaccctgcactattctttttcagggttttcttgttyatttttgttkgttctgtgttacaacctttataatcaactgtttgaaattgtattaatattttaaagttaattgggatratcgccatctacttaaaccttctgttagctattttaaggagtgttttctaatttygaatgcacatactccaccttgtgttgggcttatgtcttgctattttcttgtccttttttcttttttccttttttctattagaaacacatcttttggccaggcgcagtggctcacacctgcaatcccagcactttgggaggctgaggtgggcggatcacaaggtcaggaattcgagaccatcggggccaacatggtgaaaccctgcctctactaaaaatataaaaattagctgggcatggtggcgcacgcctgtagtcccagctaatcgagaggctgaggcaggagaatcccttgaacccaggaggcagaggttacagtgagccaagatggcaccactgcactccagcctgacgtcagagcgagactccgtctcaaaaaaaaagaaacgcatctctttcattacatcttctaagtagttgttgtttgtggaagttaatgttgttaacttcttgatttcagtcttttctctttgctataaatagaatttcacccagtagttttttcagggtttctggatatgcagtcatgcttcttcctgtccagcttttgtggatgttaactcttgtctccctttgtgggtgtatattccagtggatgttaagtagtggtgcagatacactcgaacttaccctaacctgggagtcagggcaaccttccccaagcatgtgatgtttaagctcatgctgttttaatggatgagttggtgytgctgggcrrgaataagcaaagatggtgtttctgccagaatgtcttggaaaaatatgctccttcagaacctacaaatattcttgttttcttttattctcttcttgctataggcctcagcaactgttgccattcccaaagaacaccatcgctttgttattggcaaaaatggagagaaactgcaagacttggagctaaaaactgcaaccaaaatccagatcccacgcccagatgaccccagcaatcagatcaagatcactggcaccaaagagggcatcgagaaagctcgccatgaagtcttactcatctctgccgagcaggtgaggcctgtgtgagtgcctcgtgcccctgcctacctgcttgtgcagacctcactccctcatgggttgccgtgtccagtgtggacttcaaggcataatgtggtgggggtggaggkcttgactccaactctaaaaagccctgtctgtccccagtttgttttcaaaggcctgttctcatcagatcatcccttcctttccaggacaaacgtgctgtggagaggctagaagtagaaaaggcattccaccccttcatcgctgggccgtataatagactggttggcgagatcatgcaggagacaggcacgcgcatcaacatccccccacccagcgtgaaccggacagagattgtcttcactggagagaaggaacagttggctcaggctgtggctcgcatcaagaagatttatgaggagaaggtacacgatttagaggaggcaaatccccatgggcaggaatagaaatgaggatttgggtctggagattcagttaaggcctggttctgccccttatctttttgtccttgatgaagatgcttattgtctctacacttgagtgacccgggtgagatcggtgcccgcccccccttgctgttgagcatctgcctggcagttgtccttgccgtcctgggcctctgactgtgctgacaggctgccagctgggctgccccgggtcagatgcacatcccggacttgttcacgtcttagattaagctgttagctcagcttagtgaactttgaggtctgaaacgtgttccttaattgagggaaaggattgggtgttttgcagtgttcaaggacgaagttatcagccggcgggtgactagactgaggggaaaaatccagtccttgaacagtgaagtttctggggattggctagtcctgatcacttgttgttcacttcttgggatcagcatctatagtctgggccgctttggcttgctttctgcagcagtggccatgcccacctgcccgcttcccacacctttccctttgactgccccttatggtgctcttatttagaaaaagaagactacaaccattgcagtggaagtgaagaaatcccaacacaagtatgtcattgggcccaagggcaattcattgcaggagatccttgagagaactggagtttccgttgagatcccaccctcagacagcatctctgagactgtaatacttcgaggcgaacctgaaaagttaggtcaggcgttgactgaagtctatgccaaggtaactgcctccgagcatgaagtgtgtctcctttgagtggagtccgcggggccttcatggatgagctctcgatttgtaaatcctggggcctggacacagtgcaggtgcccaggtttggggagagcgtgcctctgagccccaggtgagcagcctggctttcactgtgacacgaccttgagctctgcaaacccatggctgttctcccrttttcttaggccaatagcttcaccgtctcctctgtcgccgccccttcctggcttcaccgtttcatcattggcaagaaagggcagaacctggccaaaatcactcagcagatgccaaaggtaaggacacgtttttcacctgttgtattgaatttgtcttgttttctgtctttctgtttctgatattgctttgttgacctttgtactgtggatgcccttgaaaactggtgtatttttctgaattaactggcckgtttgacatggtcaacttccgtgttagcttaaagaacagcagaataaatgtctgtagatgtctgtaccatccttctggcctttaaccagagaggattgtatgttcttaggtttcataagtatcttaagaaacatgtcatttagtaattatggtgaaataacttcatgatactttggcgggccrggtgcggtggctcatgaggtcaggagatcgagaccatcctggctaacatggtgaaaccccgactctactaaaaatacaaaaaattagccgggcttggtggcgggcacctgtggtcccagctgcttgggaggctgaggcaggagaatggcgtgaacccgggaggtggagcttgcagtgagccgagatggcaccactgcattccagccttggcgacagagcgagactctgtctcaaaaaaaaaaaaaaaatactttgaagagcagaacttgtatacaaattgtattaagtgtgaatttaaagcgttctcagtttaccaaaggagattgtagcccccaggaaacatgaacaaaaaagaaataccagagaatccaaccatcatatttaattcctgttttatttaaactttgtttccaattaatgttacagtcctttttaaaaattaawttttttttattttattccttttttttagtgacaaagcctcactctgtcacccaggctggggtgcagtagcgcagtcatagctcactgcagccttgaactcatgggtcaagtgatccgctcgtctcagcttcccaagtagctggcactacaggcgccccaggctagttttcgtggaggcagagtcttactagttgcccaggttgatctcgaactcgtgggatcaagtagtcctcctacctcagcctcccaaaatattgaggttatgggtgtgagtcactgtgcccagccccttttactttgtatagcttcatataaggaccagtctgccttccttaactccttacctggaggataataaaccaggaactctggcagccttgtctatgtcaagcaarttactttaccaccttggtacagctatacgagttttaaaattccatccgtgctctgtctcattctttatgcaactcaagaggaccaggccttgtaaaagttcagatggtggaggagcatgtcgcatgtcgcatgctttatgttagtggcttctgtggggcaaacggtgtccttagtgagaggcaggattattcggccacagtatttagtttcctgactatggctccctaaccctccctttcaactttgtttgatggctgtggatatgtccctccctccctcacatctatgtgaagcagtttgggatcagaagccgctccgaagagagctcccactgggagctcaggggctgcagctgtgccattctgttttagctatctctttggttttggtgtggtaggttcacatcgagttcacagagggcgaagacaagatcaccctggagggccctacagaggatgtcartgtggcccaggaacagatagaaggcatggtcaaagatttggtaaggtaccccttggaatgttgtgtgtgctggtgacaagggaggctctgagttgggcatgggcggtcatctctcgatgacatcccacatgtccgggcacagacacccagggcatcctagctgggtgagtaataggttctgaaacaaccagargctggtcgaagtcctggaataatcgtgggtggaggaaacttcatcttgaagaaggcatctttcaggggagatgcaggggcagtctccaacaattcctgacagctgagtggtcagaaaaggcaaccgtggagactgctgggttttggttcagctcattggccaagtaaccaggcgcatccatggacctctgtgctcctcctgcagattaaccggatggactatgtggagatcaacatcgaccacaagttccacaggcacctcattgggaagagcggtgccaacagtgagtgaggctgtctgttgcggtggggccagtgtgccctgagacccttgtggggggtgtcagctgtgagaactgtgacgtccgtgcagacagtccaggcccattgctgcctgtaatgggagttacagactttacatcctcctgcctgctggaagaggccacttttccttttccctttggtgcagtggttggattagagctgcttggccagtgggtgaattgtcacttttgraaatccatctaagccctccccaaataacccacagaggccatgttgaaggcatgcccaagggcagcattctctatatttccgtcagacctgctaggttagccaatcagtgttggtagtactcatgccttctgaacgtggaaactgctgatctggaactcaytgaagagtaaaaacattctagatttgtgcccaagtaaaacaacatggggagggatacttttttgagacagggtctcactctgtcacccaggctggagtgcagtggcgtgatctcagctcactacaacctctgcctaccgggctcaagcaattctccagcttcagcctcctgagtagctgggactacaggtgcatgccaccacagccaattaatttttgtatttttagaagagacggggtttcaccatgttggccaggcttgtctcaaattcctgggctcaggtgatctgcycaccttggcctcccaaggtgctgggattaaaagtgtgagccaccacacccagcagggggattctgttgaagaggcagtgatatgtcagccaaggtcgctatatgcctcacctgtgccaggttgtaggtgtagcacagttacaggacactgttggaagtatgtcatgtgggccaaggtcgctgtgtgcctcacctgtgccaggttgcaggtgtagcacagttacaggatgctgttagaagtgtgtcgtgggcattctgctgcaggtccaaggatgttttstgttgtttgtttgttttttgggacggagtctcgctctgtcaccaggctggagtgcagtggcgtgatctcagttcactgcaacgtccacctcccaggttcaagcgattctcctgcctcagcctcccaagtagctgggattacaggcgtgcaccaccacacccagctaatttttttgtatttttagtagagatggaatttcaccatgttgtctaggctggtgtcaaactgctgaccttagttgatctgcccacctcggcctcccaaagtgctgggattacaggcatgagccactgtgcccaaccaagaatgtttttttacacctctttgtttaactgtatggctatackcacacactcgcgtgttctgaaaacaagtgcacacgtcgcgtgtgttacctttgggtggaaggtgagaaggcaagcacgtcctccattcctggatagttcagtggatgaaggagcctttcccaggtagtgggacaccgacctgcataacatgactgacgtccgtgtatccgtttttgttatgagtaaacatagccttggcagctgtgctgtggcctgtgcaatggtgagctctctggtgtcagtcttatgttttgtgggcattttacgtgacagcgacgagagtctgtaggcacaaagtgacctttttgcgcactacttgaaccacacatacaccataaacttgcttttacggttttgttttggttttggttaactgtagcgtttgtttaggcctgacacggtggctcttgcctgtaatcccagcattttgggagaccaaggcaggaggatcacttgagcccaggagttcgagatgagcctgggcaacatagtgagacccctgtctctacaaaaaagaaaaatttagccaggcctgtggtccccgctgctctggaggctgaggcaggaatatcacttgagcccaggaagtcaaggctgcagtgagctgtgattgtatcgtgccactgcattttagcctgggtgacagagcaagaccctrtctcaaaacacatatatatggaagtacagtagtgtaaatctaacattaatttctggtttctgcccccgagaaattgcagaatgtagcttagtcagtcatgtctgttctgttttcttctcatgcagttcctaactcttgtcttctttcgtaatctaaaaaaacctgctgcccagctcccatgtcctctgcttctcttgtcttgtgttgctycacctggcacagctgcatgtccatgttcccccctcagtgcatcgcctcgttgctgcctctgcgtgtgcatgtgtttgggatggacgcacaaaaagccctcctcrtggtccttccagcaagctgggcttccctttactgcacagtgggcaagattcctgccttgtttcctgatgatacggcttctccagagtttggggggcctggaactcttaacttgggggtactgggttctatccagagaggttgacagcaggagggtttgcaacagcacttgtcttgcagacacagtgaagtgctcagtgtgaatctgagccaacagtagatggggtctctgggcagcagcatgggccccacaaggctcttaggcgtcagtgagtgcttttgtgtggagttaatgtgtgtggtttttttaacttgagaatagtagttcccaaacttactgcacattagaaacacctggaatccttcaactattctgaagccctggccaataccccagacgagctaaatcccagactgagtggccccaaccgtcagttatttgaaggtctcggggcatttccagcttctggtccaggctgagagcctgtcctccagaacccttgtgatccaggtgaagatcataactggcccccattctagacaatggagatttttgtttgggaagctaagcatcgtttttggtgatgggaatcacagataaggttatttagcgctttagcgctgtcctgcccagttatgtcattggcagaatgttgttggtctgtgtcctaaatgtgtttccttttgtgttcctaagtaaacagaatcaaagaycagtacaaggtgtccgtgcgcatccctcctgacagtgagaagagcaatttgatccgcatcgagggggacccacagggcgtgcagcaggccaagcgagagctgctggagcttgcatctcgcatggtaagtgccatggctgggccctctrgaaaggcactggccttgcgtctcttggccccctctaaggagtagcgtgttgtggtgtgcggccttagagaatggaagtcgacaaatcccacgttgcactggaaccggattggactccctggggccacatttcctttatcctccccaggtcacctgcacgtcttgttctccatggctgtgtgctgtgctagaagggcacagagactgtgtggcagcgtcttggccttggccacaccctgggtgcccagatgcctgggtaccatctccagagattgtgacagacatttctggattctcaaaggcatcccaggtggttctcatgtaaggccagactcgaggatcactgcaaacctgaagtgggggctgttgctctctaccacctggcagaagcactgcactgctctgggctccccgacgtttcatacatgcttatgccaagctgtgagcacccttgcttctgtgagtcagatacccacacttgaaagtctctgggtgcctttaagtatccagagaagtcaaatactgcgtgagtgcctgcagcagcactttggcctgactgtgtgaggaacaagccccagggttccctgtcattcgcttaggggattctttgttcacctcaccccagtacccacacgaggaatctcaaattggcagacctcttttatagccctgagctgcattccagggcgtgatgcagcctcccactgcttgtggccttcccggagctcattccccagtctcatattccaggttctcctcttagcctggcctccagcccaggtcccttgtcctggctgctttatgcccttcctgattgctgagcccttacttctctgtcagccaatagccgtttgatccagaatctctcagaattcttggaaatgtttggttggctgttggtgttcttccctgaattccagctctgcttattctgtatttcttctgacattttaatggggcctgtggaggagttgagagccatgtgggttcagtgccctgtgttgaacgttcttagccatgcggggaaagtggtccgagccaccctctgttcagaagggatcactcactgctatgcagaatgccaggcctccaagtagaagagctgggcctcccctgtagtacctgttaaaacagaagtgctcactgaattgctttggtgattactgctatcatgatagcacttttggttgaagggtcctacagcgagttccttaattggactttgttcaggaaagtgacgtgcagcccatgttgcggagtgtagcgatgcttggtgagagcactcattatgcgctgtgcacactcttaacagctggttgctcccggggtgctacgaggtgccacctggagaccacctcacctgctccatgaaggactgtgcccagggctccctggtgtccccttgtgtcagtggggagttgctcgccgtgcttgtgataaatgacatctactttaattgtatttttaggaaaatgagcgtaccaaggatctaatcattgagcaaagatttcatcgcacaatcattgggcagaagggtgaacggatccgtgaaattcgtgacaaattcccagaggtaaagtttcccagagacattctgtaactctayaggagtgatccaagtcacacttcaggaatatttgatatttgggatatatgtccttcctcatacttgaacttagtctccccatgatttgttctaggtcatcattaactttccagacccagcacaaaaaagtgacattgtccagctcagaggacctaagaatgaggtggaaaaatgcacaaaatacatgcagaagatggtggcagatctggtaggggtgtttcacatcctttcttgtatgacagcacctggggtgggtggggcatgcgtcctgtcagaagtcctgacccccacaggacccctgctctggggaaagcacataggccctgggctggccttccatctcagggacttgggacaaagtggtgacggcttctcacttaatacctggatgtttagattggcagtcattgttaagactgcagtgtttgtggaattcaggtggggagatttgccttttctcatgcccagttaccttgtttccttgaggagtcttcagatacttagagaaattgtcccatccagtaagataagaggtataacaggtgacatgaggagtcatatactgatttattatttttctcaaaaactgacgtgggaacaggtttagaaagtgtagtgagtagtggatgagaaggccacaggcagccatgtatttccgtgggcttcaccttagctgatggctgccctgggagaggcgatggtgaaggactccagcactgtgagctgctgtcacatcactgccgtgagtgcagaattgcccagagcgtaggggtccgtgctgtctccatrtgtgttctgagccccttccttaaccagctctgatcctggcatgggacatgaactctctcttagccaaaaagtagacttgcatcgattgmctgtaatttgcaacgtaagttagttgttggacaaatgatctatctcacttaccctcatgacaaacctctgaaggtttgtttgcaaataccagtgctctgtcgtgttcatgctacccttaggggtagaagggatactgtattttactctctagcacaggtggtgaatcgggctgtgttttttgtctttaaggtggaaaatagctattcaatttctgttccgatcttcaaacagtttcacaagaatatcattgggaaaggaggcgcaaacattaaaaaggtgataacttgtccgctgcatcttgcttcttcttgccttgtcctctgtagccctgcaccattttggttttagactaggarggactcttccttacttctagccctgtgctcaactgtgtctcaactctgggagagctctagtcagcttctcatggtgatctctctccctgtagattcgtgaagaaagcaacaccaaaatcgaccttccagcagagaatagcaattcagagaccattatcatcacaggcaagcgagccaactgcgaagctgcccggagcaggattctgtctattcagaaagacctggtaatgggagatgttttctaatggagatcctccagtaaaatctctaacagcctctaagattgagcctggggttgagtcacgcagggtcattgggccagcgcaggctgatgtggaagattgcacctttcaatccaggctactgatgagttggtcagcagttttctgcctttgtctctcacgatacttacttacctggaccctgcagcagtaacatttgacgtgggcacttgtcttattagacattttcttcttgttacctgaaaatcttatctgaaggtatttacggtattttctttcctttaaaaaaaattgacatgcagtaaattgtacatatttacagtgtacaatgtaatagttttgacgtgtgtatacatccatggaatcattcccaccatcaccccaaaaatgtcccatgccattttgtattacagtctccctccatcccacttggcagctcctgaaaaccacactccccccacccccacttctatccccaggcaacccccagtctgctttcggccacagtagatgcttttggattgtctacgcttttgtgtgaatggaatcataacatctactctttattgggcccatctgctttcactttgcaggatattttgacatttgtgtgtgttgtcacctgtattgttggtttgttcttttttatttcaggataatattgcactgtagggatagatcatctgtttctttgtgtgtacttggtaattagtgtctttcaaggggttttctattttctccaaggtgtcaaatgtattaacatgaagttttttagaatagtcctgcattatccttttgctgtcaatactgacgtcacctctctttcacagtatatgtaatctgtgccattataaaatgatgccttttccctggtagtatgcttggctccaaagtctatgttatttttttcccccttatatttaaaatttttttggagatgaggtcttgctgtcgtccaggctggagtgcagtggtgcagtcatggctcactacagccttggctttccagactcaagcagtcctcccaccttagccttccaagtagctgggaccacaggygcatgctaccgcaccaggctaatttttttcttcttttagttagtagagatgaggtcttgttatgttgtccaggctggtctcaaactcctcaagtgatcctctcgccttggccttccaaactgctgggattacaggtgtgagccactgcacccagcctcctttatatgatactaaagtgagtttctttttggcagcttgctttttaaattaaatctatctactaatcccagcactttgggaggctcaggtgggcggatcacttgagctcacaagttcaagaccagcctgggcaaaaccccgtcactactaaaactacaaaaagaattagccagtaatggtgctgcatgcttgtagtctcagccactcaggaggttgaggtgagaggatggcttgagcctgggaggtggaggttgcagtgagctgagattgcgctgctgcactccagcctgggccatagagccagaccttgtctcaaaaaaaaaaaaaagaaaaaagattatgatgtttgcatttaattacagttgtgattrtatatgttatatatcacatatttatatttattacatatgtttaacaaacgcggttaaataacttactgtaatttttttcctcaattgtggtaaaatatacatagcagaatgtatcattttaatcgttttttaatggttaattcaactgagtacattcacaaggttgtgcaaccatcaccctgtccattttcagagcatttccatcatcttacacagaaactacacccattaaacagcaactaccaccatccccacgtgctcagccaccatgatgtcatgattttatatgattggctttcagtccaccatttacattattaacctttaaaaaaaattccattattttttaaagagatttaaataatatgaaaaaatgtatgtatttatccacacagttgccatttctagagctcttcatttcttggcgtgatccttgtcttcattttccttctgtctgaaggaaaccactcaacatctctcgtagtgtgtatccggtaatgacttctttcacattctgtatgtctgcaagtatttttttccttcaytttcgaaaagctgtttctgctgcataaaggtttctaggttggcagtttttttcctttccagacttggcttcattgccgtctcctgttgtttctgatgagaaagctgatggtgcccctggctttgttcctctgtccatgacaaaccttctccctctggctgctgttagggttttaccaccgtctctgagcaagttaggatgtgtctctgtgtagttttcttcatgtctcttagcttggtgtttattgagcttcttgaatatatgtgttcagaatttcatcaaatgtggacaatttttggtcactatgagcattttgttgtgttagccccttgctgtctccccgtcagggactctggtgaccagggtatttagttgtcttctacttgtgctctgtttatttgagttgaggggaggagcgatattggttttctccatgagtttctttaaattcattaattctttgcagtgttctaatctgcctcatttcatctaatatcattttcattttagatgttgttttcttccctagaagttcactctgaattagtatcttctgtattttcagttcttaacatgttcagtctttctgcttttggccatagacaatacagttaaatacctgtttttctgtccttggctggctgattctaacactgtcatttctgggtggttttctrttttcttttcctcgttatgggttttccccctattctttgcatttctggtgtttcttaatgagggtgtttttgtattcctctgaatattattttgtgtttgtgaagtcactctgaaacattttgctccttttaggacttgcttttaacgtttattagggaggatcagagcagtatttagttcaggcccaaatatttccactgctgagataagatccttctgagtactccacgtcccagaaagttgaaactgctgaggacggttctggaccaggctccgactgagctgcaggcactgtttcctggtgtctgagctgtaggtactataccaggccccgactgagctgcaggcactgtttcctggtgactgagctgcaggtactgtaccaggccccgactgagctgcaggcactgtttcctggtgtctgagctgcaggtactgtaccaggctccaactgagctaaaagcactgtttcctggtgtctgagctgtaggccactatacccggccctgactgacctaaaggcactgtatgaggcccagctgagctgcaggcactgtttcctgtgatccttctggggattctttcccaggcccagggtgatttcttcacgcgtatcagtatatgagtggctggtctccggatctcagaggttctcgatgccagtctctttgggctctgatctccggatggttctgtttcctcaccttcccgtactgtggcagcaacttggggcagctgtagggctcaccttgtttcctgtctccagggtcttgaaagtcaccattaggcggtaagttcagtccagtccctggtactgcatcttggctgaaagcagaatctttggttttaataggaaaagtttatgtatccataggcatatggagccacctctggcagagccggagcgttgactgaagaaatagagcattatgtgtggtctgaaattaccacgctcccacctcccaatccagcatagattcacgaggactctgggtcctgttgagttaaacacctcccagcgcgcctgctctgctgggcgcaccccactctccccaggacgtgcactctcctcccccgtgcaggtcaaaaatggcttggagaagtttggtcagtgcttgtaagtggcatctccagggctctaggcctgcgtgttcatcaccaccaaagatgatagtttatcttttcctctgccctttttgccacaaaaatgtgacttcctcctcctgccctgtgtttggtttcaggccaacatagccgaggtagaggtctccatccctgccaagctgcacaactccctcattggcaccaagggccgtctgatccgctccatcatggaggagtgcggcggggtccacattcactttcccgtggaaggttcaggaagcgacaccgttgttatcaggggcccttcctcggatgtggagaaggccaagaagcagctcctgcatctggcggaggagaaggtgagcatggggagggagcgtgactcttggcaggaagcctggtcctcagtacagtgttctcgcttctcactgtggaaacccctgaatgcccttcctttgtggcgggtcagaaaacagctctataatgtactgtttatgcgtctttgtttttgctgttactggagggcctttccaggtccaaacgctcacatatgcaatatataaaagttggtctttggcttattagttttggggtgcttttgttttttaaatatgatttacagtaaaattggccattcttcaggtatagttgagttttaagtaacatgcagtcatgtgaccacaatcatcaaaattcattttccatcacccctaaagattgcccatggaattgctgttgtccttgtgtcaaaacccatctgtgggtatgtttccgggctcttctggtgacaccaggtttatgggaagtctggaaatcagtagtgtgagccctcttaactttggctgttctacaccccttgctgatcagcctgtcaatttgtaggaaaaaagcactttcacgttttgattgggattgtgtgaaatttgaagatgagactggcgaggattgacagctcagcagttttgacttttgcaggcatttctccattttttttaggtctgtgattctttattggtgttttataatttttagcacatttttatgttcgacttaacagatctaactactgttactcttttagtgctattgtaaatggcactttttttccatttccagttgttagcacatggaagtgcctgtggtttttgtatgttgaccttcacgaggctgctaaataaagctcatgtatattagcgccagtcactgttttgtggattttttttttttttttttttttttttttttttttgagacggagtcttgctctgtcgcccaggctggagtgtagtggcgcaatctcgcctcactgcaagctccgcctcctgggttcacgccattctcctgcctcagcctcccgagtagctgggaccacaggcgcccgacacctcacccagctaattttttgtatttttagtagagatggggtttcacagtgttagctaggatggtctcgatctcctgacctcgtgatccgcccgcctcggcctcccaaagtgctgggattacaggcgtgagccactgcgcccggcccactgttttgtggatccttattttatatgtcacaatcacgtggtctgtggacagttacatttctctctaatctggagccttgtatttcttgtcttttttgttgttgttattagattgatgtttttgtctttgtgtttaaccagccttgcgtttctggggtaatccctgcttggtttggtaggttgtctttggccatattgctagattgcatttgcctaattgattgcctaatgtttgactaatgctgctatttgtggatgtctttgaaaagtagcagagtctctaggtggtatttggtgaaacctgcacttaaaaggtagcaaagttgttatttaatatttttgtgctagcatgtttttctttggtatttttgcttgcgggccagatcttgggtccggagaaaggcaagagctccccgtgtggacctgagtcccgtggagcagcgcccttctcggggcccctgcgtgggtctgccagaagcactggtgtccacaagcagtgtccggggcctttccaggaccctcgttttcttactgccacacaagggcgtcgcactacacgaggcctctgaggaccggtctctaactgtagccttggttggcttgtgtccctctgagcttgagcttgagcctggggagtggctggttttgtggaggctgatctgtagcactcgtgggaagaaagggagcctggcccagatttgtgtgtgcttggtctggaagcaggtagaagagtgggagcatggtgcacacctcttgggcagcttgcttcctgctctgctgggcacaccccacgctccccaggacgtgcactccgccaacatatcgtccggcgcgttgctcccacctccccctgtgcagatcaaaaatggcttggagaagtttggtcagtgcttgtaagtggcaggaccagggttctaagcctgtgtgttcatcccaccagcatctggttgttgtggaagagaagtaggtgtgcagtctgggtattcatctgtttattcagtgaggtgtgctagccccattttgggggtattggtgcaacatcaggacactggtgacaatgtaaggggagcccgagcttgctgtcctacagaccctcttgtcttcctcactgtggtccaggcacgtggtgtcaggctaacacagtgggattggtttctgcagcaaaccaagagtttcactgttgacatccgcgccaagccagaataccacaaattcctcatcggcaaggggggcggcaaaattcgcaaggtgcgcgacagcactggagcacgtgtcatcttccctgcggctgaggacaaggaccaggacctgatcaccatcattggaaaggaggacgccgtccgagaggcacagaaggagctggaggccttgatccaaaacctggtagggagcgggcctcggcggccgactctgctggggccgtgatggggtggcttatcttccatctcttcttaacactgcaggataatgtggtggaagactccatgctggtggaccccaagcaccaccgccacttcgtcatccgcagaggccaggtcttgcgggagattgctgaagagtatggyggggtgatggtcagcttcccacgctctggcacacagagcgacaaagtcaccctcaagggcgccaaggactgtgtggaggcrgccaagaaacgcattcaggagatcattgaggacctggtaggcacttgggtgctcggggaggggttctcaccccccagtggccactcaccgaagccgtgtatgagtgttcgctccaccctgtagggaggtgactccctcatacagccctggaaggcttcagaaggggctttctggtgctcgctcttctttcctcagcctgtctggcctccttcctgatagttggtgagaattctgcctgcgagaagcacttaaaaaaaaaaagagagagagaaggagaagaggagaggggagagagagagaggaaagaaagcaagagaaagaaagaaaatgcattctgtataagggatcaggaaaaatgaaaatgcagtctaaggggtcagctctcttctcccctctgtgaaggaaagaaaatcgatttgagggcatccacgtgaatccatgggaagtcatgagaagacgtggtctttagaagcagtctttagagagtgtcccctccaggccactcccctgccagggccttggattccctttccctaataatcaagtctgatgcctcctcatggagtcagaggctaccccaggaggtcccactcctttggctgaattggccaccctccagggatggcacctggccttctgggacacatttcagaggaggcccacccccttagacctgtcctgctacctccctcctccctgcgcctggagccctggactcgggagaaggggagcatctgtgccaagtggctgtagaggacagggaggaaggtggtgtgaagagtgctgtaaaacttgccctaaggaatttaatctttgctcttttcttttttctttgtgtacctccctccaggaagctcaggtgacattagaatgtgctataccccagaaattccatcgatctgtcatgggccccaaaggttccagaatccagcagattactcgggatttcagtgttcaaattaaattcccagacagagaggagaacgcaggtgggtcccccattagccctgctctgcttgttaatagtggcgcctcccatgtgagaggcggggctgtcgcacatactggtgaggctctttcctgtctctgctggaaaaccatctatgtattctgggggcttccagaggttcagggtcactccctggcctttaaaagatggaccacgtcagttactgacagagtgaccaggtgaccttcataggtcctagagacacacaaggtagccagtcccaaggcgatgaggagcgtgcagcctcatcctcgggtgtcccgagttcagtcccagtgattctcatgacatcgtttggatcgcatgagccccgtcgtagagcttcctcctccacatctcccatcactgtggggtgtcccctgtgaggcaggcagctgcagcctctggctggccagagggcaccatccaagtggccggcagttctaggagggcattcagttccccgtaccatgcttgcccccagctctgctcatgcacctggtggtggggaggcgacctgtgggatgcgggtcggttgcctctctctcacttgctctgcatttgtgaaacaaaaggtatgccctccactctgtgttatcagatgcccgccctccactctgtgttatcagtcttggttgagctgtttgggcggcaggtggccctgcagcctgctgagtgcacatagtgtcatctctctgggcatccaggaagcatgtcacacacagccattcaagcccctttgttttcctgagaatacagggtgttttgagtaggaaactaataaactcatactgcactcygtctatgttttacacttcagtggttatttaaaactttgattttgatagaatttcacagaatagtataaagacacatcctgtggcaccagtttcttttctcaacttctccccttttacacacgttttttttctgaatgtcatttttagacatgtccctttattcatggtgggtattttcttagaacaaggacattctcttacataattctagcacatttatcggaatcggatttaacattatataacagtagtatctaatatgttgtcggtattcaaatttgccagtttttctccttcagaaacacctacttccccatcctaggatcacccttgatttcaggcaggcgtctgtctggtctcctgctcatttatttacatcacacacctcctgggttctgtcttagtgataattattgttgtgtctgttttgtgacacttattgttgtggtgtctattttggtacacacgcggtgtcccagtgtggcctgtaggagcccctccagctgtcttctgtgtcctgttcacacgcctcttcacttctggggctctcgctttctgrcataaggagctggcacaggtttaccttggccttgccctttctgtctcccctagacctctcaccccccttcccactgcctctcctgggtggggctgcgtgctggccgccttccctgatgagccctgcctcacagtcaagcctcacttgtgcagtgggtctgccctgtgttcctcccatgaactaactcatctgatctcactgaagcctctgctgtagttagttgctgttagcttcatcttcaaggtgaagaagggagacacagagctcacggcctcccggcaaagccttcattgccgccccccccccccccaaggtctgggagccctctttgaggctgctgtggggacgtcctatctgctctccctgaccagaccaagacctcctgaaggacaggagtggttttccctcccttttaccacccagcacccagcaggtgcctcacagacatatgcattctgaacaaggtgtggggtctcttccagcagctgtcagctgtcccttttcccctttctctstagttcacagtacagagccagttgtccaggagaatggggacgaagctggggaggggagagaggctaaagattgtgaccccggctctccaaggaggtgtgacatcatcatcatctctggccggaaagaaaagtgtgaggctgccaaggaagctctggaggtatgtgtccrtgtgcccccctccaccccccgccaaggcccagtcagcaggcacctggggagacgcgtggcctggatkggatggacggttgcccaagcggcagtggcagtggaggtagccctcttgctcctaccgtgtgcgcacgggctgtgcttctcggctggacacagagtttggggaggccacttcccttcaccaaggctcggggttctatagcccctttctgggacagctgcatgggatccggcctctcaggcccacggtgggtgcgggggctgtggaagggtctcagctgcagggggatgaatgtgacctccagttgcaacgtctccccccgcgtgagtggggttatcaggcctagctcaccttgtgtgcagtcagtgtcgagtgccacctgcgtactggatgctgctctcagtgctgcggtgccacagcacacaaaaatagttctcacgttgccgtggagagacaagcagtcaacgcagatatatcctgtggcaagtgatggtaaatgctgtggcaagaaagcaggttctggaggtgaagggcggtgggggagacagggcagggaaggtgagcagcggtctgagagtcccttgtggcacctcgtgggcattagccaaagccgtcctgatcccaagggacagggcagggaaggtgagtagtggtccgagagtcccttgtggcacctcatgggcatcggtcaaagccgtcatgaccccraggatgtgccaggagtcagggcctctcctcctacgtgggcctgaaggggctgctgtaattcaggagggtaggcttgggatgaagggtctggaatttctgtctgccagcattagcctaatgcaaatcttttcctattcttttctattgagttaaaggtcctggtggcattgtcgggtggggcacattgctgttgtcatagggctgtttgccttgtgtttcgtggagccccattgctgagcttacaacgtcactctgctctcagctcccacggcctaaccatgaccatcctccctgcaggcattggttcctgtcaccattgaagtagaggtgccctttgaccttcaccgttacrttattgggcagaaaggaagtgggatccgcaagatgatggatgagtttgaggtagacccctttcccgggaggccatgtcacaggagtggcctgtcrcatcctctcccgagtgccagtgtcctttctcaacttcctgttgactctgcctcctcctgctcggactgggcactgacttcccttcacggcgggtggccttccctctcaccacttctgggtcccagggccaatggactctttcctgttctctggggtcctgaacgtcaagtcagccccctcttcacgtaggtgaacatacatgtcccggcacctgagctgcagtctgacatcatcgccatcacgggcctcgctgcaaatttggaccgggccaaggctggactgctggagcgtgtgaaggagctacaggccgagcaggaggaccgggtgagcaggaggtggccggggcactgcccagagccatggtgctcagctttgggcacatgtcagaatctagggaagttcttcaggatcccagcatcccagcgacatctggctggaggtgagatgcaggcagtgccaggacgcagtcagcatccaggggtcttgctgtggaactagccaagagcatggcacctttctctttttcataaaaaagtgacaaagttggacttccgtgtaaatttgcagtttctctcaaaaccaaatcagagtggtacctcagacctacaagaaaggtcaaggttgcgagaggcccccaagcatgtgctatgcagtgaggacgagcatcggggacccccactaacctctagcacagggtggtcaaagggcgaatgacttcctggtaagcagggatgaaacccccccaacctctggcaaggctgacgtttgaaggattgtatgagcggagcgctgcagacgcccagcctctggcagggctgacatttggaggattgtgtgagcagagtgctgcagacaggagcaggggttctggaacttggagcagactgtgctggggtgctggtttgctaagggggttggctttccactcctcccgtgagcacgtygagtctggtgaatggggtggagctcgtgaacctcacatggtgtcagtgtacccctgcgtggactctgggttgtctcctgcagccaggtcatacctgtagcctttggccatgggtgttcaggggctgtggctgccccctcttcttggtctgcatctgccccagtcctaaaaagatccagagcatttctgtgcgtatccatcagatccctgtttgacaaatgaggagagcggggccccaagctcgtgactcactgcctagctctgtcagttcctgagcacgatcctcgcaagtggtcccaagccctcttttgaaggatttatagacctccttgtggagcagccaagttccctggttctcattattagcagataatggaaggtggcagaggtcggaccagagagatggcggaccattccggaccacgggttacagaacactgcagcatctccagtgtcctatgaccagggtggaaggggaatggagtcacagggtggatcagctcaatctttgcctcattcttgctcctttcatttgtaggctttaaggagttttaagctgagtgtcactgtagaccccaaataccatcccaagattatcgggagaaagggggcagtaattacccaaatccggttggagcatgacgtgaacatccagtttcctgataaggaygatgggaaccaggtgagagcctcggttggagcgtgtcgggggcagaggtgcttgttgacctttcctgtgacttgggagcagtaaccagatgtgcctagatgggggttcgagggccaagttgagagtggcaagtctctcaggacctaattctggcttgaggtttgggctgtgtctcggtacttgccagatgggtgaggtctctggcactatgtatcatctggggcctggagcattttctcctgcgtctccttccagaaaatgagcaggagctccagctgggtccttgatcagtggcgcctccaggtgtagctcattcacctgtcacccgggcctctctgaggctcccaagggctctcattcacctgtcacctgggcctcttggggtcaggtggacatttctctgcagccccagctgcaaacaccgttgtgcttgccagatggtccttagtaaactcttgttgttacttcctccaaattgcagtgccacccccctgccactggccctcatggcctcctgcttcactcagaacaaaatgaaaggcagccccatcccctctctgggccctgccacctggcatgcagggcagcctcacccaacaccccctcttgcacacacttcccaggcttggtctttcctggctctggcatcctgctggggtgtctgcttcctaggcgtgtccagcacagctttgcccacagtgggagactagcaagccttggtggccacagttgtgctggtttccagaaacagcaraccccctggcagcagagcccctccacgcccctcgctcccactgtggatgtgccgcccagggttttccgctgcttccccttccccttccccttcttcctccccagcttcttgttcccttttggatctttgagtcacacacacaccagccaggccaggagggccctcctgcaccctgcctcctccagctcccacgtcctcttccctccccacatacattttttaatttttagtcttgatcttgagagtttagttcttttttttgagagagatagtctttgtcttgttgccccaggtggagtgcagtggcgcgatctcggctcactgtaacctctgcctcccgggttgaagtgattctcgtgcctcaacctcccaagtagctgggactacagctgtgagccaccgctcccagcccaagagtttagctcttttaagcccctcacccttattgccttttatttccctctactattctatataattatcaatcttaaaagtcattataggtgagtcaccagtggctcacgcctgtaatcccaacacttttggaggccgaggcgggtggatcccctgaggtcaggagttcaaggccaacctgaccaacatggcgaaagcctgtctctactaaaaatatgaaaattagccaggcgtggtcgcgtgcacctgtaatcccagctactcgggagactgagacgtgagaatcgcttgaacgcaggaggcggaggctgcagtgagctgagatcatgccattgcactccagcctgggcgacagagtgagactctgtctttaaaaaaaaaaaaaaaaagtcattgtttagcaattagactattccatctaatacaccatgagccaagtggggtggagcagtcatttcttcacaggcagctttttcctgtgagctgtgcttccgatcttgaggttctgtacctggcagcacgcgggtggtgcctgaggctgtcagctctgctgggccacggtgggtggggctgctgcctcccactctggcattttgcttcaatctggacagaagcttcttgggctgctgctctgttgtctctaggttaggtctttctgctcatttcctttccaggcatttgtccctgtcctctagtcctgttgcgtgatgatggttccgtgttgtgatttgtccctgtcctctagtcctgttgcgtgatggttgtgatttgtccccgtcctctagtcctgttgcatggtggtttttgtgttgtggacatgttgttttcgccgattgtgggctacaggtgttttgttaccacgtttccttctctatgccctgaactgtctgcttggtctgcttgtctgctatcccaagtctggtatggtgtctcctgtccatttgtgtggcccaaggaaggcctgagcaggtgggatctctgagtgagggaggggctcgctgaggaatgccagccagcctccagcctccagcacaaagatgcctccagactgtggcccacgtgggcaaagaagcaggaagctgaggggcttggggctttgtctttgccccgctgtccttgagtccagaattcttgcctgttagtgtctctcctttgtctttgaggacaaatgtcctttttcgttctgtaattcactgtcttttgggtagagtttgggaagagatggaagctgagtggacataggttttttgtggggtgttttttttttgtttttttttttttgagatggagttttgctctgttgcccaggctggagtgcagtggcgcaatctcggctcacagcaacctccgcctcccgggttcaagcaattctcgtgcctcagccccgggagtagctgggattacaggcgtgcaccaccacgcccggctaatattgtatttttagtagaggcggggtttctccatgttggtcaggctggtcacgaattccggacctcaggtgatccgcctgcctcggcctcccaaagtgctgggattacaggcgtgagccaccgtgcccggccctgagtggacattgttaacctcttgttttaaatcagccgtgacgttgctttccatcttctctcctgagctgttttcctcagcagtgggggccggctcttgcccctgacgggaatcccagtaaggcatccccttttctgactacattctccttttttagccccaggaccaaattaccatcacagggtacgaaaagaacacagaagctgccagggatgctatactgagaattgtgggtgaacttgagcagatggtttctgaggacgtcccgctggaccaccgcgttcacgcccgcatcattggtgcccgcggcaaagccattcgcaaaatcatggacgaattcaaggtgagccggctggaagcacagtgggtgagaatcctctctcaccgggggcacctggctggccagaagaaagagcagggcatggccttcccctcaagatgatgaggccacaaccccagggctggcagtggaactgtcctcatggacaccacgggtcagtgcaggcgacggcctgtgtgaggctgcactgccacggtggccattaggagggcatctccttgacagctgcctggcgagctcgtcctctgtgggtgggaatttcatgcaagagcgcacagtacgtgctgcggccctctgtctgctgggaacaaggtgctcctgagatacacctaacttggtgtggtgatgaggctgactgacttcagaacaactctgaaaccagattttaaaacgtttgctaactcagaaaatgcttcactagaaattgacacataattttaacccttttcctcgcttggagtcccctcatctgacgttgtacaccccttccaggtggacattcgcttcccacagagcggagccccagaccccaactgcgtcactgtgacggggctcccagagaatgtggaggaagccatcgaccacatcctcaatctggaggaggaatacgtgagtctctgtgggccttggagccctgaggcgccctggcacgtccaccggcctgaggcccagccaggagcttcaggggacaaggtggcacttgtgtttccagaggcaggcgaggtgcaggggtgagcaggcgggcgggatgctgggggtgctgggcagactgaccctgtcttcctgtcttctgcctgcagctagctgacgtggtggacagtgaggcgctgcaggtatacatgaaacccccagcacacgaagaggccaaggcaccttccagaggctttgtggtgcgggacgcaccctggaccgccagcagcagtgagaaggtcagatgcgggcttctgccctcctgggtcccagggagggtgggcgggcaggcgggcttggtgtcctgagggtggcaactgcgtcggaagctgcttgcgagttggggagcatcccctcctgaagccgtgtcctctctctgcacaggctcctgacatgagcagctctgaggaatttcccagctttggggctcaggtggctcccaagaccctcccttkgggccccaaacgataatgatcaaaaagaacagaaccctctccagcctgctgrcccraacccaacyacacaatggtttgtctcaatctgacccagyggctggaccctccgtaaattgttgacgctcttcccccttcccgaggtcccgcagggagcctagcgcctggctgtgtgtgcggccgctcctccaggcctggccgtgcccgctcaggacctgctccactgtttaacactaaaccaaggtcatgagcattcgtgctaagataacagactccagctcctggtccacccggcatgtcagtcagcactctggccttcatcacgagagctccgcagccgtggctaggattccacttcctgtgtcatgacctcaggaaataaacgtccttgactttataaaagccaaacgtttgccctcttcctttcccacctccctcctgccagtttcccttggtccagacagtcctgtttgtggagtgcaatcagcctcctccagctgccagagcgcctcagcacaggtgtcagggtgcaaggaagacctggcaatggacagcaggaggcaggttcctggagctggggggtgacctgagaggcagagggtgacgggttctcaggcagtcctgattttacctgccgtggggtctgaaagcaccaagggtccctgcccctacctccactgccagaccctcagcctgaggtctggtgagtggagcctggaggcaaggtggtaggcaccatctgggtcccctgtggccgtcacagtgtctgctgtgattgagatgcgcacaggttgggggaggtagggccttacgcttgtcctcagtgggggcagtttgccttagatgacagctgggctcttcttcacaccacctgcagcccctccctgcccctgccctagctgctgtgtgttcagttgccttctttctacctcagccggcgtggagtggtctctgtgcagttagtgccaccccacacacccgtctcttgattgagatgtttctggtggttatgggtttcccgtggagctgggggtgggcgccgtgtacctaagctggaggctggcgctctccctcagcacaggtgggtcagtggccagcaggcccatctggagtgggagtgggcacttccaccccgcccacaggccatccggctgtgcaggccagcccctaggagcaggtcccgggtgactggcagttttcayggtctagggccgagacgatggcatggggcctagagcatgaggtagagcagaatgcagaccacgccgctggatgccgagagaccctgctctccgagggaggcatctgtgtcatgctgtgagggctgaggacggggccctagtctctggttttctggtcttaacatccttatctgtgtccgccacggaggtgactgagctgctagygagttgtcctgtcccaggtacttgagttttggaaaagctgactcacgcccatccatctcacagcccttccctggggacagtcgcttccgccttgacacctcactctcagttgaataactcaagcttggtcatcttcagackcgaattcttgagtagacccagacggcttagcccaagtctagttgcagctgcctcggcaagtccccatttgctcaggcagccctgaatgggcctgtttacaggaatggtaaattgggattggaaggaatatagcttccagcttcataggctrgggtgaccacggcttaggaaacagggaaagaaagcaaggcccttttcctgcctttcccgggatctgtctactccacctccacgggggaggccagtggggaagggctgtcacctcttccccatctgcatgagttctggaactctgtcctgttggctgcttgcttccagctccccscaatctccatcgcagcrggttcctcctgtcttttctacagtgtcataaaacatcctgcccctaccctctcccaaaggtcaattttaattctcaccaagttttgcacatctctgtatgtcgcttgatgtcttagacgcgagccctttcctaaactgttcagcgctctcttttcctttgggtggttgttgcaagggtgatgacatgactgtccccaggcctgtctccctgaagcgtctgtgctgtcaggacagccctgggcagagatgaggcaggggtgaggcgtgcgtgtgcttttcctccttgttggatgtcttccatatcatctgtttccatagctacaatccatcccttggccttaactttggaatttggagattatatgcaaacatgtgtaaaggctcatgaatatggatgacactggaattttataaattctaaaataaaacccgaaaccagatgtagcatgctgggactcattttgtcacgctgccgcctgtgtgttctctttctcgtcaccctggagtggtgactggcatctgtgggtagttcgtctttggtgtgattttctcagcagttctcaacactgtgttcaacrgcccctcgggagccacaytgagggagacccaggtgtggtcatggcaagagggtggctgcctgtccctgtcctctggctgccagacagtcagcagttgccctgcagccctcattgagggtggacaaccgtccttgtggagcagcacctgccactcccttttaggactctgccagcctcagtggcattcctggcaccctggacccggcctgtgagttatgacgagctgagttgggtggtggggggtgcgggcggaggcctcggctggaggaggaggagggaggggcgttgagtgggaggagccaccccagtcacctgagtggcaggagataacgggaagagtcaagagggaataggtgttcctgctgctgactgggctggtccccacctgggaagacgggtatggcagttcctcttaaagccaaacatgttggccgggtacggtggctcacgcctgtaatcccagcactttgggaagccgaggtgggcggatcacgaggtcaggagatcaagaccatcctggctaacacggtgaaaccccgtctctattaaaaatgcaaaaaattagctgggtgtggtggcgggcgcctgtagtcccagctactcgggaggctgaggcaggagaatggcgtgaacccgggaggcagagcttgcagtgagccgagatcgtaccactgcactccagcctgggtgacagagcgagactccatctcaaaaaaaaaaaaatgccgaacatgtttatccctgacccagcagttctgttgggccctaaatatgcaacccacagtaaagcacacaactgcaaaatgaccctaagccaaacacgaagcagcccagcagccaggaggggctgagatggatgctcggcatggatggagctcgcgcaatgtcccacggcagacgccaaatgcaaagtccccagttccatctctgcttggtggctaaggtggtggctactctggatgggaaagggtcacaggcagggtagggcgcatgtgggcatcagggccctggatgggagagggtcacagggtagggcgcacgtgggcatcggggagcttccacgtcgggtgatgtggaacttgccttttacccacgtgctggttacaacagtttgttcacctggaagcctgtatgaactgagcattttcgtacgtttcaataaattcaccttaaaactttggagtttaagacagcaacaataaaaagcaaccagctggaaggaagtacacgtgggtttgtagtaagcattgtgctgagcgaaagcacacgtggaatggctgagctccccatctgtgtaaagtttccaaggttcccgccccgggccgtgtgtgctgtccgccatgctccggccggtggtgtccagccccagggcgctgtgagcctgcatccctgccggaagagcccttccatggaggcagggcacagtgctcctaagaggcaggtgaacaagtagcaaatcctcaagaaatgctacaagcaagcacgccgccctcaggccaggcatcacggtgggtgaaatagaacgcaggcgaggatgttcagaaagaggccttttctgtggagtaagtttggcagtactcatcaaagcacattaaaaccacatattctttttgtgtgtgtgtgttcccgagacggagtcttgctctgtcgcccaggctgtagtgcagtgttgagatctcagctcactacaacctccgcctcccgggttcaaacgattctcctgcctcagcctcccaaatagctgggattacagatgcccgccaccacacccagaataatttttgcatttttagtaaagacagggtttcaccatgttggacaggctagtcccgaactcctgaccttgtaatcctcctgcctcagcctcccaaagtcctgggattacaggtgtgagccaccacgctcagctaaaaaccacatattctttttgacacttaagttccacttgtagaactccaaggacatcaatacagatgagcacagatccattttttagcaagcagacggccacactgggattgctgcggggtagcaagttagccaggggaagcttcatgtggctccccagcacagggcagaactgcacgtcacattatgatccagcgtggaaaacaattatgtatgaacacaaacttctgggggaagagccaccagatgttacaggtatacacgtttcctcctctcatcccaaaacctcccccatttgggtgcttgctgggtactaggccccaaggaacagaggtaaaaacagcaagaggggccctgggccaggggccaggagctgggagagggagggaagttgggcaaggatcaaaaggacacatgtaattgctgcagaatgcaagtaaagcggcactgtcagaggctgcctgtagtggctagggggaaagcagagcctgattcaagaaacagaagaatccagaggacccagataactgggaatggagggaggggttcaacagacctttgctgtggcctgggacacagagctgcagggtccgagagctggggcatgtgggtgatgtccctgcgcaaacagggcaggaaggggcgggtgggtccagaggacacgagggagaacggccctgcgctctgaaacattcgaaggtcaccaggtgtaagaggagagggcgatgtggccaggggcggcgaggaccacaaagcccacctgcctgaggagaactgtcgtgtccaggggcctggggaggccaccgagggacagggtcccttgggtgcaggggccccttgggcttatgtctgggagcaggaaacaaagagggccttgtgagctgacggtccctccctgccggggatggagtgacaggcgctctgaggagagaagccggcgctggggggaagcaggcaatgtgcccagagatgaggcacaacagcagccagcggttcacacagccgctgcctgagggaagaggaaaaggacgctgctcgcagggctcaggaggggccactcccctaaggaccaccagatgtccttccaggcgtcactgctgcagctggctggccttgggaacygtgaagggtgtccagtgggagctgagctggggagagggttgggggcagggacaagtcagactagggccaggagcaggccatggccacgaggcacagtgggcggctgggcagggccctgtgacctcagggagtgcacggggcaggggcctggctgctcccagacttgcctctgagccctcgggctgctcatcctttgttccgttcgttccaaaaagaacctgtccccaaaaaagggcagcaagaggaagagggatgtgactcagtgtccggaggtagagcagccactgacaaggatagggagagggctggggggagggccgagactgggctgtacagttcacctcattctcagccagtgcctgcttagccaggtagtactcccgcttcactttgatctccacagactctgggatgtcaggcaccaggaggtccaggaggcggccaacggagaaaaccacatgctgggagcagaggaaggcactcacgcccacccaaacgcccagagtggccttcacagggccaggcaggccggggctccggcacctgctcccagctgtgggtggagtcagaaagcagctgtgcaggaaaaggaaccccagaaggggcagaggccaccccagctttcgtggccctggggctcctgtggagacacccacaatgtccacaccacaacccagggatgaggccaggcagggaaaacgcaggtgcagagaagagctctgayttgaccaagatgacacagcaggaagtgacggcaccgacccctcaccacgtgctcgaattaggcaaagcacagggtcggggcctcatgccatggatgggagaaccagcaggtgcctcggctacctcaaacacaatgacgaaggccaggcggatggcaagaagattccagtaggtctgggaataatgtccatcgtcatcccggaaagcccgatacctgcagcagacacaggactcagtgcgcgcagccagggctgagtgttggctgggcaggtgcctctggaattagcctatctcccctttttccaccatttcgctctctcatcccatgttcctggcctggctcttcatcgagggtgcctgaaatgggaattcttcccaaacaggatactctgacaatacctttaactggtgggttccaaaggtggatgtgctgggttgtcccccattgggctaaactggaccctccccaccccccaggtggcagatgctttattttctagtagatgtgacagtccagtacgtctgtgcttctacggatgacttcagtctacttacacggtgaaaatccgccgattgctgacctctgtgagatcagcagttcacctgctcagagactgtccctgtccagcagagccctccctccctatcataagctacattcagcttcacttgctatttcagactttgacatcttcctgtgtctctgtcccatggtaaagatgtgacattccattttctaatataaagttacatgttgcactccatgaaaactattaccagggtcaactttgtaggaaaataaaaaaaacaaaaaaccaaatattgcaagttaaaaatatagccattggaaaaaaaatccctcaaatgaatggaataaacttttaagtggccagacacagcagaagagagactggggactgggagacagtgacgacgagaccaccctgcggcaacacagagagcacacttggggggaagcaggccacagcccagtgggagttccagacgacaatggacaagcagagaagcactgctggaaggagtaagatggagacatttccagaactaaacaaagacgtaactctttcagccgggcgcggtggctcatgcctgtaatcccagcactttatttatttatttatttatttatttatttatttatgagacagagtctcgctctgttgcccaggctggagtgcagtggcgtgatcttcgcttactgcaacctccgcctcctgggttcaagcgattctcctgcctcagccttcctgagtagctgggactacaggcccgtgccacaatgcccagctaattttttgtatttttagtcaagacggggtttnnnnnnnnnnnnnnnnnnnnnnnnnnnnnnnnnnnnnnnnnnnnnnnnnnnnnnnnnnnnnnnnnnnnnnnnnnnnnnnnnnnnnnnnnnnnnnnnnnnnnnnnnnnnnnnnnnnnnnnnnnnnnnnnnnnnnnnnnnnnnnnnnnnnnnnnnnnnnnnnnnnnnnnnnnnnnnnnnnnnnnnnnnnnnnnnnnnnnnnnnnnnnnnnnnnnnnnnnnnnnnnnnnnnnnnnnnnnnnnnnnnnnnnnnnnnnnnnnnnnnnnnnnnnnnnnnnnnnnnnnnnnnnnnnnnnnnnnnnnnnnnnnnnnnnnnnnnnnnnnnnnnnnnnnnnnnnnnnnnnnnnnnnnnnnnnnnnnnnnnnnnnnnnnnnnnnnnnnnnnnnnnnnnnnnnnnnnnnnnnnnnnnnnnnnnnnnnnnnnnnnnnnnnnnnnnnnnnnnnnnnnnnnnnnnnnnnnnnnnnnnnnnnnnnnnnnnnnnnnnnnnnnnnnnnnnnnnnnnnnnnnnnnnnnnnnnnnnnnnnnnnnnnnnnnnnnnnnnnnnnnnnnnnnnnnnnnnnnnnnnnnnnnnnnnnnnnnnnnnnnnnnnnnnnnnnnnnnnnnnnnnnnnnnnnnnnnnnnnnnnnnnnnnnnnnnnnnnnnnnnnnnnnnnnnnnnnnnnnnnnnnnnnnnnnnnnnnnnnnnnnnnnnnnnnnnnnnnnnnnnnnnnnnnnnnnnnnnnnnnnnnnnnnnnnnnnnnnnnnnnnnnnnnnnnnnnnnnnnnnnnnnnnnnnnnnnnnnnnnnnnnnnnnnnnnnnnnnnnnnnnnnnnnnnnnnnnnnnnnnnnnnnnnnnnnnnnnnnnnnnnnnnnnnnnnnnnnnnnnnnnnnnnnnnnnnnnnnnnnnnnnnnnnnnnnnnnnnnnnnnnnnnnnnnnnncgtctcattctgttgcccaggctcccccccagtggcgccatctcggctcactgcaacctccgcctcccgagttgaaatgatcctcctgccccagcctccagagcagctgagattacaggcgtgaactgccacagccaggttttgtttgttgttcttgtttttctgagacggagccttgctctgttgcccaggctggagtgcagtggcacaatctcggctcactgaaagctctgcctcctggattcacgccattctcccgcctcagcctcccgagta

SEQ ID NO: 5690 - DNA, 31657 bp, Homo sapiens
ccacgggcagtgaaaactctctcacacaccaatcaaatgacacagactccagtcatgaccctcaagaggagaaagcagtgagtgggaaaggtaatcgaactgtgggttcccgccacgttcagaatggcttggactcaagtgtaaatgtacagggttcagttttgtaatattttttcagcaaatttttatacagtgtcatttaatttgggagaggatactgtccagaaaattaatgcatacttttgtcacaatttgcctttttgtgggtgtacgttttggtttttttttgttgttttttttctttgttttttttttcttttctttttttttttttttttttttttttgcttcaatacttctgccgctttggaaattgtaacagttaattactttgaatgttgctaaaaggacattttgtgtagggtcaagttatttttatatgagttaatgtgaaattgtaaatggaaatttttccttaaaatacaacacaatgatgtctgtataaatctgtctgtttagaatctgtgctgtgtaagggcattcgtactcatgctgttactgtacttatgcaccattcagacttgttagagtagatgtgggtttatgactgccaagtttgcccagtacagtagttttttatcactaaaagttggactcattgatggagtcctgtagtagtttcagtgttagatacagttttttccaccatacatctgtgcattttctctttaggtgactgtttaagaaatttgtgtgcatagttactcagtttttatgaactgttgtatcctgttaatgcatattgctctgtgactccagtatatcttacctgtactgaccaaacctaaataaagatttttattgtaactccttaattagcttttttgttttgttttgggtgtatgtttagcatttgtcattttcattgagtcattgaatttctactcattatccttcaagtaccacaacagtcaaacttaagaccaagcatcgattacgattttgcacacaatttttaatttatgccttattttgcaaaacggagctggagtttagggctacacttaaaattttttcttgacttataattgttacaaaatattttaaaatacagaaaagtataaagaaaatagtcatctatttcttaggctttttttttttttttttttttttaattgagacagggtcttgctttgtcacttaggctcaagtgcagtggtgcagtcatggctcactgcagcctcaaagtcctcgactcaagtgatcctcccacttcaggcttccgagtacctgagactataggcatatactaccacacccagctacatttattttaattttagtagagacaaggcctcgctatgttgcacaggctggcctcaaactcctggccccaagggatccttctgccttggcttcccaacgtgttgggattgcaggagtgagctacagctcctggccctttttgagttttaattgaaaagcagcgttggttttttgtgacctgatttcaagtagagtatctttgtagtcagtgatgtttgttttaaaacgctggccagcactactgatttttactaacaacatatctggtaatattatatgagtaaggggtgttagaatgtaggtaggagaaaatgtttttaaggtggaagaatgtcaaaatttgctccattttctcagaggtaattaagtataaaagtatgatattgaatggccttcaaatgtgtagctttcatatatggttgaaatgaaattccatttctgttaaaagcaaagtattgttttagacataacttgtaatacaatcaaggaaccttgggagtggagttataatactcgaaaactgaggtacaacttatttgaaagtaattgctgcttttgcttgtttagctgatacaggtatatccggtcttcagcagtatgttaaatactgcactgtctcttgattaaccttttcttttttttctttttctcttttttttttttgccgagagtctcgctctgccacccaggctggagtgcagtggcaccatcgtggctcactgcaacctccacctcccggattcaagtaattctcctgcctcagactcctgagtagctgggattacaggcgtgcgccaccatgcccggcttatttttgtatttttagaagagatgaggtttcactgtgttggccaggctggtctcgaactcctgaccttgtgatccacccacctcggcctcccaaagtgctgggattacaggtgtgagccaccgcgcccaaccttgattaaccttttctacagtctgctcaagtgagtaaaaaatcctatacgatttttaatttgcatgtgattaaacattttggtgtttgatatatcagatactgtgtttggcttttgttatgtacatccttcaacttgaccaatttaaacaaaaatgtaatttctctgtcctgttggtgtaatgtaatcaagagtttgtgataggaaattaatttttcaaccagtgatacaattttatgactgaatttaatatggacctgttaatgtgacattttcatgtttctgttgagtctgccttgatgaataactcagagcacttattctgtggtacacagagtcagtatttctcatttctggaattggatgctttattttctggtatgcctgtgataagagaggtgatagagtggcttctgcatctaattggtttgaatcctggtattacacttaactgatttgggcaaatgtatcctcgaggctcgatattttgttttgtttttctcccctgtaagagcactcactgctgtcttagcttgggctgctgtgaaaaaaaaaaaaaaccacagactgggtggctttacacgcgcattcctcactgtttttggaggctgggaagtctaaagatcacagtgccccctgattggtgccccagtttggttcctggtagtcctcatacagagagcgcaatagatgtcagtttccttggctcctcaggtgtattggatacaactgactactccagtttttgagacacttttgcaaaacaatgtaaagccattccttctgacaactttctttctcagatgttccctctttcatgagtagttatgccctgtactcaaatcattgcctgctgctctacgtcactgtcttgggagttcacctatccctgtggttatagtgaacactttcataatcccaggtaatgtcattaactgatctggacccatcatggggtggctgtgctgagggagtgttgagctagcccctagtggtaaggagtacactgctgaccttcatcctatggcaattccactttggtgattcactgttcccctcatggagaccaaggaggaatttgctgcatggtaggttggtgaatccagcctgtagcaaagacctggcttggactcctgcaactctttatgaaacttaaccaagaatgattgcatcttccagcgggggaagatgctgagaaggccccttcaggataaactggctccatagcactgctgtaatgatggctcctcatgagtaagcacttggagatttttgtggcttcctgcccactcaccctgctcaccagtccaggtagtttatgatttgagatctagatgtaattttattttatttctttttttttttttgagatggagtttcgctcttgttgcccaggctggagtacaatggtgcaatctcggcccaccacaacctccgcctcccaggttcaagcaattctcctgcctcagcctccctagtagctgggatttacaggcatgtggcaccacgcccagctaattttgtatttttagtagagacagagtttctgcatgttggtcaggcaggtcttgaactcccgacctcaggtgatctgcccgcctcggcctcccaaagtgctgggattacaggcatgagccaccgcggccggccaagacataattttaaaaattatcttccagctggccgggcgcggtggctcacgcctgtaatcccagcactttgggaggccgaggtgggcggatcacaaggtcaggagttcgagatcagcctgactaacatggtgaaaccccgtctttactaaaaatataaaaattagctgggcatgatggcacgggcctgtaatcccagctactcaggactctgaggcagaagaatcgcttgaacccgggaggtggaggttgtggtgagccgagatagcgccactgcactccagcctgggtgacagagcgagctccgtctcaaaaaaaaaaaaaaaattcctcttctttccttcattcattattcttagtctctgtctgtctcatatgagtagataatcatatgagtagctataatgaggactcctcaggggacagattctgtttggccactcagcagaagcatgcaattaccttctcaagattggctcctaaacttactctagatagagccttcaggcaggaaactctatatcccttggctccagaagaatatattcatactcattcaaatgtgctaggcactggccataaagaatattggtgttcattcataactgcctataatgtgctaggagctgtgcataaagcagtgtaacaggatcatcttggaaagcttatgtagtcagtagaggagacagataaactaggaattacatggtaagttgaaagaggaagttaggggtaagatgctgcaccaaatgcaggagattggaaggtttttctggaagaagtgatgtttagggggagtttcagaggtaaatttctggtttggttaacagaagatagtttcactgctcactgagattacagaagaaacaggctggaagagtttggtttcaatatgtcaaatttgatgtgcttataggaaattttatttatttgagacagtttctctctgtcgctcaggctggagtgcagtggtgtgatctcggctcactgaaacctctgcctcctaggttcaagcgattttcccatgtcagcctccccagtagctgggattacaggcgcacggcaccacgcccggctaatttttctattttatggtagaaacgggatatcaccatgttggccaggctggtgtcaaactgctgacctcaaatgatccgccctcctcggcctcccaaagtgctgggattacaggtgtgagccaaggtgcccgacctgatgtgcttgtaagaatttaaatgaagagggtcagtcagcttaggagacgaggttagatgtaaggatttcagacttgtcagtatacaggtggtgattgatgccgtaggaatgactggtattacccagggagctggtgcaaagtaggagccttggggaacatgttaaggggatgtgagagtaagcccacaaagactcagaagtggccagggagtaaggggaaaatgggatagaatagagcaaaagccacgggaggcattccttgaattccttggactcagatatgttaggggacaggaaacacattgaagacaactgaagagacttcagtgtgctgctgagttcttagcagagtagacagctgatttcaccactattccagaccctaaagatttctcctgaaattgcactgttatgcaatttttttccttctctattgccccacctctggggcctacactctttaccttctctgatttatctgacccatccgcatatctctgcaaagtcttaatgtaggtttccaggatttaatgattctttcaatcaactttaaagttcttcaggaagattctccaggtccgtcaacagttttccccttcatgactttgtgacaaagctttcttgttccactatccaggtgttcccaacaagttgctgtaacggtggcccctcataagcttgcctggaaaccctagaaagctcagaaaaattatgaactttgcccagtaagaggctgggaagtcagaaagggttttaaacaaaactgaccccacttgttacatgctcctttcactgtccaaacgtcaaccaaaggaacttttgtgacgctaagacgctcccggcgtcctcacccgttcacagccagagttgatcttagaaggcagggggctcgcaccgagacgctcctagcaagcccctcacgcgagcgaatgactggcgccaggagaaacgcataggacctcccgaagccgccgagagcaaaaggacccatcagagctgtgctgagacccgcygcgggccgggctcgcactcgagattctcgcccgtgggattccagtcctgagctgaacgagagataagtctttgtcaccccccagtctttactgtttcgagaaaccctaagattttttaaaaaaaagcccaaracgtcaagtcggggaactccaacattggggtgtccagaaacactggggtttcaggcgctctgtaaatgcgtccgaggtccgcggttctgcccgcargcccagaccccggcctcacttccgccccgcgccccgcgccccggcctcacttccgccccgcgccccgcgccccgcgccccgcgcgcctccgcccgcccctgctccggccttgcgcctgcgcacagtgggatgcgcggggaggtggtgcgcggggaggtggagggcgaggggcggggctacctcaggtcccgcccgcggcaggcctgtgggctgcgaggaggagctttgcctagcttgcaggcagcgcagggcagacggcggcaggagaagcaagatgaatgcaggctcagatcctgtggtcatcgtctcggcggcgcggaccatcataggtgagtggccggcgggagccgcgcagagtccgaggcgcctgctgcttcggcaggagcgccgagggccggacttgtgtaggagaggggcgtatgtggaggaagccggtcaggccaagccgcgaggagccgcgggatccctggaaccctgcgsctcccgcgttccctgacctggtgctacagccccaccctctcctctcccgatgtgcgyactccgtccctcgtgcttggattggctcccggggtagagccatcgcgtggcctgcctctcccattggktggcgtagggaggtgttctcctscggggcccctgattggccggctccgggaggcgccatcggtaatgcctgcrgcaggggcggaactgctaggtggtctgagcccggctttgggctggggtcgggctgtcacacaatggctagaagtcgtgacttcgtctccttcgtgccgcatggttttcaacgcccttgacccgccggttccttttgtttgggaagcatggggtcgcatccagtccttcggatttggggaaatagaagggctacagcggcgtccctaggccgttctggaggtcgcctgtccagccctcggctgctgcgagttgtggcacccaccttgacctttgctcagaccagcaggtgtaggaacgtgtgggaggagagggcactgcctcctcgcgtggccttgccaaacagggtcatgaggctcccctgctcgtaggtggttcccgtattacccgcaggcttgtgatgtccacgctctccgcctttctattgtaggttccttcaatggtgccttagctgctgttcctgtccaggacctgggctccactgtcatcaaagaagtcttgaagagggccactgtggctccggaagatgtgtctgaggtcatctttggacatgtcttggcagcaggtaagtctcagtgattccaggagaagtcaggcttattagaaacagcccataaacacacacacacacacacwctctcacacactcacacactctctcactcactcaagttcttgcctccttgcttttgctcagagttccctctgttatgattcctcctgttggcccccttcttccagccctgtcagtagcttctatccagcttgagactcagcttcttggccaggcagggtggctcccgcctgtaatcccagcactttgggaggcggaggaggaaggatcacttgagtccagaagtttgagactagcctgggcaacaaagcaagaccccgtctctacaaaaaataaaatagccaggtatgatggcctgtgcctcccagctactggagaggctgaggtgggaggatcacttgagcccaggagtttgagactgcagtgattgtgtcactgcactccgtcatgggtgacagagtgagaccccttctctaaacaaacaaaaagacttagcttcattaatatgctttttgtgaatgaacttagaccactgacctacaccacctacactgccttttcttttccttttttttttttttttttttttttttttgagacggagtctctctctgtggcccaggctggagtgcagtggcgtgatctcggctcactgcaagctccgtctcccggtttcacgccattctcctgcctcagcctcccgagtagctgggactacaggcggcccactgccttttcattcttacgaagcagggccggccgggcccggtggctcacgcctgtaatcccagcactctgggaggccgaggtgggcggatcatgaggtcaggagatcaagaccatcctggctgacacggtgaaaccccgtttctactaaaaatacaaaaaattagccgggtgtggtggcgggcgcctgtattcccagctacttgggaggctgagacaggagaatggcgtgaacccgggaggcggagcttgcagtgagctgagattgtgccactgcactccattcagcctgggcaacagagtgagactccttttaaaaagaagaagaagaagcagcagcagggccagcctgacgcataggaaagtatgcctgctcctccttactacctcaaagtgtcactcattcaacaaaaatgtattcagttcctcctatgtgccccatactgtgcttagtgctgggagtatggttccaacaatacaggtaagttccctgccctcttagggctcagttctgagcttggaaaataggtgccacatcatgccccttgcaaatgggrcatatcactccccagaggaatatagctgagtcctgagagtgcccccatcttctgattctttgggtttgaacactcgtaattaattaattaattattattattattatttaaagagacagggtctcactctgttgtccaggctggaatgcagtggtgtaatcaatcgtagcccactataacctcaaactcctgggctccacggtatcctcccacctcagcctctggagtagctgggattacaggagcaggccaccacacctggctaattttttaaatttttttgtagaagtggagtctgtctgttgcctgggcgtgagtgcaatggctgttcacaggcacaatcatggtgcaccatgcccttgaacttctgagctagctgggactaccggtgcatgtctactaagtttaaggcttttaaagcactgtgctaaatgctttcctttcattacctcatttaatcttcctcacaagtctgttatatcctattatcttcattttacaaatgaataaatgagagtttaagaggttaaatgacttaccagggtcacagtttgaagtggagctagcacttgaacttagatctgtcctattccttgagccagataccttctacaatcatgtaacaaatgtttattgagcacctactttgtgccaggcactattttagcagctggagataagcaatgttcatatcagatagaaattctcattctcatgaagctcgtagtatgctaaatgctagcattattaattgtgttagcacctcatttctttctttttctttttttgagatggagtcccactctgttgcccaggctggagtgcagtgacgcaatcttggctcactgcaacctctgcctcccgggttccagtgattcttctgcctcagcctcccaagtgactgggattacaggtgcctgccactgtgcccagctaatttttgtatttttagtagagatggggtttcaacatgttggccaggctggtctcgaacttctgacctcaagttatccacccgcctcggcctcccaaagtgctgggattacaggcatgagccaccatgcccagccctgtacctcatttcttctttttcttttttttgagatggagtctcactctgtcgcccaggctggtggagtgcagccgtacaatctcggctcactgcaacctctgtctcaggttcaagcaattctcctgcctcaacctcctgagtagctgggattacaggcgtgcaccaccatgcccagctaatttttgtatttttagtasagagrgggggtttcaccatattgtccaggctggtctcaaactcctgacctcaagtaatgcgcccccccccccggcctcccaaagtgctgggattacaggtgtgagccactgctcacagcctgaggcaccgcactgggcctgtctttttaatatgtatatgatcctgcatatgttttcagtctcaagtaaccttacccgtttttagtttccagcctaatcccagaytgataacattgtgatgaatataatctctaagtttttatcagcgacttmtttgctagttcttccccacaaactctccaaggaagggtggtaggtttgagtatatctgaaactgggaatagagtaaccactttataaacatttaccattgactctgataacagacaatggcgattgagaatatttgaaacttttaactccattctcttctgtgctactttaagtaaattatgtatttcttcccaactaaaggaagtcccatagttgaattatgaaaagatatttgtgtttcagtactcagaatgagaaaaaaaggtatttgtgaattctgagtttgtatatattttgttatataaccatttaagcatagtgtaatgaatactaagcaagaacagaactgcttattatcaaaggttttcctttttaagtaaccctttttcttctcaagtgtcttaagccatgatcttgggagcaaatggccctagttagaaacactgataatgcctaggttatatcctgtgtttattagacataggtttgataatgcttatttaagcacccccccgcacttttttttttttgagacggagtttcgcccttgttgcccaggctggagtgtaatggtgtgatctcagctcaccgcaacctccgcttcccaggttcaagcaattctcctgcctcagcctccctagtaactaggattacactcatgcgccaccacgcctagctaattttgtatttttagtacagacagagtttctccatgttggtcaggctggtctcaaactcccgacctcaggtgatctgccctccttggcctcccaaagtgctgggattacaggcatgagccaccgcgcccaactatttaagccatatcaaaagatgaggatgacacttctttcttaatgtattaatgacttatttatggaggagaaagcttatatctatgaaatacctacagagcagcacaaggcagtatatattcaagggctagactgtgacaggtggagagtgtatacaggcctttttgcctccagtgggcacttacttgacctgtaggctttcagaagtggcaggtaacccaactggcaattttccacacactttcactgtgacattttgtctttctccttgattgctaagagtcctctgtgttcctctttctaggctgtgggcagaatcctgttagacaagccagtgtgggtgcaggaattccctactctgttccagcatggagctgccagatgatctgtgggtcaggcctaaaagctgtgtgccttgcagtccagtcaatagggataggagactccagcattgtggttgcaggaggcatggaaaatatgagcaaggtaaggcctctctgatgaggtggctttcactgacctcacactgagaaactcatgtctatgccagaacagagtaaacagatgcatagcagagctggaaccaaacagtgaacaaataaacagaaatgacaaccttgatccctacttgaatgtgaagtattcttcagtttgggtgggaaatccgggttgataagaagtttatcaaccagtgtgattggaaccgaatatactttttctaaactattaatgaagcatgtaatattttctgaattaaattcatattagttgcttgatgtccttggttttaaatttctttcccattgtgagtaaaaggcaaaaaacagatgttgccacttaccttcctgcacatgacaaggagatcctggggaccagactttttgaccttttcagggtatagaacatgtaaaagaggaccaccaagtggtgcccttctccagtaggtttgccaggcatgatttgtttcaccaagttccatacctcaaactggcatagtggttgaaagaaaaactataccccctgcttcctactgatgcagctcaggggctgaggtgcagattccctagatagaagctgattcagcccagccattgctgaggttcaggaggaggcaggctaaaggtaacaaaaataatcggagtgattttgatgggatgacactgacatctgtgtagtactttaccaggtgcttttgtacatgtgttcacaacagccccatatagggtagatgataccattcccagtttacaggtaaggaaactgaggaccagagccagcattcaaatacaactcttccgactctaagtccaatcaatgactctttccattctaatatacctgctgttgagttggtgagagttaagactggccgctactcagaaatccctccccatcatttagttagcctgattattctcactgtagacattatgtcatccattgaaataggtaacacattgttagctttacttaagcccttagaggatttcttcatttaacagataattaattgcctcgatggaaagaataaatggaattcttaaggaaacaggacacagaatgggtaggtttgagggagaattgaaaatgggtaggtaggagagtaatcgttcccaacaataggaaagatgaagtctgctaattccaggggtctttagaccttggcctggctgaggacctagaactggggagaagggctgcaaaggggcctagatgaagacttaggaaatactagatagttttgagttgtattctggggagaagactaattgcaactaagcctaaatccatttttatttctgacttctaggctcctcacttggcttacttgagaacaggagtaaagataggtgagatgccactgactgacagtatactctgtgatggtcttacagatgcatttcacaactgtcatatgggtattacaggtaaggcagacatggctgaaactgtattagctttaaaaaggttaaaaagacmatatactaatctgcttcttaggtgctttcgtccttatggccagagactgtcttaaggatttttatatctcttctttgattaactgaagtgaagtaagtattctcttctttgtgaactcttgattatcagagaatgttagaagtgggaagtacctcagagttcttctggatcaacccctcattttaccaaatgaagaaacagggcccacaaatagtgcttctgtggcagaggtagtgacagagataaaccagttgtttttttggtacctagctgtactttttgtactacacaattgggttattggtcattcatgctgaagggtcctgtggtctaagtttaatggcaaagcaactgggaaatcaaaagcactcttgtctttagtatacatgtaaaacttaagaaacagaatagacattttagagttaaagaatcaaaccctgagaagttaagcaccttgctcaaatgcatgcagcaatggctctggttttatgtaacacataaatatgtgaaaaaggtaatggggaaaagtacaagattccaagagggaactgtgtgcatgaatgctaggaaggaaggaagggcttagggatatgggaagcaatgagaagctcaaggcatcttgaccacttctcgacttacagccacaacagagaaggctataaaaacacaggcagacaatggaagacactgtgtgaccaactgcctcaaccataactagaggtggtcattaaaaattcagatcccgagccctttccaaggtgtactgtggattgaatggtactcttccagcctccagaactgtaagaaaataaattgctcttctttagaaaaaaagaaaagaaaaaaggctcaggtcatgatggagtaattgacaaagattagatttcctactataaacaagcataaaacttgtgaaaatatataaagccactgttttatgtatgtcaggttttgactaatactcatgtaagactgagatccttgagagaagggaaaaccccactgtcactgtctctacccagggcacttcccaaactgtgttatggagaggcagagcctaagctggaaacagtggtctcagtgatctgaagaagcagagaatttggggcttctgagatggctggagtttgtggggcagaataagggggagaagaaaaaaagagctccagaaatctgcaaaaggttccccttaagtctttgatcaaatactaagcttgtagataacagcttacaaggcctagtagaaaagagctgcaaaggagaggtgaactggagattttatagattactaggagataaaagttctggacaagcgagtggaaaccttactgaactccttggacactccattgacatctcagaaagaccacagtttaggggtagggccaaagccatagagtaaaagctactctagacccaaactaataagcttaaaaacaagcctcaaaaggatcaaggtgatttgccagtattttgactgcttgtggaaacaaaactcaatatattctctaaagataataaaatctctatgtccagttatgtagcaactataatgttcagcatgcaatgagaactttctagatacacaaagaattaggaaaatatagcttacaaccagggtggaaaaaaaccacaacagtcaacagaccctgcaatactagaattatcagatgaggatcttaaaggctctattttacatatgtttaaagatacaaaggaaaatataatcttcatagaggaatagatgtggacatctcaggagtaaaaggaaaaaatataaacaagaaccaaatagaaattctagaacttgcaaagtacacaatctgaaattaagaattcactgggatggggccgggcatggtggctcgcacctgtaatcccagcaccttgggaggctgaggtgggaggatcacttgaggctgggggtttgagactaggctgagcaacatagttagacctcatctctaaaaaaaaagaaaaaaaaattctgaatggccttaacagcatcttggagacagaagaaaaagggtcaggaagtttgaagatagatcatatacacgacctgaagaacacagagaaaaataatgaagaataaatgaacaggccaggcacggtagctcacgcttgtaatcccagcactttgggaggccaagccgggtagatcatctgaggtcaggagttcaagaccagcctggccaacatggggaaaccctgtctctactaaaaatacaaaaatgagctggatgtggtggcccatgcctgtaatcccaactacttgggaggctgaggcagaagaatagcttgaacccaggaggtggaggttgcagcaagctgagatcacaccattgcgctccagcctgggtaacaaacaaaactctgtctcaaaaaattaaattaaattaaattaaattaaaaaataggccaggtgtggtggctcatgcctgtaatcccagcactttgggaggtcaaygcaggcagatcacctgaggtcgggagtttgagacccacatgaccaacatggagaaactccatctctactaaaaatacaaaattagccaggctggtggcgcatgcctgtaatcccagctactcgggaggctgaggcaggagaatcgcttgaacctgggaggcggaggttgcgttgagctgagatcacgccattgcactccagcctgagcaacaagaatgaaactccgtctcaaaaaaataaaatataaatgaacagagccttggtggtctgcaggacaaaataaataggactagcatgcatggaataggaatctcatacataaggaagagagagaatggggcagaaaaaaactgaagaaaatttccacatttggtgtgaaaagaagttcaaagaccaagatagacaagggaaaaattacaccttagcaaattgtagcaaaaagttaaaaaaagatcatgccactgcactccagtctgggcaacagagtgagactctgtctcaaaaaaaaaaaaaacaagagtgaaagtgaagagccatttttagatgaaggaaaatgaattgcctgcacacctacactacaagaaatactaaaggagccaggcatggtggtatgtgcctgtagtcccacctactcaagagctgaggcaagagattgcttgagtccaagagtttgagtctagcctgggcaatgctatcatagtctactatgattgcacctgtgagtatctactgcattccagtctggttaacatagtgacacaacaacaacaacaacaacaaaagaatagcttccagccgggcgcggtggctcacgcctgtaatcctagcactttgggaggccgaggcgggcggatcatgaggtcaggagattgagaccatcctggctaacacggtgaaaccccatctctactaaaactacaaaaaattagccaggtgttgcagcaggtgcctgtagtcccagctactctggaggccaagggaggagacttgcttgaacctaagaggcggaggttgcagtaagctgagatattgcaccattgcactccagcctgggcaacaagaatgaaactccatctctaaataaataaataaatagtgtaaataaatactgtataaaatgcaaagcactcagaatagccaaaacaattttgaagtcagaaaatagcacttacatgctctgattttaacattacctataaagctgttgtaaacaagacaatgtggttttggcataaggacagagaaagagaacagagttcagaaatagacccagacttatgctcgttttcaacaaaggcatcaatggaatgaaatggagaaattaaagtcttttcaacaaatggtgctggaataacagattactcacatgggaaagatgaacctagatccctacctcacaccctatataaaagctaatttgagataaatcatggatttaaaaataaaagcaaaaaatgtaaagcttctagaagtatatataagagaatagcttttacagggtgcagtggcaggtgcctatagtcccagctacyagggaggctgtggtgggaggatcacttgaggccagcagtttgaggttgtatagtatactatggttgattttgcctgttagtagctgctgcactccagcctggtcaacatagtgagacatcatccaacaaaaaaaaaaaaaaagaaagaaaaacagcttgataagtaaagacaagacatagaaagcaaagcaataacttttttgtgtgtgtgtgtggagacgggtctcactctggcacccagattggagtgcagtggctcaatcttggctcactgcaacccccacctcagcctcctgagtagctgggaccacaggtactcaccaccatgcctggctaattttttgtattttttgtagaaatggggtttcaccatgttgcccaggctggcctcaaactcctgagctcaagggatcctcccacctcagcctcccaaagtgctgggattacaggtgtgacccaccaaacctggccaattctcacatttgtagaagagagttacaaatacggaaagggagaagaatgtagcttgtggtgttaggttgcattttggagaactcaaaatgcagtatgaactcaaggtgttaccatgagtgtgtgtgtatatgtaaaattataaataatacatatggaagtttctactgaacagacctagaaacaatgacaaaccagtaacaacaagcagtcctgacacccagatcttctaaatacatttatccactaaaaggaactaaggttgtttggagaaatggccctttccaaggctagggaaaaaatgctaaaaaattaaggacatgctcagggacatgttgaaagcacacaggaggcagcctacggggcttccactttcctgtagtggaattttgaacaatttgagcatcagagtcagtaatgatagtaatgggttgtaactgcccaaattttgaacaatttcagcgtgcaaataagttatgatagtaatgggttgtaactgcctaaattttgaacaatttcagcgtgcaaataagtaatgatagtaatgggttataactgcccaagtattgaaaaatttcagcatcaaagtaagtaatgaragtaatgagttataacttattcaataaaatgaaaatgtatgagtccatcctgatataaataactgaataaatgggagaaaaggaaaaggttttctttrtggtaaaatgccaattaatatcttaccaatagaaggaatgttggagttagaaagtcatgaatgaatgctaaaactagtgggtgaaaatatgatggggaagaagatatttggataatccaaaaagaacctctgataaattattgattacttataaatgaaaaaatggtacctttaaaagctagaaacctggtgaataccaaaccattttaaccaagtgatcaaagataacatcacctgggataaactgattgtcatttgtgtcctaataagactcactgagaaaaatcatactatcattcagtggtatacctgccttttggcagaatcttaatctaattctgaggaaacatcagacaaatcaaaattgatgacccttaacaaaagaactcgcccatgttcttcaaaaatatcaagcttaagaagcatagtctgaagaactgttacagacaaaagcaaactagagagattgatagttgtacaatgcatgcttctttattggctcaaataaaggagctagaaggacattactgaaatataggtgaartttgaatgtggaccaaggattagataatagtgtttgattcatgttaaatttcctgatttttgttttgttttgtgagacagggtcacccaggctggagtgcagaggcacaatcatggctcactgcagccttgaactcytaggctcaagtgatccttctgcctcagcctcccaagcagctaggactactagctacatggcacacacaccatgcccggctaaatttatttttaatggagacagggtctcgctgtgcccaggctggtctcaaactcctgggctcaagtgatcctcccacctcggcctcccaaaatgctgggattacaggtgtgagccgccacacttggcccaatttcttgagttttataactgtgcttatgtaagaaagtggccttgttttggggaagtatacactgaaattaaaatttaagagtaagaaggcattgtatctccaactttctctcagatggttcagaaagaaaatattaaagcaaatggagggaaaatataaatggtgactctgggtgaaggaaatttctgtaagtttacaattatatagaaagggaaggagagaagtatgactcctgagagtcactgcaacatttccaaaccaactgccagtggcaggcagggccaccccacacagagcattgcacaggccaccatgagcctgctagcatatgtggtcagtcagtgcttggtcaaatgtggacgacttgagctatcaaatgccagttcatgaaaatgttagttttttgctgtttttctcctttcccagctgaaaatgtagccaaaaaatggcaagtgagtagagaagatcaggacaaggttgcagttctgtcccagaacaggacagagaatgcacagaaagctggccattttgacaaagagattgtaccagttttggtgtcaactagaaraggtgagtatatcatagtggtttaaacatcaacctatttataggtaagagtaacatctaaaagagtaatacataggaatctttagaaattatatcttagttatgtttttcaggttgcaartatatgtcctggatacatgaatgtggggagggggtatgctgggtttacrggacacggtaacatgggacctatgtcagcactcaagcactcttggttccagagcgtccatgaccactgtgcacacacagcaggtttcatgagaagctggagcactggctcatggttgttaggaggcaccagctgacctgtttcctgtataggctcaacctcctcagaagtggacacccattacttctcgctgtttctgtgtgatctccatttcacatttctaaagggtggatcttttggggtcactcgctattttctaatacagaatgctcccgtcaagctcccttattgataactgatatctcttatgtcmtgccagcagtgcacgattggctytgagactgcctgatccactcactcgtaaccagccaagtactatgacccaaactatagcagaatttggcacaaacaggtccctggtagctactttcctcaggaaggcctatggatttggaaaacacaggtgtctcataaggacatactcataaattgttttcatgtacaataattcttgtgtgtactttcctcctgttgtcatcaaagtggtcacatattaaaacttttctgctaaatatgaatcctcatgtttaatggcagagaacccaccattcccagcacacttacttctgtctctggactaatcttgagtaattggttttcctttgcttaggtcttattgaagttaaaacagatgagtttcctcgccatgggagcaacatagaagccatgtccaagctaaagccttactttcttactgatggaacgggaacagtcaccccagccaatgcttcaggttagattttctgaaggacatctgggggaatactatgttctataatgtctaccgagtgaatatttttctctttatttatatacaaaagtactattttttgggacagggactcactctgccagccaggttcgtgtgcagcaatatgatcattgctcacttgcagcctcaaactcctgggctcaagtgagccccctgccttaacctcccaagtagctgggggactacaggcatgagccaccacacccaactcaatatttatgtacaaaattatycttaaaacagttkaaggaaacatgtcatttctctgtatttgatcattgacttaacctatactgaaagaattaatttggtttcttgacatcccaactagacatacaaatgaagaagtaaattagggaacttcagtttatctacctttgtatttttccagtaccagaaactcccaatacctccttgtgaagcccaggcttattcttccatttcctgtcagagatctcccctccccaactgctgtaatcctttttttttctttttgagacggagcctcactctgtcgcccaggctggagtgcagtggtgcratcttggctcactgcaatctccgcctcccaggttcaagcaattctcctgtctcagcctcctgagtggctgggactacaggcgcacaccaccacaccggctgatttttctattttaagtagagatggctttcaccctattggtcaggctggtctcaaactcctgacctcaggtgattcaccctcctccacctcccaaagtgctgggattacaggcgtgagccaccacgcccagccccgactactgtaatcctaccactttctctagttggaaagttttgtggtcaatatattgccaaacataatttctatgtaaagtctgttgaattatagtaaatgccttagccaacaggtaaaatcatttaactcatgtcttcaggtggtaaagaagccacagatatgtaactgaggttaataagcatggtagaaattaagtcactcatattttacaggaataaatgatggtgctgcagctgtygttcttatgaagaagtcagaagctgataaacgtggrcttacacctttagcacggatagtttcctggtcccaagtgggtgtggagccttccattatgggaataggaccaattccagccataaagcaagctgtgagtataaccytattcccttttatgaaatttgtcttcctgttagccttaagtgagcttattcatgtagttagctctagtctttccctaccagaagagtaaccaagagcatttatttctatttttgagataaggtcttgctctgttgtccaggctggagtgcagtggcaccatcatagctcactgcagcctcaaaactcctaggctcaaatattcctcctgccttagcctcccattacctcgaactacaggtgcaccamgccttcttcatttcgtagagacaaggtctatgtcgcccaggctggttttgaactcctgagttcaattgatcctcttgccttaggctccccaagtgttgagatttcaggtgtgagccactacccccagccactgagagcatttggatcacatgctttctaggggaactgattctgttacattagccttaggtacacrtaacagatgctactggttcaaaattttaagacaatttagaatttctaagggatcttttagatcacacccttaaccttttggatggaatggatgtcactaaggcaaaaatgtgtgagaatgtcactgtattaacctaagaacaaaccaaastagcagttaccagtatcatgcagcatatatttatgttgacaaagaatggtttaactttagcctttccacccaagtttagacctcttttctatgaatctttcctctaggttacaaaagcaggttggtcactggaagatgttgacatatttgaaatcaatgaagcctttgcagctgtctctgctgcaatagttaaagaacttggattaaacccagagaaggtaaagatgcacaagtaaccctgagagcttaccagtgaatttcacaatccaattttaagatagtatcttctaggtgttggccatgtgggtaatagttaaagaaatactagttactaggactgagttcattacttcccaaggtaaaaaaaaaaaaaaaaaaaaaaagacattggcttacttggcataaaaggaacgaggtaagataggcagggatgaattttcacaaaggtgtaaatttattcctaagcagttaaaatgaaaatttgagtttgaaagggtagcatgctgatacattaagaggaaaaagacaagtttaagattttaaactgtgtccacagaagaataaacaatctaaatcttttctcccccgytaggtcaatattgaaggaggggctatagccttgggccaccctcttggagcatctggctgtcgaattcttgtgaccctgttacacacactggagagaatgggcagaartcgtggtgttgcagccctgtgcattgggggtgggatgggaatagcaatgtgtgttcagagagaatgaattgcttaaactttgaacaacctcaatttctttttaaactaataaagtactaggttgcaatatgtgaaatcagaggaccaaagtacagatggaaaccatttcctacatcacaaaaacccaagtttacagcttgtactttactttaatgtgtaatactcaactcamggtacaagacaattgcatytaacattgttataaataaaaggaacatcagatcaatcawwaagggctccagagtgaacagcatcttcataacttccatgtttatcatctttactttctggatgtaatttaataagatcatcaattcgaagaatggkgattgcagcttctgttgcaaatttcaaactcttaactttaactatggttggttcaaacacccctgcttgtttgttgtctcgaggtttaccattgctcaaatcaagaccaatcctgcaattaagaaagaattatttaacggccgcttacaatttcattaggtggcctattaactccagcatttcattcaagtattaaggttgatttttaaatcagactagagatcttgtaggtagtctttctaccaaaagaagcagggagagattagcaatcacagttaacgaagacacaccagtgctaataattagtcattatcccttgaattacagtgactgaacaacaaatgcttgctgtgaagtttttcatgttaagtatttgacaagtctgttacttatgtttgctgacatgtaattgactactatcctttttaatgcaacctgttctgcagaggttaacaaagagcgggaaaccatgcttaccattttagatttttacgttctgggttaacctgggcctcattatgaaaagctcttaattttgcaaccagatctgtggagtcctgggcagcattaactgctagtgtattgggaataacaagaagtgatcttgcaaactctgcaatcgcaagctgttcccgagacccctaggaaaagaagaaaattaggtgacttcacaaaagggaaaaaaaaaattgaagtccacagctactgctctcaggcctctaagacaagaaatgactgttcttaccatgctggttgcatagttttcaaggtatatggaaagggctgcttctacagcacccccaccgggaaccacagattttgactccaaaactctcttcactacacaaagtgcatcatgtaaagagcgctccatctcatcacacatgaaatcatttgccccacgtaagataatcgatgcagacgtacgagccttagtactgttcaaaacaaaagtacaattcttgtaatagcatttttaaaaatttttttttgccaagaccatcaatttctcaaaaaaaatggcattttaataaaataagtctacataaagttcccttaagtcctgcctacacaggatatttagatatactatacagaaacaatgtctagtccmtgcagaagagatgaaaatggttacttcatctcaatttacagtggcccaatgttattttatcccatgcgtataactgctcgtatcactgtgagactacaagcagcaaataaatgggaagaaaacctacttttacttaacaaaatcggtataactttacaattttagaaagtggctcttactttttgattaagatcagctcatcatcacaaattctctcctgtaccacttcttctgcctgtcccaacattgcagcttcaaaagtttcttcaccttccaaattggccagggttgacagaatagttgctaataagagagttacaaaggatctgtgaatattgctctttcatgattttaatatccttggactcagtagcatttgtgrtaaaagtgctatattacaagtttagaatttagttaggcagcacacggtaactccttttatcctaagatggaactgtcattttagaaatgaacaaattcagttcacaaatttccaacaaaatttctccagttacatgaaaaatggctctataaatgtgttggtagcacaaagcattaagagaatataaatgtttttgagctgttttctgtcaatattcyaatgtaaaaagacctttgataggatcagggataataaaagtattttatgtgacagccagcacaagacatacctccagaagctttggcaatgcgtttaaggtccctttttaaaactcttctaactgccatagcaccagcctccacaaaatacttcagacacatatcatcaattccaccagtggttagaataacattggcaccagttgccaggatcttctgaattctctccttggtgatatctgattctctgcaaagtatttttgtaacctgagttaccttctgtgatttttaaaaataatttaacttccattaagtatttatcacaagataatcatagatcaaattgtattatcctttgttatctctgaccagaatttaaattagtccaattcatggaaaatttgaaggaattaaaaattaccacttagctctccccaacccaaatttgaattactaattgagaactatggttaaacagggaacacaggtcctgccttcaaggatctagtggggagagggattaccaatcacactccagggcaagtgtcactaaagtggtatgcagagattacaagcacataaaagacataaatttagcctaggaggtggacaatgaagatgagtccaggccaagtgcagtggctcacgcctgtaatcccagcactttgggaggctgaggcgggcagatcacctgaggtcaggagttcgagaccaacctggccaacacggtgaaaccgcctctactaaaaatacaaaaaattagttgggcctggtggtgggcgcctgtaatcccagatactcaggagactgaggcaggagtatcacttaaacccggaaggcggaggtcgcagtgagccgagaccgtgccactgcactccagcctgggcaacaagagcaaaactccgtctcaaaaacaaacaaacaaacaaaaacaggagtccagagttgaaagcacaaaagaaggcagaaccagaaaagtgaaaaaccttgcaggttacaccaaacaatctagatactaagcttaatatctctaagcaagactagtatatcatctgtgttttcaaaaggattccctgattatcaatgtggaaactgcactgaatggctgaagacaagaagataataacatgagatataagctgaaagacaacctaaacagaaaagtcaaattttatggcttgggtgactcctggagtaaaataaataacaagagttttgggggcaggatgggaaatgagagtttagttgaggacaagattaagtttgaagtctctgctgttactcaggtgaagctcccaggaggcagtcacttacatcatggaaaccataaactatgggagatccagatttgaagagtcaatatgagtgaagccatgtgaatagatcattcgaagaatttttaaagtaaaatgaattacagatcaacctcaaaagcagcttgtctactaaacaagtactgtgtgctacacactgttatataaactcatggtaaaaactgtaataagccccaggaagaaaaaatacaggaagttacaacagaatataatttagattgaagaagaaagaaaagcttctctaagagactagcttgggtgtgtttctacaacagtctaggcaagaaaatgaaaagtaggtaaatttaatttggaggtagaaatcaagcggtcttggtgacagattaggagaaaaagtgttggtaaaaaggaggagttaaggacatttcctagttttctgcctgtgtgaaggactccccatcactaaaatggtcaaaagcagatttgcggtattatcacaagttcagttttagacatgttcactttgagatgcttgaaaagcattctactagatagaggtatgtgtgtttggagcttagagaaacagctgaaagagtctctggcatagagagataatacatgaagtcatgggaacaaaggggctatcctggagagtattatgacatggtccagacaaagcagcatcacaaagccttccatccccgaaagcatttcaagaaggacataatcaaagggttgctaaaggtcaagtaagaggaaggctgaaaatgtcttccgaatttcacgctagagaccttaacatgcagtccctcaaatggagaacagggctgaaaagggatgagaagaaaagcaccagagaagttttgtgtagtaaaccactcatgacatctgcctgtaaagatgtacgatagggagtacctatagcacaaggatgtacgaagaagcttgaaggacaaaagagccacaggaagaatccaggaaagagcataattagttgaagatgcaagtatgaaacaagaatcaaagaaaaggctctagagcagaaggaaacagactctagaacacttactgtagagggactggctttgatggaagaaaggacactttgttgtatgaggaaggaaggaaaaaagaatacccgtgcagactgatttaaaagatgacagcacatttcttactcttggcaaagctttcttgtaggtctggtttaactactgtttaaactattttttttttttttttttttttgagacagggtctcgctgtcacccaggttggagtgcagtggtacaatcacagctcactgcagcctcaacctcctgggcttcagattcttgccacctcagcctctcaaagtgttgcgattacaggcatgagccactgtgcccagcctaaacaatttattgttttaagtgactgtcaggcagtcaaatctatagcaatggtcacactacctccaccattagctcttctggcatgccaaccactaatatcacctgcacctccagtatctagcaaacagtaggttacagtcaatactatactgctgagttctgtactgctttgaggaaattagattcctgtcttttacatctttaatattaatagactcatacaatcaaaattccacaaaaaggccgattttcatataggttgtataaccccaaatccctctaaaaacaccaccaggctaatttttctggaagtaaaatagtttgacttggctaaaaatgttaaagtcctccaagacactcacacttaaaaggccaaaaataatctctcaacatacctctgtctaatttggtccagtttttcagggtctgtaatgaccacctgtacaccaagcttcatttttgttttttgcaggctgaagtcaaggcaagcaatttttgcatttacgattctcttgggcatgcctacaattgaacataagattaagttaatacgtctatccttaaaagcataataaagagtacctataatcgattgtatgtaaacacacaaatttagactaattcattgcattttatcttagaaaaattttatggcattaaatgcacgtaatttcttttaattcacattccttctaccatgttgtatgtgctttaaattacaaaaagatgtactgcacataatccacaaaaaaacattttttatttttttttttttttgagacggagtctcactctgtagcccaggctggagtgcagtggtgtgatcttggctcactgcaatctccgcctcccaggttccagtgattctccttcctcagcctcccaagtagctgggactacaggcaggtgccaccatgcccagctaatttttgtattttttagtagagatgaggtttcaccatattggacaggctgctctcaaactcctgccctcgtgatccacctgactcagcctcccaaagtgctgggattacaggcatgagccaccgcgcccagccaaaagaaaagctagttttaatctgtagcaatctcattctataaaccaaatcccaaaccttaccctgggatcccaccacacagttgagtgcatagccactgatgagcatactctccatttgacttctcccatgggctttcaaaatattaacagagttgactggatagcgtggctggcctcttatgtctgtgtatttaatagcaagtacagcatctactaccatgttagcaaagaaatcaccatttctacgccaaaagttaaggacagtaacaggtttggaatggacaaagggtacacacgtgaaaaatcaagggtaatttcaagggacttccttttagtaatctaatctattaaagcagcaagcattacttgtcaccaaaatgttacaacattatcactatctgcaattcatatcacttttagacatgctttttattaccttttcaccctaaaaaagcagggaaggcaacaggtaatttcaatacagcattactcctctctattgatatcaatttgcataaaattggttattcaaaattttattgcacaaaattgatactgctgctactacgcacgcgtgcgcgcaacacatgcgcacacacgcacccactcccgagacagggtcttgctatgttgcccacattggactggcactcctgggttcaattaatactcctacctcagcctccttagtagctgggactacaggcacataccaccatgcccatctcaaagtcttatgctttaaaaagtctaaattttatctgacaaccacaaggatacattccaatgattttggaagacatggatgtcttagcagcattaatcaggcaatctcttcccagttcatctgtgttaacaattaggttttcattgatataacgcactgcttccctgtttaaaagtgtgggggagaaaaacgcttataaagtcactactcaaactctttgcattcatcatgcttaacacagagccaaaatgtcgtaagtaataatacccgttcagccatttcatataggaggaggacatgaaaaaaccctccctcttcagatcatggcaagtttaatctatcccataagcatagccactaaaatctattattaggagaaaatgtggtagtcaaatgagaaaaaagatactggtccaagtttttaacttcaaatattactacttaaatgctaaaacatttaaattgaaggttttcaaattaaaatttagttattaatcaaaacgttaagacaacacagtttacaactattacatcaaaaaaaatttctctgaatgcaaacaatcttacttgcaagcaagtcgatagccactaataactgatgtgggatgaattttctgtttgactaattcatctgcattttttaggagttctgctgcaataataacctgttgagaaaacattcaccggtctgagtgtgccggatattcaacatgtgcaatacatatggaatgacactaaaatggccatatattattaaccaaaatggtagtgatgaaatgaattaactggttattagaaacctgggcgtgaagggagaagaacgctacaaaacactccaagtcctccacgttactcataaattcttggaaactgccactttaagcaaaacaatggacagcaatttctcaaatacagttgtttattgtaacgctgatggggggaggaaaacttgtttttttatacatcatctttcctcttaaagtcagtttccatgaagccactgtggatgttcagtgaggtcttattgtattataaatgcaaatggccaaaactgggtaggagccagaaaaatgttctaagaaactagttcagcaataagaaactagttcatcaatacaaccgtaaaagacaacacatctattacctttagaaaaaatgctcaacagaagctaaaccgagtgtgactattcatatgacctatattaggctattattttatttaaaaaagatagttcttcaagttgataaaacactaagaaatatttttaaagcaaaaagactgtcagcttcttatggaaggaaaactacatttgttaaatcacattatcgtaagttagacaaagatcatattcatattttaggagtagattccattctttcatggctaaagtttaatctagaaatacattttccccacaaactatctagtttctccagaattaacatctttctcaccaaacaatagtgtttctactataccagcatgctggatgatctatgaagagtttatactgtgtatcacatttactgactcggtaagatcacactgtcatatcatgatgtatttattaatttctcacactcccattttgaattcctgagattacctgtcaggatttaaaaaatagaacaggctgagtgcagctcatgcgtgtaatcccagcactacagaggccgagaagggaggatcacttgaggccaggagttcaagaccagcctgggcaacatagcgagaccctgtctcttaaaaaaaaaaaaaagagg

SEQ ID NO: 5691 - DNA, 67126 bp, Homo sapiens
  misc_feature (1)...(67126): n = A,T,C or G, or insertion/deletion polymorphism (see Tables 1-2)
aaggcaggtggatcacttgagtccaggagtttgagaccaccctgggcaacatggcgaaaccccgtctttactaaaaatacacaaattagccaggcatggtggagtgtgcctatgatcccagctacttgggatgctgaagcacaagaatcacttgaacccaggaggcagagtttacagtgagccaagatcacaccactgcactctagcctgggtgacacagtgagactcagtctcaaaaaaaaaaagtagaaaactcatcaagctgtacagctaagttctgtatacctcatatatgaatattatatcttaattaaaaggaaaagtctattaacaaaaagagttctcaaaaatgctcaacctgaacctccttagggggttggcagaagcattaactaaagctctcctatatttcaccaaaatgtgttggcaattcgtagcctgctggaggaagggaggtgtgagctgttccctgtgttcagctggacagcctcccactctctataggcgcttcttttagagccagctccactgctggtcctggaggttttttggggaaggcgatcaaaaaatttacaatgtccatgactactatagggaatagttctacgatgctggctgcgaaaaccagatcaacttattaggcacagtagacacagtgataattttactgtcccatgaaaatgttttaattttaatttcttttgaaatcagaacaaaaataagaatactgtaataatgagcatataataatgaattcagccagcgttatatgtgtctttataatgcaattggaaactctcattttaaatttttttttttgaaggaaaaaggggtccttaaaggcaaaggtgcctggggcccacacaagtcataatgcagccctgagtaaaaggaaaggtgctagggactgaattgtgctcccccaaatgtcttgtgttgaagccctaaccccccaaggtgactgtatttgaagataaggcttttaggaggtaattaaggttaaataaagtcataagggaggggccttaattcaataggattgttgaagaagaggaagagagagagaaatctttctccctgaaagcacacacttaaggaaacaccatctggggacacagggagaaggtgctgtctacaagccaggaagagagccctcaccaggaaccaaataagctccccatgctgawcttgaactctctaacctctagaactgtaacagataaattcctattgtttaagtcacaccagtctttggtattttgtgcaatggcctcagaygtcactaaatgacattgattacattctattaccccaaaaccctagttctatcttcattttctgttattgaactttaggcttcaggttaggaactaggcaagcttgcaatttgttaggtaggtaggcattctttttttctctgcctatttgaaggactacctactttgaaggttgcagatcagcagcagaaaaaaattttttaaaaagctttttaaaaaaattttagaagaaatcaaaggtttttttggtaataaaattttattggcttggcatggtggttcatacctattatccagcactttggaggctgaggcaggaggatcactttagccagggaggtcaaggctgcagtgagctgtgatcatgccactagactacaacctgggtgacacagtgagactctgtctcaaaagaaaaaagaaaaaagcacagaaaaataaataaaattacttataaatgtgtgaaaagatttttaatctcacttataattaaagaaatacaaatcaaagcatcctaattttattttatttatttttttttttgagacggagtcttgctctgtcgcccaggctggagtgcaatggcgtgatctcggccactgaaacctccacctcccgggttcaaacaattctcctgcctcagcctcttgagtagctaggattacaggtgtgtgccaccacgcccagctaattttttttttttttttttgagacggagtctcgctctgtagccaggctgcagtgcggtggggcgacctcggctcactgcaacctccaactccctggttcaagtgattatctcacctcagcctcccgactagctgggattacaggcatgcaccaccacccccggctaatttttgtatttttagtagagacggggtttcactatgttggctaggatggtctcgatctcctgacctcatgatccacccacctcagcctcccaaagtgctgagattacaggtgtgagccatcacgcccagcctaatttcttgttgcccagactgcagtgcaatggcgcaatctcagctccctgcaacctccgcctcccaggttcaagagattctcctgcctcagcctcctgagtagctggaattacaggcatccaccaccatgcctggctaattttttgtatttttagtagagatggagtttcaccatgttggccaggctggtcttgaactcctgacctcaggtgatccacttgcctcggctcccagagtgctggaattgcaggcatgaaccaccgcgcctggccaatttttgtatttttaattgagacggagtttcagcatgttggccaggctggtctcgaactcctgacctcaggtgatccacctgccccggcttcccaaactgctgaaataataggcgtgagccaccgtgcccagccccaatattttttaaaataagaaacaaaataaataaaatcacagattgcatttaggtacttccatacattgctggctgcaatttctttggagggcaatttgacaacaatcaaaacttaaatacscatttcctttgatccaacaatataaaagtatttccaacagttctatttgcgcatgattgcaaagatttacatccaagaatgggccaggagtgstggctcacgcctgtaatcccagcactttaggaggctgaggcaggcagattgcttgagcccagcagttcaagaccaatctgggcaacatggtgaaaccccgtctctacaaaaaatacaaaaattagccaggagtggtggtgcacaggtgggaggatcgcttgagcccaggaggtagaggctgcagcgagccatgatcatgccactgcacgccagacttggcaacagagtgagactctgtcccagaaaaaaacatttttaaaagatacaaggatgttcattgcatcatttccagtaacaagtgacaagctaaatgcccaagaagagactgattaaataagttacatagtggatcaaaaattattaacgtaagtatttctagccttcccctaccatctgccagctacagataatttagtcttgggtcaactttctcctctccctctacaagggaaatgttcaaaagtgtttagactttggtgatgcagcatgattgggaaagyagagggcacagaaagatgccaggctttgtggtctccaggcaagctcaggaatgtgacaaagcataccgaaaagaaaagcgggctgggagcagtggctcacgcctgtaatcccagcgcttcaggagtctgaggctggtggattgctggaggccaagagttaaagaccagccaggccaacatggtgaaaccccatctctaatgaaatccaaaaaaaaattagctgggcgtggtagcgcacacctgtaatcccagctactcgggaagctgaggcatgagaatctttggagccggggatgtggaggttgcagtgagctgagatcatgtcactgcactccagcctgggagacagagcaagactctgtctcaaaaaaaaaaaaaagaaaaaaggaaaaggaaagataaatttataatgtattgccaggaccacacaaacccttcatatgtaccaggaatgcaagtagaggaattgagttattttgaaatacttgttggctggtgatttatatttcattgatttagacactgctctgagtatggcttcagaagtgttacatacgcataataaaatcctttacagctattaaaaggagtgaggtaggaaagcatactgctaaaagcaaagaagccagatgagaactgtgtactgtacatccccacttgtttaaaacgtttgtatattatattcacatatgtatgctttccactacatagaagttttctggaaggtatttctgcacatttataaagatgcacatctaataatttcatttccccccattttctacttattgctctgaggtcaacactgaatagtccttatgaagatggtattgaatattctttcaacaaaaaagtctccggatctcaactactggagctcagaaaacgataccccaaagtaggaggctttggcatgctaagtactttgaactaaaggagattaggtctcagtagcagcctcagaaacaaagtctacccatgactttctcctgccctcctgtctccagcggtcttgcacccctgaagtaagtcacaggaaccagaattcttcttccccaaggagggttatggaaacttagaaccttcaaagtaatttataaacttggaaatcttactgtaacattttcttctacctctctctgtctttgagacagggtcttgctctatcacccaggctggagtgcagcagcatgatcatagacaactgtagcctcctgggctcaagcaatcctcctgcctcagcctccttagtagctgagactacaggtgtgtgccactatgcccagctaacttaaaaaaaattttttttttgtatagagggagtcttgctacattgccctggctgagaatttacatttctaacaagttccaaggagatgctcctgctgctggtctggggatggccgtttgaggatccctgcatgaaggcatacacaggacttgatcctcagtgggggcaccaggagctggagcctggggagtgggaagcgagagcacagagctgactgaggaccacgaggtcgtcgtggaggacctaggctgaaggtcctgaagaaatccccatagtttcactgccaggccagccaggtggacatctcagggctgaggaggtgagaaggcaagacagaaagtgaaacagcactttataggatagggatgggaaggtcatctgcatcatgggactccttggggaggggttcggtcattgctccagatgaaggtttagtcttttcatcgtaaatttgctttcactgttgggaaagagatcttcacctccattttcttaacttcaaaatggaaatgacagatgcttttgagtggtctgaatacttgaaatttgagggaaaacgttaccagaaacacatacaactagagttaaagataaatacatatatcaaacgcatggctcaaaaatgacaacgcgtcttctttatctgccttcacgtagaacttaaaacagaccctggtccccacctcggggtttcctcgcgcccacgggctgcgctgcgcagctgggccagcaggtggcgaggctcccgcactttttttcccgggcctggccgcaccgccaccgcccaccccgcgctccgccccgccccgccccgccgcactcgcggatcgtcacacggtcaggccaccgcgcgtcaccgccccgggctctgctagaaagtgccggggtccagattcctttcaggtgactgggttgggaggagaagtcgctcagcgtaattgtcggagccgaaataaacagagactccgcggccgggcgggaccttacccggaagtcccccagaacagcactacccttcgctgaaacctcgcccgccccctccaacccagagacgaaaagggaaagcatcacggccagaaaccgttggcacaactccacagatactctcccgggccgagccagactccataagtcccgcgcctggcccccggggattgcaggggctgaggagaagggcaacacggggaccttgaagcggggtcgcggcggcgccccagcccgggccagggagtcccggcagcggcacctcccagaaagggcggagccgacgacgccttcttccttcctgaccggcgcgcgcagcctgctgccgcggtcagcgcctgctcctgctcctccgctcctcctgcgcggggtgctgaaacagcccggggaagtagagccgcctccggggagcccaaccagccgaacgccgccggcgtcmgcagccttgcgcggccacagcatgaccgctcgcggcctggcccttggcctcctcctgctgctactgtgtccagcgcaggtgagcggtcgccggccaccgggacgccctgtggggacgtggcggggccgagagccggggaaggcgacgggcccagcgacggctcaggcccgggtcctggggaagttggtctggcgatggagagctcggaggttcctcacttgtcctgtttctgtctccggccacgctctctttcctgtggtctggaagagggtggcagtgggggcttgggtgacctgttctgagcttgttccatctgtggtcacctaatttctctgtgtaggatgtggcaccagaagaagggaggaaagtgggtagagtgggatagggacactacttgctttttaaaaaattctgctacatgcgcacgaactccaaaatttaggagctctaaccactttatttcctcttctcatcacctgaggatggaggtggaagcagaggtaaagagacacaaacttcctcaagcacccggtgaaactgccttgagtacttgacataagtcagcttggtcttctaaagagggcaggttacttttcatcaactcctttttacacctcaggacactgagactcacagggcggtattgaatttccccttgtcactattagccagcgacaggatggggcctggaactcggtgtcctgctgactccttctgggggcttttgcttggtttaatagctttgggaaagagcacctcagtatttgtgtgtctgtagtttcctcttttaaaactggagtggggcagtgtcacgctgtgactcgttaaaccaaatcaggatgagagtgcctccggggaattgtgtccttgtgcacattaacgcccctcacataggtgtggcgtcaataggaagtggtgartcaggggagagggggttccgtggactagaaaaaactctccttcgacttctatttagttctcagaaggggataggtgatgttgatccaataatggactaagagccaggagaagggctccgcgggaggatctcttgagctcagcagttcaagaccagccggggcaacatggtgaaacaccgtcttaaaaacattttgtttttcttttcattgttgaggttgaggctgctgtgagctgtgatcacgccrgtgtactccagcctgggcaacagagcaagaccctgtgtcaaaacaaaaaagagagagaaataaataatagcaattatgtgccktagagaaaatgtggctattctgtttccctagagttttttaaaatttatttttaaaatttatttattttagagacaggttcttgctstgttgcccaggcgtgggggcagtgtcgccatcatagctcactgcagcctggaactcctggcctcaagcagtccttccaccttggcctcccaaagcactgggattattgtgagcaccactcctggcccctcctagagttttagatcaggaccttaaataggcttcccttttttttggagacagagtctctgttgcccagtctggagtgtagtggcgcaatctcggctcactgcaacctctgcctcctggattcaagcaattctggtgcctcagcctcccaggtagctaggattacaggtgcccaccaccacgcccagctaatttttgtattttccgtggagatggggtttcaccgtgttggtcaggctggtctcgaaatcctgacctctagcgatccgccctcctcttttggggattacaggtgtgagccacctcgcccagycaggcttcacattaytaagtagccrtctcttaagtattttttaaatctcaagtacccaaggctgatggccaatgagtgcttcttttatgacastkgggataggtcagaggtttgttgsaagtctcttgcaaaartgcctggaggccttttcaaggtctgtaaaccttaactggaaataatcctattattattttaaaaattcctcatgtctgaaagctttcagtgcacctgaacagattggggtggagccatgaagccaaacagattgggagagagagtgtgtctgcttttagaattcgtaccgatgatagcagctcattagcttcagtctgagcgctagtagagttctatcatggaattatggactagttgtcctgtgtaagatctgaaatacatgttggggggatttttgctttttcttaatgttcaatatgtacagatgatgtaataacattactagactgccttgtttttaaaaccctgtagtcatctaaaaactatatgcagttttgagacatagcctttatttttcccggctgtaattttggtaagctttatcttgagggacttggaacatagagaagcctgggtagaaattaagcattaaaatggcttttcctcagaagactgggaatggttaatcttttgacctgtgagtgattaagaacaaccatctgaaattggaatgactgtgggaaatctttccccatctttcccactccttgactgatgctgtgatcagaaattttactaacataagtaatcaaggggaaaatgagatttttttaaatttgagccagtgggcagagggaaaaggactcgctgaataggcctttgtattcctccagtgtttgttatattacccagaacaaagaatcactctggtcatgaagacagtgtgctctctctttcctgggtaaccctccactcctaaaagggatgcagtattctaagcatggcagattacctacagcggaagcctggatcagtcatctctgatctcgggtgcccctttctgscctttgacctccagctctgtgaagggcatcagctctccagtcaaattgaactgcttgctagcaaaatcctgcccatcttccagggccccatttcacatgctamattatctacgacatycttgtcctgttsccctaactagaatgccttccctctgaagttctgaatctttatttaaactgctgcaacagcatttgctgcctcattaaaagaccttggtgtgggtcttgactcttctctgttcccaagagtgatcttgggtaagccagttatcctctggagcctcagtttcctcctctgtaaaattggattaactgtgccaactatgcttgtgaaagacaaatatttcctaattgaactaccgaattgcaggctccttaagagcaataactgttgctctccaatatcatctacaaatgtggccaggacacttgacttgggactctttttttttttttttttttttgaaacagggtcttgcactgtcccccaggctgaagtgtagtggtttgattgtggctcactgaagtgttgaccctgggctcaagctatccttccacctcagcctcccacgtagctgggrctgcaggtgcatgccaccatgcccaactaatttttaaattttttgtagacacaaggtcttgctgtgttgcccaaggtggtcttgaattcctgggctggagatcctcccaccttggcctcccaaagtgctgggattacaagcatgagccaccgtgctggccctggaatcttttttttttttttcaagaccaggtcttactttggttgcccaggctggagcgcagtggcacgatcttggctcactacagcctcgacctcccgggctcaggtgattctcccacatcaagcctcccgagtagctgggactataggtgtgcaccatcatgccctgctaattttttgtatttttagtagagaaggggttttgccagcttgcccaggctggtctcgaactcctgagctcaagtgataccatccacctccgcctcccaaagtgctgggattacaggtgtgagccaccatgcctggcccactgggattctttgatcataagatatttgggccttgaaatggattttggggagagacttagaaactagtggcaatcaaaattggatttgcagttggtttctaggtgatggcagtgatcagctgcggccagccaggtttttcttcatctggactgtgcctctcactttcaaatttttggaacatttgctttggcarcaaaactttyaaaaaaccaactctctctggtgcaggtgttctgttggaggatttgagagaagctttaaaattttatcttattactgtcccttgcttaggtcacaagaggagctcaaaataatttcataaacatgaattggcttccctagacacaacaaaggataagatcaaaagaattaacccatttaaaaaaatcagtctaggctggtcctaaggtagtgtgttatcaattgatcaaagtcagttacagatcgaactccttgatctactctttcctcctgctcactactgcacttgactagtccaaaacaataagtaagtagtaaaaaaaagaaaaaaagtccgtctatacactgtaaagtgctgtgtaaatgttcataattactatcactgtcttcttcatagttgatggrgggaaggctggatacataaaaaaatggtaatacagtaagaagtgctcagataagaataaagataaaatgttatggagagtccatttttgagctgagctatggaggatgaattaatgtatcaggtggacaagaggaaaactagagaaaatagtcgggagagttgcctaattgttgccctaaactattgaactgttcacttgaaaagggtgaattttatggtatgtaaattacatgagtaaagctcttaaaaaaatttgcagggtgctatatactagattacataagactagagacaaaagctacccaaattttgcatagtactccattgctatcacatccgatcttgttttatcctcacagagcccctttaaggtaggtgtaatgctgtttttcctattttatagatgcagacatcaagggtcaaatttgtcccaaggtcacatagctagtagatggcacattgggtgcttcaactgccatcttctgacttctgtgccctagttttttgaaattcaaggctagattattggtgtttagcaagcttaattgaatgggtgttcagcagatattccacttggttagtagagcagtctcattcaaggcctggttccgtccccagtgtggctcttccagtagtccgtaatagatcaggaatgggtttagcctgctggcctgacccctgattcagtcaccacactgtgaacattccatagggaaaaaactgcagacagtgtatactgrcacccactttcatagttttgttttagttttgtggctcctaaatgtctaagactaactagtaatatgaccttgggtgagtcacataaaaaaccagaagctaaaggggttatctgtaaaacgaagagttggactagctgagcacacctagcactcaaaatatatgacttaaacacccacatgcaggcaggcctggtgcacacacaaattatcctttgttatgtagatacgttcatgccaggttggctataaaacacttccagagatttccgtcaatagaagtcagaccagcccggcagcctccaccctaaatgccctgccatatttgtttggtctgcctccctgactccaaagaagcagcaggcagcttaatctctggacaggattcttcatgccactccctccactccagcctgtgttgtcctgactggccaggccagcctctgctctctggagaagcaatgaggtagggaagttaaccagcaagcccctctcctccatcgcctcactggagcttgagctgggtatctctccatgttttgccattagctttacccatccaggacaggggcacaagtgttggtgccaagccctgcactcccagctctggtggatggccaagtcctaccctggggttgaggactgtcagtgatactgagtaagggagtcattgcttgacaactgcctagagagatactttaaaagataggaatgggaggcattatttctacaagtgaacaagtttatattgaaggaacacttgtataggatcatcatggatgggacagttcatctccagtgcattctccaattctgaggatacatcactgcacaaactggactagagtttaaatggtacagaagctgggggtaggggaggcaggaggacaagggggatgggtggagaatgcttaacttggtgttcaaaatcatgttatttatgagccatgtgacctcagagtatctttgagcctgagttcacttacctgtaaaattctgctgtgctactgcatagagtatctgagaaaatgaggcatgcagtcgatgtttggtatttttgtttcatttatttattttactgccatgcctcgagaacaatagatgttcaktaagtatttgaatatgttagttaatgctttaggatttcctaaaggcagtggaatagaattctcactgagttcagagcttttctgataataatgtgtgcttatggagctcctgaatggggtccaatttagcagttgctatagttgctgagatatagcacaaggggcatttttttttttttttagatggagtctctctctgttacccaggctggagtgcagcggtgcgatctcagcttactgcaacctccgcctcccgggttcacgccattctcctgtctcagcctgtagctgggactacaggcacctgccaccatgcccggctaattttttgtatttttagtagagacggggtttcactgtgttaggcaggatggtctcgatctcctgacctcgtgatccgcccacctcggcctcccaaagtgctgggattacaggcatgagccactgcacctggcctagaaggggcttttttttaacctttcctgaactgttcctrtcgttgaaagaagcttccctatccagtcattttcttagtaattaaactctagagcatgttgtgaaatatccatatgatctaacctttaaaaatagaaactctttagctgtgtaactactaaattctgggtagaagccaaaacaatcagcacttctcatttctgaacttagataatccagttgtactccctcagctcattgtgagttttgacaagttctgcatccatgaacaccagatgtaatacaatagggaatttcaaaggaaggattacacacctaggctctgccctctaggattttaccgtcttacaagggagttgagacaaaagtgagaaaatactctggcaacttctcccaacatcacaactttgcaattctcataaattttgcttgatcctagggcatgaccaaggcagaggcaggcaggtcctacttcatgtgggagagaaggaaggaagggtaggcagttagagtgataggtttggaatactgtagaaaggagagtgggcagagccagagtgaggtgtctgaagcttgtcgcacaggcagtgggaagggtgggttggaggtttctgagcaccagaaaactttgagcattgttccggaagaggcaagcggcaggcatctgcaccagagacactgccgggtccgagtgagggcaggaggctgcacgagggagcctccctgggagtgagcgataggttcgctatgggaggtgggttygaaaggtgcctgagattttcatttgaaactctgttgaagaggaattggcaatagaggaggaaatacaaatagaggaaagattggtttcgtcttaagcactgaggctgttgggcagctagtggaaagtgctgctggagagaagctggagatcactgaagctgagagaggggtttgtggatataattagagcagtgtttctagggaggtgcaggtgaagggactgagagagagatgaggttaaaaacacagaagagaaagagatggaggtgtggaggcccctgaggtggagcagctgcagaggcaggcctgggggccaggaggctggctctccactttcagctgttggtgagaagggagtgaaggctgagcagctcccattgtgcagctgttgagtgcacaggtgctcgtgctcttgcacacggtggggtttggggagggtgtgatgctacagggaggactttcatgatgcagctgattctcttttattgagagtctgtttctggagtcacctgctctgttttgaatcctggctttgccactgtgaccttggacaagttgtttagcctcagtgccttcgtttctgcatctgtaaaaggggtataataacgcctccctcatcaaactgttgtaggattaattgggttaacatattgagaggtgacagcgtgctggcagtcctcagagcccttgcttgctctcggcacctcccctgcctgggctcccactttggtggcatttgaggagcccttcagtcccccactgcactgtgggagcccctttctgggctggccaaggccggagcccactccctcagcttgcagggaggtgtggagggagagacacgagcaggaaccggggctgtgtgcggcacttgcgggccagctggagttccgggtgggcgtgggcttggtgggccccacactcggagcagccagccagccctgctggccccgggcaatgggggacttagcacccgggccagtggctgcagagggtgtactgggtccccccagcagtgccggcccaccggcgctgcgctcgatttctcgctgggccttggctgccttcccacggggcagggctcgggacctgcagcccgccatgccagagcctcccaccccctccgtggcctcctgtgcagcctgagcctccccgacgagcgccaccccctgctccacggcgcccagtcccatcgaccacccaagggctgaggaatgcaggcgcacggcgcaggactggcaggcagctccacctgcagccccggtgcgggatccactaggtgaagccagctgggcttctgagtctggtggggacgtggagagtctttatatctagctcagggattgtaaatacaccaatcagcaccctgtgtttagctcaaggtttgtgagtgcaccaatcaacactctgtatctagctgctctggtgaggacgtggagaacctttatgtctagctcaaggattgtaaatacaccaatcggcagtctatctagctcaaggtttgtaaacacaccaatcagcaccctgtgtttagctcaaggtttgtgagtgctccaatcgacactctgtatctagctgctctggtgaggacgtggagaacctttatgtctagctcaaggtttgtaaacacaccaatcagcaccctgtgtttagctcaaggtttgtgagtgcaccaatcgacactctagctgctctggtgaggacgtggagaacctttatgtctagctcaaggattgtaaatacaccaatcggcactctgtatctagctcaaggtttgtaaacacaccaatcagcaccctgtgtttagctcaaggtttgtgagtgcaccartcgacactctgtatctagctgctctggtggggccttggagaacctgtgtgtggaaactctgtatctaactaatctgatggggacgtggagaacctttgtatctagctcagggattataaacgcaccaatcagcaccctgacaaaacaggccactcggctctaccaatcagcaggatgtgggtggggccagataaaagaataaaagcaggctgcccaagccagcattagcaacccgcccgggtcctcttccatgctgtggaagcgttgttctttcgctctttgcaataaatcttgctactgctcactctttgggtccacactgcttttatgagctgtaacactcaccgcgaagatctgcagcttcactcctgagcccagcgagaccacgagcccactgggaggaacgaacaactccagacrcgctgccttaagagctgtaacactcaccgcgaaggtctgcagcttcactcctgagccagcgagatcacgaacccaccagaaggaagaaactccgaaaacatctgaacatcagaagggacagattcyagacgcgccaccttaagagctgtaacgctcaccgccagggtccgcggcttcattcttgaagtcagtgagaccaagaacccaccaattccggacacaatgtgaagagcatttaaaatagtgcctaagcctaggacaccgccagtgctttgtaagtctttgggtcctgctggcttaggttgcttctttcggcaggatgactttttttttgagaccagttttcactttgttgtccaggctggagtgcagaggtgctatctcagctcactgcagcctcaacctcctgggttcaagctgatcttcccagctcagcctccggagtagctgggactatgggcatgtgccactaggctcggctaatttttggctgttgttgtttttgtttgttttgtttttttgtttgttttttgagacagtttagctcttgttgcccaggctggagtgtaatggcacaatcttggctcaccacaacctccgcctctcgggttcaagcaattctcttgcctcagcctcctaagtagctgggattacaggcatgcaccccccacacctggctaattttgtattttcagtagagacagggtttctccatgtcggtcaggctggtctcgaactcctgacctcaggtgattcacctgcctcagcctcccaaagtgctgggattacaggtgtgagccaccgtgcccggcctgttgttgttgttgtttttaagagacagggtttcactgtgttgcccaggctggtctcaaactcctgggctcaagcgacccacctgccttggcttcccaaagtgctgggattataggcgtgagccaccacttccagccaggatgacttttttttttttttttttttttttttggtcttctcwgctgtgtctctagaagatgaccttttgagaagcaaacctgaatgttgattcaagcccaaatttcctgggctcaggtgttaattttttaagtctttggaacctctttgccgaggtctcaagcaggtagaagacattaataataattccttatatttgattgcgtggtgctctgtagtttactgagtacttactatatatgtacagataggcccttatttgatcttcacaggaacctgtgaggtaggcagagcttatgagcttcatttcccaggtaggaaaactcctacgtggttacgtaacctgctccaggtgtgatcccaggtgcaatccagctcaacaagcacactgagcctcaggagctcttgggatcagaacccaggactcgatcccactccgtgccgccttctcacccacccctcttccaccaagtgggtggaaatagcacttgctttgaaataagtaacgaatgatctttgtgaaaaggaacctaaacagcagtgggccatctttattcacatctatagtaccaagtgctgagtaaggggattttagactccagacacccgtcctgtttgtcaggccagagctgcagtgtgttgactgcacatctgtctcttgtcactcctgctcctgtgggtaaccagccagagtgcccctgaggcagagacaggccaatccctggagagttctgcgaggtctagggaagagttctttgtatttaaaatttcatgtgaacttcagcagtttcctctgcctctgtagtcagcttttgccttttcaaactttagttagatggataatgacttttactcattaggacttttttccattagttggaaacccagagttgcaatacgtttcttttttccttagaatcaccgggtttatgggaataacaattgggattctctttatataaaaatagtggtggaatcttggcacagggttcatatgtggctttgttgaaggcttgttgtcacttccttatttgtataatttccctcctttgtggcctaaacatgactttcaaagagtcaagaggagttaagtcctaatttttattttagaacatctgaaaaatgaattcagagaaaagtgatattgatgccttggatttccccacacatacaaatcccaatctcctgctgactttttctcatgtttttgggcttcagggactgttgtgggatttgtattttgatactgaaggaccaacacagactgacttagcttcttgcctgtgtgcaggtcatgtgccactgtcactggagagaatttcatgttgtgacttctgttcagatttgttttttttttatggctttcccatcagggttcttgggagccatggctgcttcttgatatcttctgtttccctgtagaacagacgattgcaggcccggggccctggcaagctgggccctctgtggctttctgagtccattgtgaggcagaggatcaggtgcgttttgggcagcagccttcagagcaaggcactgacctgatgattcacactgacccctcccctccgctgaattttctgacaaccttgtgactctcacatgggaaatgtgagtggtttttgagaaatctttacataagaggttttaaaattttcttttgagattgcctcggtgtttttccttaaagttagcacattctttgctttctacttcagcctcaaggacaggaagttcattctygctctttacattggggtgttgatgtttgtggttttgttgttttgttcttcatgttactcatgatgtattgatattaattaacctaaatacatatggaaatattctttcattacttagagcttatatagttcctggtgcagatgtgcaaaaatagtgctttagtaattgctaagtcactatcttgcttttctctctactgtgattgagtatttcttacatggaactatagcttcctcttatcaacaaataagcaggaaatagaaattatgtaaataagcaatttccattacctacttcactgacttgacaaataggcatttggtctgctttaattaatatttttcaaaatgttaagtgcctgttgctgttacttaattttgcaggtagcattggaagtttctgtgattgtacttgagtgggcacttcttgttgaaatttaccattgagaccctggtaacactgaagtttgtgttgactttctgtaggtgttttcacagtcctgtgtttggtatggagagtgtggaattgcatatggggacaagaggtacaattgcgaatattctggcccaccaaaaccattgccaaaggatggatatgacttagtgcaggtaagttcattatcttaggcactgggaacacaaaatgctgatcacaagatcctctgtaattattccttaaatgttattgcagggtggaggtggagatgagactaacaggcttaagtcttatcccggactctcaaactctaacctgtrgcatacagtgcagagaaagaacaccgtaactccaaaggcttaatttttcaggggctgactttatacctctcataaagtttcccaatagcaggttgctatttagagactgaccttggtacttcgtatgttgcccttgcagcatctgcaaaatatattagaagttagctggttttgattcctagatttcaggactcaaatggactctgttgctaagtggctttgacgtccttgtcccctggtcatttcagtgttttctctgtgttccactgagagcctgtgaattttggctgctaccaggattctgattcctgttctttttttaccatcctgtgatacacagggatattagaactggaaaaatcatgtgaaaagcctggttttagaggcttaaagtaatcaaaagtcaagtcgacatgataacagagttcctaggctcacttgttcgtttcttttctgtttttgagacagaaggagccttgctcttttatcctggctgaaggctagagtgcagtggcacaatcacggctcactgtgtcctcgacctcctgagctcaagcaatctctcaactcagcgtcccaagtagctgggactacaggcacatgccacaacccctggctaattttttaaaaatttgtttggggagatggggcttcaccatgttgcctagcctggtctcaaactcctaggctcaagcaatccaccctcctcagccttcctaagtactgggagtacaggcatgagccacrgtacctgtcctcacttgctgctttcatcataattattaaaggtttcaactttccctggaattactaatagaaatagtaagtagcactctggttgaattgaatcaaacaaacaaaaaaccctaagaagacataaaatgattgtcaggagaggagagaaagcttccaaataaaaagaaaattagaaacatctctacttgtgaataaatagtaaatgtgtagccttttaaaataattctataataactttgcaaatacaggatgtgtcttacccttttgtacttcaaaaggattacrtgaatgaatgtgtcttagttcactgaggaatgttgaccttactctaactgttgcctactcccgtgtctgtgctctttcacctgaaaggaactctgtccaggattcttctttggcaatgtcagtctctgttgtgatgttcggcagcttcagacactaaaagacaacctgcagctgcctctacrgtttctgtccaggtaggttctgctggggaaacagaacaactgggctgtagatacttgtgaactggtaatgctcagctttccatttattctttgtttacatatttttatttattatatgtctatattatatgtatattatatatttatacatatatgtatacatgtaaagtaggtgaatatatatttatgtattaaaaatacatgtatgtataatgtgtatgcatgcgtgtgtgtataatagagacagagtctcactctgctgcccaggctagagtgcagtggtttgtggtgtgatcacagctcactgcagcttaaacttcctaggctccagtgattgttctaccttagcctcctgagtagctaggactacaggcatgcactaccatgtctagctaattttatttatgtttttctttatttttttttttttgagacagactcttgctctgtcaccgaggctggagtacagtggcatgatctcagcttactgcaacctcctcccgggttcaagcgattctcctgcctcagcctscccagtagctgggactgcaggcacatgccaccacacctagctaagttttatatttttagtagaggtggggtttcaccatgttggccaggctggtctcaaactcctgacctcaagtcatctacccgcctcagcctggttattacaggctgggattacaggcatgagccactgcacctagcctaatttttatttttttctagagatgagggtctcactatgttggccaggcctggtctcaaatgatcctcccaccttagcctcccagagtgctggattataggtgtgaaccacagttcccagccagttttttttttttttaaagtcagtttttgttttgttttaagaaagcactcttacaatttgtcagaaataaagagaaaaacaataattaccagacttggttcacttcccagttgcattcagagttgatgcttggtttcctctgcgatgttctcaccctgcagggtgtctgcactgcggccaggctcctttcaaacttgagctgtgcactgtggggaagagaggttcctaggggtcctgctcaggtgcctggcctgagactctcatcatgcagtccttcctctccccccatgctttgctttgcacatcattcttgtccctccctctggtgaagggttgtgatagagtcaggtcctcagtagagcyggcctcggggagctgttaaaaattttgttctgctgtagctggctggttttgtcaaacttagttttttatctgttctgttggctatgaccctgagcagtgaaaaagggcttggtaatagatgttcttctctaggcctagccagcaattctcaaatatgcaaaagagcaagctggtagtggtctttagaacagcagattgtggtatctttctaaatttttcagacttcagcacactgataaagatgtttgggaagcaaatattaaaaagggaaaatgcttctctgcacaaatatcactgcaggtggtgatagggcacaagttggcttccagtgaagaaattctgcttcttaccaaaagttaacaatagagaatggaaaaccaccactaaattgttttttcagaacaacaaaagttgaggctgtaattgggccagcatatcctatgaaaggcttgtgaacattgatggaaccaaattggagccttgtacactcagtcaaaacacatttatttaggatccaccgtaggtgaggcattatggacatacggacataaacataaaaagatagccaacctttctccatattatcagaggtaccaaagcttgatttataatagcaaacaggagaaacaacctgatatttggaaaaatatacagctgtcaaaattagtgattgtgggcattaaatgtagtaacatggaaaaggtttgaaaactgtgtaccccaagagtgattcctattagaataatacaattgtggtttctggctttgttgcagtaaagcagtggggctcctgaaagaaagagagtctgtgcttctctgtctccttcactagaacagagactcttgaaggccaggacacacttttttcattctttgtcttacatggtcactgggactgaatcggagtctaaagtaatcttgattgcaagaatgcaagtctaatgaaacagcttttgcaagtaacagtggaccaaagggaaaagagagctcttttatcatgtaacaagtcaacattaggagcttaaactttgaacctgaaggatagcaggcagcttatggttcttgtgcagttgtgtgctcctgaagtgcatgcagccagagaacaacattgctgttctctatctttacaaaccatggggatttctccttgtgtttcaggagggcctagtgattttccggggcttgaaagaaaacctttcaataggttataagatgaagattctcataattctcattattttattttcttcttaatcaaaactgtcagctggtgcagcgctcatgtcgataatcccagcactttggaaggccaaggcaggagggttgcttgagtttaggagtttgagaccatcctgggcaacacagacccacatctctacaaaaacattttaaaaattagccaggtgtggtggtgtgcacctgtagtcctagctacttgggaggctgaggtgggaggattgcttgagcctaggagctcaaggttacagtgagctgtgatcacaccactgcactcagcctgggcgacaaagtgagaccctttctcaaaaaataataataattgtcttcctgatgctccaaagtccctttactctaggtcagagaatgtatgtctctaaattataaagtgcagaattcagagaagcatctctctctttttgaaattataattggacacaataaatgcagaaagtaattagggcattttttaaaggtgtgcctttattttaacatgaagttttaagtttagaattgctggtttttaatatgttctcttggtaatttgtcactttacagtaagtttaaaatattctttgtctatttaaaatcgttcttgctggccctattatgtgtgagatcatgcagaatataatttacttttcctttagatgtccatcctgtttttataacctactgaacctgttttgtgagctgacaygtagccctygacagagtcagtttttgaatgttacagctactgaagattaygttgatcctgttacaaaccagacgaaaacaaatgtgaaagagttacaatactacgtcggacagagttttgccaatggtaagtaaacttttaattattcctcttttacagctggcatcaggacagcagagcaaattgttccttttagttgtcctgtcaactctggaaaatcacaattttcagttccattggccaggaaataagagttgttgctttgcttgtatcctaggacttgaactgcaacgaatataaaaatctccttaaagcgcttgctttaactccccctaactttaacttcccacatggaaaattttagtatgtgcaagtttgcatccatacacttcagtaaccattggatctttgactctaacagacatgagttgtgtaatgtcataaattactgcaagactgagaagatagaactgttaatagttggcagagaagaggtcatgacttgcaagaatcagatcaccataaaggaaagtcagcaggtctaacagatagcagaaatgatcccccagcattgaccaacatacaacatttaattataatgacaaagtaaaaaggtaacaaaaaaattccatagaaaaaaggtctcattcacaaaagcaacaaaaaataaggcacttaggaatccaaaagatgtgacatacaaggcaacctgactgaatggagagaggtcattttgtccagaaacagaagcctgcatgtatggaaagtggatgtgtaacacgtgtgtcattacaaatcattgagagaaaaggtgggctagttgataaatgagatgagaaaatagattatatttatctaattttaatttttacagaaaataaaaaaatcaattgtgtagattaaaaatcccaattggaaagttttagaagtaaatatggaaagatttctagacaggagaggaaaagcagaaaccataagaaaaatatttatgaatataaacaactgttatctagagcagacagcgaaatgcaaatttgaacagtaaactaccatttcacacctcatcagcttggcacaaattaaaaagttggtcaatttcaactgtgggtgaaaatgtgaagcaataggaatactaatgtactccaccacttacaaccataatttggtacaatcgtttcaaaactacttgaaaaacaactttgcagtacgtagtaagttgaagctaaccctcctcccagaaatttsacttatagatgcctgccttagagaaactctaaatgcatataaacctggagacccatataagaacacccactgtaacactattgtgattgtgaaaaattgaagacctcaagaacgagaagacaagacacagactgggagaaagtatttgcaaaagacatrttagtaaggactgttattcaaaatatacaaataactcctaaaactcaataagaaagcaaacagcccaattgaaaaatggacaaaacaacctgaacagatacctcaccaaagaaggcatacagtggtaaataagtacatgagaagagatgctcaacattatgtcattagagaattacaaattaaaacaacgagataccactacacatctattagaatggcaaaaattcaagacgctttcaacaccaaatgctggcaatgagctctcattcattgatggtgggagtacaaaacggtacagccaccttggaagataatttagcggtttcttacaaaactaatcatactccttggtatttacccaaatgagttaaaaatgtgtctaccccaaaacctgcacgtggatatttgtagcagctttgtccataagtgccaaaacttgtaagccaccaagatttctctcagtaggtgaatgggtaaataaactgctacatccacacagtggaatattatttggtgctaaaaagccatgaaaattcagtgctatcaagccatgaaagtacatggatgaaccttaaatcctattactaagcaaagccaatctgaaaagactactcactatgattccactatatgacgttctacaaaaggcaaaaccgtggagacagtaaaaagtcagtgattgccatgggttaggagagaggaaggcataagtagagcacagaagatttttaggtggtgaaaatactctatatgatactataatggtggttacatgtttatatgacattttgaaacaaaagtactacatacttaaaacaagtacacaaacatgcatgggaaggataaacatcaaattcaggattgtgtttaccttagggaaggggctactgtcagggaggggtaattggggagcttcaactgaatctatagagtgtgtgtgtgtgtgtaagtatttttttawtttttkgaagagacgggcctcactgtgttggtgaggctggtcttgaactcctggccttaagtgatcctcctgcctyggcctgccaaagtgttgggactgtaggtgtgagccaccacacctggcctatagtgsattattatttttatttagtttttaaattatgccatagccagttgttytgaatagtgcagtactacaaaacagagtcaaggtctcatgctgtcacccaggctggaatacagtgatgcaatcatggctcactgcagcctcaacctcctaggttcaagtagtccccctgggtagttggaaccacaggcatatgctaccacacctagctaattaaaaacaaatttttttttgtagagatagggtcttgcttttttgcccaggctggcctcaaactcctggcctcaggagatcttcccacagtgctgggattacaggtgtgagtcactgcacctggccragtccattatttttttaatgttgaggcaaatgttgtgaaatggtatgactgatagttaactgggtaatgaggaaatgagaattgtattattctccatgtgttttgtatgcttgaaacataaaataaaacctgaaaaccaaatggtgagctggaagatacgagggaattactcagaaaacagcatacagatacaaagacctataaatcattaaagaaatgacatataacatgagaagctccagagagttggggagagacaataataatcaaagggataatgaggattttccagagtggataagggatgaaccctgagaacttagagaaaattcagcatacaaaaatcagttgtatttctgtacacttgcaatggacaatctcaaagtgaaaataaaacaattccatttactttagtatgggaaatacttaggagtaactataacagaaggcaaaacactttaaagaacagccgggtgcagtggctcacacctgtaatccaagcactttggaaggccgaggcaggcagatcacaaggtcaagagattgagatcatcctggccaacatggtgaaaccccatctctactaaaaatataaaaattagctgggcgtggtggcgctcgcttgtaatgccagctacttgggaggctgaggcatgagaatcacttgaacctgggacgcggtggttgcaggagctgaaattgtgccactgcactccagcctggctgacagagcgagactccatctcaaaaaaagaaaaacagaaaaaacacactaaagaacattattcagcgaaattaacgaggatctaaataaatggaaagacattccatgtttatcaatcaaaagacttaatattgtttagatatcagtattctccaaattgttttatagattcagggcaatctctgttataatcccaactgacttctttgtggaaattgacaagctgattctgaaattcacatagaagtttgagggacttagaatagtaaaacaaccctgaaaaaagaacaaaataggaagactcacacttctcagtttcaaaactaagcaatggaaatcaagacagtggtactggaataaagatagacatatagatcaatggaatataactgagaataaataatatatctatggtcaactgatttttgacaagggtgccagggccattcaatgagaaaagaatactcttcatcaaatggtgctgcaataactggatacacacatgcaaaaataaataaataataatgaaattgggccctacttcacaccatatgttaaagaaattaactcaaagtggatcgaagacctaaatgtaagagctaaaaactataaaacaataaaacatagggattaatttgcatggcctcatatttggcacttgattcttaaatatgacaccaaaaacaagagcaataacagaagaaaagattaattggacttcattaaaataaaaaagtttgtatttcagaggacgccatcaagaaaagacaagaaggccgggcacagtgactcacacctgttatcccagcagttcgggtggctgaggcaggaggattgcttgagcccgggagttcaagaccagcctgggtgacaaagtgagaccctgtgtctacaaaaaataattagccaggcatggtggcatgtacctgtggtcccagccacatggttatctgaggcaggaagattgcttgagcctaaggaggctgcactaagtacctcgcactccagcctgggtgacagagtgagactctgtctcaaaaaaaaggacaagaatatatttgcaaattgtatatttgataagggacttgtatctagaatacataaagaactcttggccgggcgctgtggctcatgcctgtaatcccagcactttggggggccaaggcgggtggatcacctgaggtcaggagttcgagaccagcctggccaacatggtgaaaccctgtctctactaaaatagaaaaattagccaggtgtggtgatgtgcgcctgtaatcccagctactcaggaggctgaggcaggagaattgcttcagcctgggaagtggaggttgcagtgagctgagatcacaccattggactccagcctgagggacagagactccatctccaaaaaaaaaaaaaaaaaaaaaactcttactactcaatgatarataaataacccaatttaaaatggcaaaagatctgaatagagtagacatttctctaaggaagatatacaaatgaccaacaagcacatgagagatgctcaatactatgagtcatcagggaaatacaaatcaaaaccacaatgagataccacttcacacccaccaggatggctagaatcaaagtcacataacaagmagtgttgacaaggctgtggaaaataggaacctttattaaaaagaaatccaaaaaccaaaaacagctgggcacagtggctcatgcctataatccagcacttcggacggccaaggcaggtggatcaccttagctcaggagtttgagaccagcctgggcagcatggtgaaactccatctctacaaaaacttagctgggtatggtggtgcacatctgtagtcccagctacttgagaggctgaagtgggaggatcacttgagcctgaggggcagaggttgccagtgagctgagatcacaccactgcactccaatctgtgtgacagagtgagaccccactttggaaaacagtttggcagttcctgaaacaaacatagaactaccatatgacccatcagttccactcacaagacgaaagtataggtcaacacaaaaacttatacacaaatgcttctagcagcattactgataatagccaaactgtggaaacaactcagatatttatcacctgatatatggataaacaaaacatatgtccttgcaatgaaatgttgttcggccrtaaaaagaaatgaagtattgatacatgccacaatatgcatgaaccttgagaacattatgctaaatgaaagaagccggtcatgaaagaccacatattatatgattggatttatgtgaactgtctgaaatagtcagataaatagagacagttcagtggttgcttagggcttagggaagtagggaggtagttgwgcatagctagaatacaggatttcttttgaggtgatgaaaatgttataaaattgactatggtgatagttgcatatatctatgaatatgctaaactccattaaattatatagtttaagggggtaaattgtaaattacatgtaattatattgtaaattatatagcgccaccacacctggctaatttttttttatttttttattttttgtagagacggggttttgccatattgcccaggctggtctggacctcctgagctcwggcagtccacccaccagggcctcccaaattactgggattaaaggtgtgcataaccacccctggcccaaagacaaatatcttaaaagcaaatagagacaagacacaaatcaccttaagacaatgataattggagattttcttaccagccatgatagagcctggaaggcaatggaataatctgttgagaattctgagggagatgactgtcaccctagttaacctgtctttccagaacaagggtaaaacaaaatgaatgtgtaagcatctccttgaagattagggaaagaagatcctgsgaagtttctagcaagcagagactggtaaatgagaatcgacagtacaggacccattccagctattttcttaggtgtaatacactgatactatccttatrtaatgtgttgtgtgtatgtgtaagaaaataaaatccaaaaagataacagtattaggggttttttttgttttttttttttgtttttttgtgatggagtcttgctctgtcacccacgctggagtgcagtggcgcaatcttggctcacttcaagctctgcctcccgggttcatgccattctcccgcctcagcctcccgagtagctgggactacaggcgtccgccaccacgcccggctaattttttgtattttcagtagagatggggtttcactgtgttagccaggttggtctccatctcctgacctggtggtccgcccacctcggcctcccagagtgctggaattacaggtgtgagccaccgtgcccggccaacagtattaggtttattgacacgtgacctctgctctaaaaccagttttccaagtaagttccataattctctggctgtgtagcttcctgcggcagaggttttctggaaccagctttgttaactgaagaagtactgaggctcttagctgcgtcttcctgggccttggtatactcttctatatagtggggatttgacttctccaagctgttgtgagagctatgagataacgtgtgcctttccctttcctgtctgttttttacttttaagttacttggaatcgggcctccatattatttgcagggtgataagccaatttaaagggaatctctgttcgtgcccttagttagtgtttgctgtccagcattccagcatggtgcatatggagttcgtgtttcccttcaagaggccttttgtaagatcttgcctcgtgaattacagcaagcatcttgtctcctttttcctttgggtttcctcttctagcaatgtacaatgcctgccgggatgtggaggccccctcaagtaatgacaaggccctgggactcctgkrtgggaaggacgctgacgcctgtaatgccaccaactggattgaatacatgttcaataaggacaatggacaggcaccttttaccatcactcctgtgttttmaggtaggtataaagattccaagtttggtgtgtttatgatattgttttaaagccaaggaactggctgggcacagtggctcaccagtgcttggggagactgaggcaagagaattgcttaagaccaggagttccagaccagcctgggcaatgtagtgaggccccatctctatgaaagaattaaacattagccaggtgtggtggcatgcatctgtagtcccagctacttgggaggctgaggcaggaggattgcgtgggtccaggagttcaaggctgcagtgagttacgatcatcccattgtactccaaccttggtgagggcaaagccctgtctctccatgaatgaatgaatgaatcttagttgaggaagcataatctacaataggaagataaacacattcaggtaactagttcatagtttctcccagtaagagaggtaactggtacatttatcctgctgtggctaatttagggggtgctgggagtgggaatggaggagsaaatgaattgccttcaggcattgctgtcataattgaaagaataagcagttaaaaagggggtgggaggcagcttttctagagctctgctatagtattagctcctgagaatggagatgggacatgattgaagggttgccttggtatgtggtgtacttggaggattcctctatcagtgacaaacccctacgcgcaagtttattgaggtaacttaaaattccataggacgaagcagcaaaacataatttaattaaactaaaacctccaattctttttcttctttcagttgttttatgtatttcagtgggcttttctttgagtttaagtataatacaaaattttggatgtttttaattgagatttgtactcaacacaattcctttctgtagattttccagtccrtgggatggagcccatgaacaatgccaccaaaggctgtgacgagtctgkggatgaggtcacagcaycatgtagctgccaasactgctctattgtctgtggccccaagccccagcccccacctcctcctgctccctggacgatccttggcttggacgccatgtatgtcatcakgtggatcacctacatggcgtttttgcttgtgttttttggagcattttttgcagtgtggtgctacaggtaagcagttttgtttgtcatccagggcaaaaagagsaaaattgcccactggcactttgagctttcatttgtcagagcttggttacttaggacaagaaacaaatacctccatgaataccattgcatggattattgtgtcctacagctattctatagtaaaccatcaaagttctgtttaacactgcaacatctgaaatgaattttactgatttattcaaaatgatgtgtgatttaaagcactgtgcattagccactgattctttttttttttggagactgagtctcactcttgtcgcccaggctgaagtgcagtggtgtgatctcagctcactgcaacctccacctcccaggtttaagcaattcccctgcatcagcctcctgagtagctgggattacaggcatccgccaccatgcctgcatgcctgactaatttttgtatttttagtagagacggggtttcaccgtgttggccaggctgatctccaactcctgacctcaggtgatctgmccgccttggcctcccagagtgctgggattacaggagtaagccaccgtgcccagccggccactcattctttagaaagtcagagtcaaggccaggctcagtggctcacacctgtaatcccagcactttaggaggccaaggcaggagaatcatgaggtcaggagtccattgcaaacagccctggcgacagtgcgagactgtgtctcaccaaaaaaaaaaaaaaaaaaaaaaaagtcagagtcaaatgagcgaaatcagattcaaatctaattaaatggagtactatagtccttttagatatttgcatcttaatttaggacagtactttttttactttttattttgaaataattgtagacttaaccaaaaagttgcaaaatggtagaatttatgtgtatccttaacccagtttccccgatgatacaacttacataactcatagtacatctagaactagaaataccatttgacccakccatcccattactgggtatatacccaaaggattataaatcatgctgctataaagacacatgcacacgtatgtttatagcggcactattcacaatagyaaagacttggaaccaacctaaatgtccaacaacgatagactggattaagaaaatgtggcacatacacaccatggaatactctgcagccataaaaaatgatgagttcatgtcctttgtagggacttggatgaaactggaaaccatcattctcagcaaaatatcgcaaggacaaaaaaccaaacaccgcatgttctcactcataggtgggaattgaacaatgagaacacatggacacaggaaggggaacgtcacrcaccggggactgttgtggggtgggggcctgggggagggatagcattaggagatatacctaatgctaaatgacgagttaatgggtacaacacatcaacatggcacacgtacacatacgtaacaaacctgcacgttgtgcacatgcaccctaaaacttaaagtataataataattaaaaaaaaaactcatagtacaatgatcaaaaccacgaccatgccattattattacattattattagctaaaccagagatcttaatcagatttcaccagctttttctctaatgcccttccctgtttcaaggycccatattacatttttgtgttttatgagtcccctctaatctgtgacagaaagttcctcagtctttccttttctggccttaacactcttgatgatactggtcaggtattttgtagcatgtccttccatttggctttatctggtattttctcatgatgagattgaaataaggtgttttgacaagtacatcacagaagycatgttatgtctttctcggtgcatcatgtcagggatccctgatgttgatgcgtctctttcctggtgatgttaaccttgatcacttgctcaaggtgatgtctgctggctatctccactgtgaagttactgcttttcccttcgtaattgataaatatcttgggggaagatgctttgagactatactaatattttgttcctcctgaaactcaaccactgattttagcattcattgttgggtcttgtctgcaacmgttataactaaggtgtttgcctgatagtgattttyttctctttccctctcttcctctgcatttactaacyggacttctgtacagaaagctatcccttctccctcatttatttactcagttatttacatcatggacttttaattctgtgggttgtatccaacactgtcatttatcttgttactcaaagttttccactttgggccattgggagtgccttctggctggcttctgtgttcttacatacacctcccatccccagctttatcttacatattccctgtccctgccctgcaaggagctctggttccttttattggagaatggtatgtagaaacgaagatctgggcactaggtaygctcattgctgctggaaagagtagcatgtttttgtttgtttgtttgtttttttgagatggagtcttgctctgtcaccaggctggaatgcagtggcgcgatctcagctcactgcaaccaccgcctccctggttcaagcagttctcctgcctcagcctcccaaggcacgtgccaccacacccagctaacctttttgtatttttagtagagacagggtttcaccatgttggccaggttggtctcgatctcttgacctcgtgatcccgcccaccttggcctcccaaagtgctgggtttacaggcgtgagccaccgcgccyagcccagtagtgtgtttttaaaggacctaaaagttttaaataaaatgagggccacaaggtgaaattatcctttattaattgttctcttaacatcttcttaaattttctcctgagactggtgagcagagggacccagagcaaggggacttaggggaaagaaggcagtaattagggaggaggaggccaggaggaggaagaaagcatttcatgggattacaggaatgtcccaaaaacaacctcactgtgatgaagtccactaatgctatttcttcacttctgtttttcagaaaacggtattttgtctccgagtacactcccatcgatagcaatatagctttttctgttaatgcaagtgacaaaggtaggcatatttgtccatgaataaaagggttcagatgatgctgtctgtcatgagagcattcgtttcctcagtggggttgcagcagtgggtgaggtggtgtgccagtgccgaggacacggctgcgaccaaggcagacatggtccttgcctttgtggcccyaccatctagtcagggtggcacagcagaaccaagtaattaatcatagctggggaggcgcgaaagcagcaggacaagagtgggaatagcagggcagggttgaacctcacccttcagaggctcctgtgtcggcatctcctctgtggggtgggaatagcgctcattgagggcagccaacaaaggtggcttygctgagcagataggtagctgagggcaggggtctcatatgtgtccccaggtgggcttgattcctgccatgagatagcaactaatgctttccctgttcygactttcaggaacggcttggctcttaacctccaccttcccttcctctcccgttcttccaggagaggcgtcytgctgtgaccctgtcagcgcagcatttgagggctgcttgaggcggctgttcacacgctgggggtctttctgcgtccgaaaccctggctgtgtcattttcttctcrctggtcttcattactgcgtgttcgtcaggcctggtgtttgtccgggtcacaaccaatccagytgacctctggtcagcccccagcagccaggctcgcctggaaaaagagtactttgaccagcactttgggcctttcttccrgacggagcagctcatcatccgggcccctctcactgacaaacacatttaccagccatacccttcgggagctgatgtaccctttggacctycgcttgacatacagatactgcaccaggtaacctgctgtttgaagaaataagtcactctagatgaccttgtggtttgctggcttttacatgttkactactgctagatggggatttggggctgaatgtcatggtatatcttgaaaatcttagcgtataatggcaaagctgcctttaagttaggtttcaagaaagtgaatgatgttgaacttaatggaatatttattgttgctcacttttgtatttacttcagatagtagaccttgcctttttcttgaaattgagatgagcagagaaagaagacttcagtggcgtttctctattgaggcaggatatatttattaggaagtcaccttaggaatttgtgaaatgttttctgttggtaactgaaagtaatatgcaaggacccagaggcatgaagcccttactgctgtcctgggggctgaggaaggagctgccagattaccatccctgatccaacctgtaggaatgaacttatcactcactgcctgaacatgggcacccagcctgtttttggtgagaggcgcatttggggcaagatccatcccattgctcctagaaaggcatgtaaaccttcccattgtccctgtcacacttgccttggagaactgtacctgtgcataaactgtaccggcttcttttttaatgaatgtataatcacatggtttttcctttaaacattgctcatgtctacaagaaagtctgcaatcttgaaaagcattaaaatggtcccaagacttgaatcttttctctacccagtgactgtctgttgctttttccagcttgttgctgaaggtgaacagcatagtcatttacctccaagatcatcttctctgttaggaaataaggggacatatataaatggctgtagtgcagagcaaggcaggaggttatgtgttactattgagaggagggtcagggagaccaggagtccccctccactctcccctctggcctgctggccaccactggagaacggtggaggggagatggttgtgtgtcctatgttgatagctgttctggtcatggtgttccccctacccctcgccgcctctgtggacgcctctaactagtttgctgttagagtgggcctgtggcctgaccagttttcttactgtattgcatcttaattctctccctcatcttaggaagtattttccccaaatactctttgtcttctgaccctcagggcaatgctgattaatcaagatctgagagaaatgtgacgtgtttctgggtttgcttatttttaaaatcttctttcaggttcttgacttacaaatagccatcgaaaacattactgcctcttatgacaatgagactgtgacacttcaagacatctgcttggcccctcttycaccgtataacacgaactgcaccattttgagtgtgttaaattacttccagaacagccattccgtgctggaccacaagaaaggggacgacttctttgtgtatgccgattaccacacgcrctttctgtactgcgtayggtaagtggcaagagacaatcattggtagacaccattcttgggtctgacttagggtacatgggcaaaagcttgttttatgagcataacccagaggtgagcaaacaacaagaccttgccctgtgaagtttacatcatctttttttttttttttgagacagggtctcgctctgtcgcccaggctggagtgcagtggcgcaatcttggctcactgtaacctccggctcccaagttcaagcgattctcatacctcagcctcctgagtagctaggactacaggtgtgtgccaccacgcccagctaatttttgtattttcagtagagatggggtttcgccatgttggccaggctggtctcaatctcctgacctcaggcgatccgcccacctcggcctcccaaagtgctgggattacaggcgtgagcttccatgcccagctggaagcttacatcttaatggagggagacggttgatgaacacataacatrtgctatcgtgccagctagagattagtgctatgaggagaaaaataaggctggacagagtggggggtgcattgcttaagcgtgragatgtgcacaaagggagaggaaaggacagctgggcacatcacagggatgagagttcccggcagaaccagcagcaagtgcagagccctggcaggaagctctcgtggtgtgtgattgaggagtgcagctgcctctcaccctttacctcgtgcctgggtcgctaacacagtgtcatgtatcacaccccccacaagatttaaagatagaagagcctttggtgycttttgttctgtctcagatatatagcccagtcccctgtagtgccccagctatttgggaggcagcctccctctgaggagttgaggcagtataggtctgcagctccgcagctttagattggagggccctgcagctgcttcccttaggaggcatgtctagctgggcagggtgcgtttataattgggaatagtcaccccaggaagcggtgctttggtgacctgtaggggaatcttaaggcttctcccagtaggggaagagtagcatgatgccggatgggcctactctccctgaatgctagggacctggcctagggacatttgttcagccagttgagcaaccacagtggctatttcttcagcatgggaacagagaaattattcctttttgccyttaaggacactgctcagccgactacttctcaagagctaaggactctcacttctggttctaaagaactttgaccttgagttctgtttgtttgttactggagtaagactttttatgcagttgggctatatttactctgtttcaagaatatcacccctaaaaacatgagttatactcatgaaaacacaatagcttatgctccataccctaaaccggcattctccacagggtagacggtgcagacgagccatgggtaatttgaagaaacaaaaaacatttaatgttacataatttttataattggacaaccatttaatgttacataaattttatagtttactctctgtggcacaagataaaagtcaacaaaaatgatgggggacagaggtgcgtgagccttgtgtttcctcaaagcggacgtggttcccaccagtgtggaagcggtacagggagtggcaggctcctggyggcagggacctgaattggtttgtagttatgcttgtgcgcgtcctcataaccccagtctcgccctagcgctgtcccctttcctctccctccagcttttcctggactttttcacctgagggtcctgcagtaatggcaggtggcctgcccagaaccatgcccttacctgctkcttctccccattttgtttaaaggcagtgacagctaccagttactcaggcttgaggctttatccctgaattctgcctcgccctcgccttcctcatggggttcttacgggtctgagcctctggatgctctctcagatttctgctgtggatgaagggactcagctgctcgctgcaggtcacctgacctccctcatgccgtcacccatccactctgacgggtgggtcatatgcagaagcttctcagcacctggccaagttgtagctgatggtctgtccgaaaatgctggttcactctccactggccaactgtctgtctgcactgcactgccagttgcctcttgcctgsgccattgcgctaacatctccacttactgttccacctgcttcctgtttctttgccgtttccagaccttccactttgccacgcaagctatctttgtaaaacagctcatgacatttctttcccggaaatctctaattgttccccagtgcctccagaataaaaatccaaactacttaactggcactgagtccttttattttgcatttgtctgtccattactcttcccagactggccccctccttcaggagcccccttggtgggcaccccatgctctaggacaggacatcttttcyttgaattattattattttttttttagagatgggatcttgctatgttgtccaggctggactcaaactcctgggttatagccatccttctgcctcagcttcctgagtacttgagattaggygtgccaccataccyggcatacaggacttgccaaaccaccatcttgctctcattccctctcactgttctctctccctccctttttcctcccacagttgtaattgtgtgagacacccttttgtcctccctctttggtgaaatccccctcatcctcggagctctgggtctgtacagtctcttcctcttggctataattttgccttttagtgtttgctccctcctctgtgcctgcrtagcgccatgcaccatgtgccattgatggcactgggctgtatttgcctgcctcttgcccagtgattctgagctcccaaaggtgagtgctgagctgtattactcaactgagaaacctcagggcccatgttgtccttagaatacagccagcctcatcaaatgttcactgtgtaaatgtttaggtccctgatgtcttgaggcccttctaactgggaggtgttttctaaactttttggcagggctcctgcctctctgaatgatacaagtttgctccatgacccttgtctgggtacgtttggtggaccagtgttcccgtggcttgtgttgggaggctatgatggtaagtaagagaagctttgacttttccttttagataaagtcatctcggttttgtcatyagcatcaagtggtaattatgaagatttcataaattgggcagttttgttaatttcttacctcttgaatcccagaatagtatctcctttggctttgggtttgggtttcattccagatttaaaagaagtggattgggttagccatttttaggtcacacatgcctttgagaagctgtcgaaggctaagtacctttccccagaataatgcaattgcaaacctctgcattgttgttcagcttgaaggtcatgggcctccgaagttcatttatagaccctctagggagctcatggacctcaggtaagagcctctgtgatagagaaaagatagtatgtgaggtatgtggaaaaagaaacaaagttgatggattttttttcttctaagccagtcagttgagtatttggacactcttacagtgtgaagagcagctggtttgctctttcctggttcctgtagcactttagaaccaattgtacttgacaaaatgaggtgattattcatgtgacacctttggcatcttaagccaaattacaggctcaacaggttttgcccaaccagttaagaatccagataggttttcttctcctcacttggtggcaggggagaagttgcaatctgtatttaaaatttactgtgcatcagagaggaaaatgccatttctaattgttggagaagggatggtgtcagcaactgactagccataggggaaacaattgactttgatctctgacttgttcatttcaccaaaataaattccagatggataaaagattgaaatgtaagaactgggccaggcgtggtggctcacgcctgtaatcccagcactttcggaggccgaggcgggtggatcacaaggtcaggagatcgagaccatcctggctaacacagtgaaaccctatctctactaaaaatattctttaaaaaattagctgggtgtggtggcaggtgcctgtggtcccagctactcgggaggctgaggcaggagagtggtgtgaacccgggaggcagagcttgcagtgagccaagatcaagtcactgcactccagcctgggcgacagagtgagactccatctcaaaaaaaaaaaagaaatgtaagaactggaagaaaattcaggaggcatttttaaaaataatttttaagtggaaaagatatttctaagcaagacacaaaactcagaagcccgaaaaggaaagactgatgaagttgagtacatgttcatttgtggagaacaaacatacagttaaaaaaacaaaactgggccgagagttattcatgcctgtaatcccagcaatttgggaggcagaggcgagcacatyacttgagctaggagtttgagaccagcctgagcaacatggagaaaccccgtctctgcaaaaaatacaaaaattagctgggcatggtggtgcatgcttgtagtcccagctactcgggaggctgaggtgggaggatcacttgagcccaggaggttgaggctgcagtaagcgagattgcaccacattccagcctgggtgacagagcgagaccttgccagaaaaaaaaaaaaactggacaaaaatattagtatgcatggcagtcagcattttcttaataaataaagatctcatctcagcctggccaaaatgtgaaaccctgtctctactgaaaatacaaaaaawattagccacacgtggtggtgtgtgcctgtagtcccagctactcgggagactgaggcaggagaatcacttgaatcctggaggtggagtttgcagtgagccaagatcattccattgcactccagcctgggcgacaagagcaagactccgtcttaaaaaaaaaaaaaaaaagttgtgaaaaaaagatcaacaacctgaaagaaaagtgggtgaggtcatgtgaaagataacaaaagaagaaatacaaaaaaaaaaggtttttattttatttttcagagacagagtcttgctctgttgtccaggctggagtgcggtggtgtgatctcggctcactgcaacccctgcctcccaggttcgagcaattcttctgcctccacctcctgagtagctgggattacaggcatgtatcaccaggcccagctaatttcttgtatttttagtagagacacggttttgccttgttgcccagactggtcttgaactcctgacctaaggtgatccacccaccttggcctcccaaagtgctgggatcataggcatgagccaccacgcccagcctcagtaaatattttcttgactaaagtaatgaaaagggaggccaaggcaggaggattgcttgagcctgagaagtcaaggcttcagtaaaccatgattgtgccactgcactccagccagggcaacagagtgagatcctgtctctaaaaaagaagaaaaaaaggaatgaaaaatagttaagcttctttggaaggcagtttgggagaatttatcaaaattggaaatatacatagtttttgattcattgattatgctttaagaattgattctagccaggtgcagtggctcatgcctataatcccagcactttgggagggcaaagcaggaggattgcttgagcccagtagttcaagtccagcctgggcaacatgacaaaatcccatctctacataaatacaaaaattagccagcaatggtggtgcacacctttagtcccagctactgggaggctgaggcaggaggattaattgagttcgggtggtcaaggccacaaaaagccgcgattgcaccactgtacttcagcctgggcaacagaacaagacactgtccccctgtcaggcccccaccccaaaaaaagaaaaaagatttatttctacaagtatgtgttttacacattaaaatatttataggctatttatagtaactttgtaatagaaaaaattgcaaaactactcatcagttgggggggattggctaaagtataccagaaaatactgtaggaaaagaataaggaaactctttatggagcagtctccaagatacaaaattttaaaatgtaatgtgcagaatagtattttactgtttgtgtggttaagagggaaaggggaagaatctgtgtgtttgcttgtgtgtgtgyggagtggctctggaaagattcgcagatggtcacagtatggggaggagaactaagacaatgaaacagatgttggagaaggagagaattttcgataaacacttttctgttctgtttgaaattgttaacatgcatgtactgtatcctttaaaaaaaaaaaaaaaaagagttactcttcctgaatgataaccatgcctacctcagataaaaaatcctttttattcattaactgaagtacataaagactatttcagcaaactcttgtttaattcttagagcccagagatacagtccatagctccagtgagaaatctgtgttgtgatttttcccctggtatgtgtctaattttctgcatgcttgtaatctgctttttgatgtcacatttttcctttctagatcaaaactacaataacgccactgcccttgtgattaccttccctgtcaataattactataatgatacagagaagctccagagggcccaggcctgggaaaaagagtgagtcactcatgggtgtgagcagactgtccttgcattgtgggaagctagacacttgcrgcaagcacttaaacttcattttctaaattaaccaatggcagatctgagttacgtagttttgttcacttggtactaatgatgctaagaagaaactgtaaacacatttacctttgagcaggtgctttaaacagctctccctccacaggaatgcaaaagtgtgcaaaaaaaggttccttgcattgtttttacttatttcatttattttttgagactgggttcacttttgcccaggctggggtgcagtgactgaatctcagctcactgcagcctcaacctcctaggctcaagtgatcctcccacctcagcctcctgagtagctgagactacacgtgcatgccatcacacccagctaatttttgtatttgtttgtagaaacagggttttgccatggtgcccaggctggtcttgacctactaacctcaggtgattcaccctcctcggcctcccaaagtgccgggattacaggtgtgagccactgcacccagccacctgcattgttttctaacagcaaaacttgggagcatgctgaatgtatttaataaggaatgaatacaatagaatattgtgctgtcataaaagacagtgaagtaaatggtccatgatgtatatttgtataaatatatattgtttatgctgctgtccatgcttagaaaaaaatatcaagcaaatgacctcagaaattaactgtgtttgtgacctctagagaatgggaagagaggacttaggaggccaggttgcactttatgccctccagtacttttaaaaaattgttttactgagatatggtatatgtatcatgcagttcacccacttaaagtatacagttcaggctgggaatggtggttcacacttgtagtcccagcactttgggaggcccagacgagaggctcacttgaggccgggagttcaagaccagcctaggcaatgtttgcatgtctctaaaaaaaagaaaaaagaraatttaaaaagaaaaaaaagcgtacaattcagtagctttactatattcacgtgtatgtgcagccatcaccacagtcaattttaggaacattttcattactccacaataaaactctgtaccctttaactaacaccctccatcttttcatcctcctatccacagccctaggcaaccactaaaatactgtctctggagattttcctattctggacttttatgtgcatagaataatatgtggacttttttgtctggctatcattgaacataatattctcaaggttcattcatgttgtggcatgtatcagtactccattccttttcattccattgtatggatataccacattgtgtgcatttatcaactgacaaacacttgggctgtttccattttggctattatgaataatgctgctatgaacacttgagtacaagttcttgtggatgtgagttttcatttcttttgggtacatacctagtagtagaattgctgagtcatagggtaagtccaccttgaatagtttgaagaactgccagactgttttccaaagtggctatagcgctttacgtcaccaccagcagtccatgaaacttccaattcgttcgcatcctcgtcagcactttttattatctgactttgtgattctagctatcttcatgggtgtgaagtggtatctcattgtggttttgatttagtagactgaatgcatttcttttttttttttttttttttttttttttgagacagagtcttgctgtgtcatccaggctggagtgcagtggcatgatctcagctcgctgcagcctctgccttccaggttcaagtgattctcgtgcctcagcctcccaagtagctgggattacaggcacctkccaccacgcctggctaatttttgtatttttagtagagacgggctttcaccatgttggccaggctagtctcgaactcttgacctcaggtgatctgccagcctcagcctcccaaagtgctggaattacaggcataagccaytgagcccagccctaaacttactttaattcagcatgtatggaaccttagctgtaatctgatagtctccagtgtggaagaccctaatgcagtggctgggcatggtgcctgtcatcccagcacttagggatgtggaggcaggaggaatgccttgaggccaggagtttgagaccagcttgcacaacatggcaaagaccccatctctacaaaaaatttttaaaattagccaggcatggggatacgtctctgtagtaccagctactcaagaggctaaggcaggaggatcccttaagctgaggagttcgaggctgcagtgagctgtaatagtgccactgtactccagccgaggcaacagagagagactctatttcaaaacaggaacaaaagcaaacaaaggatcctaatgcaggataaaggttaagaaaacatggcctttgagccgggcacagtggctcacgcctgtaatcccagcgctttggggaggctgaggcaggtggatcacttgaggtcaggagtttgagactagcctggccaacatggtgaaaccctgtctctactaaaaataccaaaattagccgggcctggtggcgcacgcctggagtcccagctactcaggaggctggggcaggagaagcactcaaacccgggaggtggagcttggagtgagctgagattgcgccattgcacttcagcctgggcgacagagcgagaatcagtctcaaaaccaaaaaaaagaaaacgtggcctttgtatcgtgaaagttagggagaagtttcttacttagctgtcagttagtttaactaaaaatataacattttgcttaccttttaggtttattaattttgtgaaaaactacaagaatcccaatctgaccatttccttcactgytgaaygaagtattgaagatgaactaaatcgtgaaagtgacagtgatgtcttcaccgttgtaattagctatgccatcakgtttctatatatttccctagccttggggcacatsaaaagctgtcgcaggcttctggtaagccggggggggggtggtgtatgttctagaggttaacagcagtgcacagtgtaacgtcatatttttgcctctttattcttattccatyatgtttaaaactgccataaattcccccatgttktaattgtatgtaacgtttctgttgcctacatctattttcttcattccaactttttgktttatcttaaagtttatttcacataatccagttttttcttatttgtccagtccatcacctaagaatgcaaactcataacatgtgttgccsgagcagacctagaaatgtttacaagtcctctctgaaacacagaattgtacattcaactctaggtttaatacagccctgtaaagtaaaaaggaggaccttttagtaacaagtgggacagacaaccctgtaactaattggtgattgtgtctgtcgcctctctcaggtggattcgaaggtctcactaggcatcgcgggcatcttgatcgtgctgagctcggtggcttgstccttgggtgtcttcagctacattgggttgcccttgaccctcattgtgattgaagtcatcccgttcctggtgctggctgttggagtggacaacatctycattctggtgcaggcctaccaggtatacttccatattctcacagggctcagcatctgttcaagtttcagggactgtgaatggctcctgggctccgcattcgtgagtgtgacctgtgagggtgttttgtttcctttccctgtgtggctcatcggtcgtcttgacttgctgtggacatcttaggaccaagaatttcacccctctttttggttgttgaaatagtagatataaagtaagaattgtgttttaaattgtatctttaaatagtgtcttttaatagtatcttttcattttaaatagtatcatgtgtacaagaagggctaacacacttttggaaaagattttgggtacgactgctgttaaaatgatgttcagcatagtatagaatgttagattcattttgcccaaaggtgccactaaaaaggcaaaaggtcaacacgtgtcccgctgctgtagaaggtggtctcagtcgtcctgtagacccgacgtgggyggagactcagtgcacgtgagagtgatgttcactggtccagtcccctgccgcctgtgttccgagtgttttcctgataatgtggctggctcagctttccctttagtttctcacttggtacctagctctgtagtgcagaaatactctgagaacattggagtcccccaccgaagtttatatgcttagaagacactgctaatcgtctactaatcatttatttttacccttgagttaacacaaggcagcaagaaatggcgttgttattgagaaattttaatgtcgcataatttttttttttttttttaagagagatgaacgtcttcaaggggaaaccctggatcagcagcygggcagggtcctaggagaagtggctcccagtatgttcctgtcatccttttctgagactgtagcatttttyttaggtaattatgctttcaatcctaccagtcctgtagtctgctgagcctggagaaagaaggagctggctacctgaacatgtccctttgtgttgcttcctttttttttttttcttttttttttttttctctgagacggagtctcactctgccacccaggctggagtgcagtggtgcaatctcggctcactgcagcctccgcctcccgggttcaagcgattttcctgcctcagcctcccaaatagctgggattaaaggcacgtaccaccatgcccagttaattttttgcatttttaatagagatggggtttcaccatgttggccaggctggtctcgaactcctgacctcaggtgatgtacctgcctcggcctcccaaagtgctgagattacaggcgtgagcccccgtgcccagcccgtgttgtctcctttttttaagctttgttctgcactgggaaagtatcactggaccacagaaaaattggcagcagtaacttaggtgtgattttgcaagtggcttccttctcatttaactgtcaggacagcattgatgttggggttcagggtgaaagagacctagagttcgtcttgccactttccccttttagtagccactgggaatgttgatagttgaaaatggcatccttgagtagccactgaatccttctccacatgacactctaagcagcagctcccaaatccacaggcactcgcttacaaratgtttgccgttgttttcaaaggcagtctttctcttctgtgcacacaactcattggggaagcagccttgttaatgaccagaagctcttgactcaccacattacaaggagccagaataagctggaacaaagtcagcacttctgtgtttctttcacatagagaatcatcaaatagacccactagtggggckgtctgccccatgtctgaagtgtagtaagagcaaagtgactctgtccactataggggaggctggactggaatcactcagtccaaagaagaccatccacgggccacaaactgcaatgcctacatggctgggaggtcagcttaatcagggccattgtaaggtcattgtaggtggtagtctttcaccacagatacactgctagcttgttattcttcatctccacaaagccatgtgcttttgaaacctgtagccctgtagttccttttgacaaacacaggtgcagaaaaaaaaaaaaaaaagaaaaaactttctttttttcactactattataagaaaaccagtgcaagtgtgatgataatagcagcagagactgtgcctcaaggttggagtgaccttgggacagtaggagtgagtagggattgtggcaccccaactgcacgtgtcctatctaaaaagacagttatgtgtgtggccaacccagtgctacaaggtctgtgttgttgttgttgtttttcttccaagcaaagctgtgaatctagatttttgtgtaaaatgccattgttaaatattggcaacttataaaaaaaagttttttaatcttaagatgggttgatacagtgtgggctaaacaggaaccatctgattcatgggctgccagtttgcagtttccaagtcttaccctcatgcctttgatcctcactcgattgtagattacctcttaactaaactgggaggctagtagtgttgatgtaataaatggaaaatactgtccatttcttacagtgaagcacagaaagtactataagaaatggcctgtattagtggttctcaaattttaatgtgtgtgaatttgctgtgaacctgagtatagtagaattggggttgaattcctgtcataactaggatggggcttcccaaatggtctggtgctgagtgtgctttgaaaagcactggcttatcacctcctgtcccacttctggtgtaatgtccagccgcagcatgccttctcatgcgtttggcctgtgctggctccttgtatctgtacatgcacatgaacataagacctgcagagagcccccggctgtaaacagaagtgacgcagagcccttctctccccgacaggagcattgtccgtgatgccagccgtgcacaccttctctctctttgcgggattggcagtcttcattgactttcttctgcmgattacctgtttcgtgagtctcttggggttagacattaaacgtcaagaggtaagttggtgccaggattatagtctatttaatttgagtctagaatctagaggaagcagctagcgggtataacctttgtttccctctgtcccctcagaaaaatcggctagacatcttttgctgtgtcagaggtgctgaagatggaacaagcgtccaggcctsagagagctgtttgtttcgcttcttcaaaaactcctrttctccacttctgctaaaggactggatgagaccaattgtggtatgcgcttatctgtggtttttctctttcctctcactgaaacagattatcacatgccttctaagaagccagacagcctgggaaggagattcttaaagctgttaaaatgtatctaaaaaaaaagcaaaagcaaatgtggaacagtagataaaatgtttttccygtgagcttttatcagtccatataaacaagagttttmagttttttattttgaaatagtttcagattcacagaaagttgcaaagaaacttttatttttcctcttaataatgaggaaatagaagccaagagaggtgaagtggtttgccccaagtcactcagcccgtaagtggcagagtcaggatttgcacccaggaatttggactcctggtgctgtggtctcacccactgccctgtactccctattagcctgtcatttaagcttttccattttaaaaaatcctgctttttgtgtgtgcttaagattttatttctggtcgtaagcttatttactaagcagtctctgtcttatgattcatttgttgttccagatagcaatatttgtgggtgttctgtcattcagcatcgcagtcctgaacaaagtagatrttggattggatcagtctctttcgatgccagatgtaagatgacttccttttttttttttttttaacttctttagctgatgatgaatacatttttcaaaacatgcacgtaggtgtttcaagcaagtgcctgcttctaactgcaaatggtgacagggtttccagggttaggagaactgtcgcagtgcactgctggtgtgggctgtctggcattctgactgagcccctctgggcacagctgcagaacacgaataactagtcttatgaggttactttatgagatgctctcctgaytgtgggkctagcaggaggagcaccctggggccctggggggaagactggtggtgttaggaatcatgagtccagctggaggcatctcagccaggaacctcctggcaccctcttattctccrtgatcctcgccttgcttagttactatcagagtgttcacactctctcctattcttttatctttctttcaggactcctacatggtggwttatttcaaatccatcagtcagtacctgcatgcgggtccrcctrtgtactttgtcctggaggaagggcacgactacacttcttccaaggggcagaacatggtgtgcggcrgcatgggctgcaacaatgattccctggtgcagcagatatttaacgcggcgcmgctggacaaytagtcagtaccaccttgtctygtacttcagaagcagcggaggaggctctcagccaggcagtcagctcaggcctgaaatgtctcactgaaaatagactttcttggaaaagttgtttttatgcaaaatgtatgttaaatctggctttaccttaaaaaacctttgaaaggactaatttaccacctaatactttgaaggcttttttcattaagtgctcatgtagtttttcttttgactgttagcagtataaaacgtagaaaaggaagttaggttttaagaaaaagtactgaaactaaagacttcctccctgtggagcaggtcagtaaccctgtctgtcctctctagtacccraataggcttcgccccctcgtcctggatcgacgattatttcractggrtgaagccacagtygtcttrctgtcgagtggacartatcactgaccagttctgcaatgcttcaggtaccttctcctttaccaaatctttccygttttgctgaaaaattttcaaattatcatttaaaaatcatttgcatcgtgcctcagtttatacctatttgtatatcaaagctgggtctccctgtgtcatcattcctttcctcagtcattcattctgaaattgtcatgttgttcctggctcagacagccaccctcggggctgcaagctgaacaaggtccacatgttcggagtgtggtttccacataaggtttctcatcctgttctaactccagcgattgcctctcaggattggtatctggccttagcttctcagaggagggcttttctttatcactttaccytgtggttttgtaggagcgtcgaggttgccctggaattttcttaataaaaacatagaagccccgggctctgaccagtcaaggccatacttgaaggaggagatctacttcagggcagaaaatgatgcatagtatgcctaagatgaaaatggtatttcagattcattaaactgtgaaagtgacatgtggctgaagcttttagataaggggaaagattatccctcactagtraggaaagtaatcgatagagaagaaagtaatrcccctcactgtcagtattttaaaatgttttacaaaaaatctggagacctattcttctaacagtcctccctgcatgtctccgccagtggttgaccctgcctgcgttygctgcaggcctctgactccggaargcaaacagaggcctcagnggggagacttcakgagattcctgcccatgttcctttcggataaccctaaccccaagtgtggcaaagggtaagtgctgctgccattgcagataagcatccactgcaactttaatttgcagtagaaaactaggagaggactgggctaagacagttgcatgggaacgtctcttctccgccccaccctgtcctggtcctttggtggaagcaggaaaaccgaaaacacctttttaagaaaatgcctcatagtgttcaactgattctgtcttagcgtgggcattcacatctcatgctctctctgtgtcctggccccctgggcatgagaatgaacgcagattcctgtgcacattccaagcggggctgagggagaggacggcctgctggtaatccaggcctgaaggaacttggcctrttcacttgtactgatggcagctggggcgtgatcttagctttagtaacattatcccacattaaggttgcgattcttttagcctcgtcatgctccttgccagcccatccatgtatagggttatgggctatctcactcccccatccagccaggcagccagttacccacggaagccagatatatggcccaaaaatagtgatgatgaccggaagtctctggccttgatttggaagctttgggaggtggaagatgagtatccccatgtatgttaggtaaaccctgaacttaggtttttcataagaacatacatctgaccagagtcatatcagtgaatcatttatatcatgcatgtgctttgagacctattcgaggtatcatgggatgactcctcctaaaagttaagtagaaatgaatcttgcagcttgatttactcactgactggatgctttggcctacgtaaaataagttgaagtagattcagtttttctgaaggcagtagccaccgttcctggggagcctccagggtgccagcgtcatgccaggcactccctgacattattccatttctcatcacgcagcctatgagtaggtggtgktatacccatttacagaagaggagactggggctcagaggtggtcattttgctcggggttacatgaccagtaagtggcagggctgaggttgttcccagggcccttgccctttcctgcttcctattacacaacaggactgagtaaaccctgtacmtttgattatacatgaaaccaggtggagaaacagcagctatgtaccaaagaacccagagcaatcgagaaaagcccatctggccaggcgaagtggctcacacctgtaatcccagtacttttggaggccgaggtgggcggatcacctgagatcacctcaggagttcaagactagccaggccaacatggcaaaaccctgtctctactaaaaaaatacaaaagttagttgagcgtggtggcaggtgcctgtaatcccagctattcgggaggctgaggcagggagaattgcttgaacccgggaggtggaggttgcagtgagccgagatcacgccactgcactccagcctgggctacagagcaagactctgtctcaaaataaaaaaaaaaagaagccagtctgggagagaacaagctaaacctttgsygttcccttatctgggggccttcttcatccctgaaatgtacagctgggtctgacctctgagtccagggtcaggtgattttgcttagcctcaagtgctcagattctgctgatattttgcaagacctggactctcttgacacccaggattctttcctcaggggacatgctgcctatagttctgcagttaacatcctccttggccatggcaccagggtcggagycaygtacttcatgacctaccacaccgtgctgcagacctctgctgactttattgacrctctgaagaaagcccgacttayagccagtaatgtcaccgaaaccatgggcattaacggcagtgcctaccgagtatttccttacaggtaaagcctgccctttttcaatggggtttacccagcaaagggcctacactgggtgggagtggggagggttcccttggcaagatgctgattttcaggttgggttctggcccctgctccattctgagcacagggcagtatatcaaaggaaatgggtgctgggcaaaggagttcagaatctaaagtctctgtgaaggcctgagggctagagacgcaaaacttgatctctgcgccactgcacagctgcaagagacacacactggaaaatggcttaaggcagggggcgcttggagagcaggcggctcagagcagggcccggcccacattcttggccaacaatgaaccagaatccctaactgctggttatttgggatgctgcctgtatgtagactttttatattgttaggggttttttttcccaggaagaaaagtattatgtatgaactactgaatttagaaactgtagaaaggtaggagaaacaagtgatttatttttcctgcctccccatgatctcgcttaaagcaggaaggcctggatttgtttggaagaagttaagagccggttagctctggcagaaaataaatgaaagcatgttttcctcaggccttgcacggaccccgctgagcctgaggtagtgtctcaggatagatcaggattctttgtttttttgtgttttttcagaatgctgtggaatgctctctgtaaatgtctataaaatagcatagattgggcttataaacagaaactttatcaaaaatatacattttgcatcactgctgggcccttctctgggtggtcagtggccatgagaggtcaagtgagttgctttcggtgagtcttgtagacagccagcaaggttttctgcaagggatgtttcccaaaggagtytgaccacttggcagtggtgacaggatgaacacgcagtgttygggagtgagagcgagctttaatgaggcctcccctctcccctccagtgtgttttatgtcttctrcgaacagtacctgaccatcattgacgacactatcttcaacctcggtgtgtccctgggcgcgatatttctggtgaccatgktcctcctgggctgtgagctctggtctgcagtcatcatgtgtgccaccatcgccatggtcttggtcaacatgtttggagttaygtrgctctggggcatcagtctgaaygctgtatccttggtcarcctggtgatggtgagtcctcatacagtctcagtttgtccctagctcctgtttcacttgggggaattggctgtcttagattccatgtaaaccctaaagatggagtaagataccaagtctggcgcttgctcttggcacacatggagaggcaggatgagtgctggaggagtgctggatggtggtgggacagggcatagagggagcgagcattgagttggacatctgggagcataggcacattacaggcaatttctgttcaattttttctcttgtcccattccttgcggctatactagtatacctgatggtgcctctgaccatggaaatgtgatttcctggcctagttctgggctagtctgcctgtaatttgttattctttagagaytgcacaagcctgtagcctgatgacagcaggatgttcactttttacttagaaaattgcaccccrccccaggagctctccgaccagtgccttttgcctcctatgtggttatcaggtacttttaatcattaaagatgagagcactygagaaggtattcatggaaaatagaacagtgtatccgtactctcagatatgagccctgcttcagataggggagcactgaggtccaagaaaagaagttgtgacaatgcgccagctcggtgcgggtggggtgaccttaacgggttccagcaatttctcctggtcaacacaaacgtgccacagaaaaccaggcttttggctgtgtgtagagagggccccaraaagttcctggtacagtaagattggtgtgatggaggccttgtaagtccaatgggatgcttggcctcctctagcacccagggtgccctgggtaattagcacccatcctcagaacggggtggctgcctagggtcttcaacaggaagagagccatcctaaaggaagtgctttatttcagagctgtggcatctccgtggagttctgcagccacataaccagagcgttcacggtgagcrtgaaaggcagccgcgtggagcgcgcggaagaggcacttgcccacatgggcagctccgtgagtaccctgagcagggccacgccggcagagtcgcaccacaaagtaatcctcctcagtgrctgaagagtctggatcctgtacttacaaagcagcttctaaggattgcaagctttcaggcaattcatgaattagctgccacatcgtggacagaacggacgttctgtggaactgtacctgttggtacggctcctttttaggtggcagtgtgctgaagcaggaaaataacagacaagttaaacatgagacagctggcagtctttcycatttaaaatgcaggggagcccgggccagaacccagcgtgtgatgtgcggttggtgcctggagagtcgtcttggttcaactctacaccctggcttagcctatctctttaccactgtagaaaatacctggtaaagagtaaaaactaaaactttgtttcgtaacacttttaaatatttaagttttcacctgagaatataaagaaagataatcaattgggagacacgatgcagtgtctgtgcagaatacacagcttttaacttggtcatacctctcccccaggatcataaggcagcaaatagtgttaggtagtagatgatgctacctgggttcagttcccattgctttgaaccttgaatattaagaaatccccataagggctggccacggtggctcatgcctataaccccagcactttgggaggccaaggctggcggaccacttgcggccaggggttcgagaccatggccaacatggtgaaaccccatctctactaaaaacacaaaaattagccaggcatggtggcgtgcacctgtttaatcccagctactcaggaggctggggcaggagaatcacttgaacctgggagaaatcctygtaaggaagtgtttttgttcaattacaggttggtaaaagtggtttctaacacagtatctcttcttttaggtgttcagtggaatcacacttacaaaatttggagggattgtggtgttggcttttgccaaatctcaaattttccagatattctacttcaggatgtatttggccatggtcttactgggagccactcacggattaatatttctccctgtcttactcagttacataggtaagagttctcatcttaaaagggtggcacaatrgaaggacattactgaaagggaattctatcctgaggcattcttttcaagtatttgaactcatactaatggtcatttgataatgataaatgatactgagtaaaaaaatttcttctaaaagaaaaaacccatccaggggattcatgatggtgcagactactttattaggaagttgtcgatgttttttctggaggcctgatctgtctgcttcacaaaggcctggagccagtccttgaatggatctgagtgtcagcaggcagggcagctcctccctgccactgagatgaaggagtccatctggcagccagctctcacaccagcagtgctgcagaacagctttttatgtccctcatggatttcccgtttcttagcaaagtgcttgctgcctttcttcatctcgagactgtccttgatccttttacttctatggccacttcaccttgcacaaaaatgacccacggttgaaagarcaatactgatttgcttcatttatagctttgtcactaaattgaagcactgaagtagaagattaagaaaatgaggggctttttatcatctccgggggatagaaagtagttctattacaatctaatatactagttccttttaagaaaaaaaaaaaaaaaaaagagatgagcactttggaaggctgagacaggagaatcgtttgagaccagcctaggcaacatagtgaggcctccatctctacaaaaataaaattagccaggtgaagtggtgtgcgtctgcagtcccacctacttgttaggctgaggcaggaagcttgcttgagcccagaagggtgggcttaggatgcagtgagtcgtgttcataccactgcactgcagcctgaggaagaaagcaaagagcccatctccaaaagagagggagagagatgtggtctcactctgttgtccaggctggtctcaagcaattctcctgcctcagtcttccaaagtgggattacaggcgtgagccactatgcccagccaactagctccctttctcctgcagaaataagaaaaagtctctctctctcatagggccatcagtaaataaagccaaaagttgtgccactgaagagcratacaaaggaacagagcgcgaacggcttctaaatttctagccctctcgcagggcatcctgactgaactgtgtctaagggtcggtcggtttaccactggacgggtgctgcatcggcaaggccaagttgaacaccggatggtgccaaccatcggttgtttggcagcagctttgaacgtagcgcctgtgaactcaggaatgcacagttgacttgggaagcagtattactagatctggaggcaaccacaggacactaaacttctcccagcctcttcaggaaagaaacctcattctttggcaagcaggaggtgacactagatggctgtgaatgtgatccgctcactgacactctgtaaaggccaatcaatgcactgtctgtctctccttttaggagtaagccatcccacaagttctataccatatttttagtgacagttgaggttgtagatacactttataacattttatagtttaaagagctttattaatgcaataaattaactttgtacacatttttatataaaaaaacagcaagtgatttcagaatgttgtaggcctcattagagcttggtctccaaaaatctgtttgaaaaaagcaacatgttcttcacagtgttcccctagaaaggaagagatttaattgccagttagatgtggcatgaaatgagggacaaagaaagcatctcgtaggtgtgtctactgggttttaacttatttttctttaataaaatacattgttttcctaagttttggggttaccctatctgctttgagagacaaatacaaaagctaaatggaagagattctatctaacctgtccttatggtaactaaatgccgtcttacattgagctagaaatagacctagaagtttcattagacagccctgatccttccctatcctaaagatgatgtcttaggttgtataactatttggagatgagaatgatcaaccagggccaggtgcggtggctcaaacctgtaatcccagcactttgggaggctgaggcaggcggatcatgaggtcaggagtttgagaccagcctggacaatatagtaaaaccccatctctactaaaaatacaaaaatcagccgggtgtggtggcacgcacctgtagtcccaactactcaggaggctgaggcagaagaatcgcttgaacccagcggaggttgcagtgaaccgagatcacaccactgcactccagcctgggcaacggagcgagactctgtctcaaaaaaaaaatgagaatgatcaaccaatgtatacttcataaaactgaaaccttaataagccccagaccctttaaaacccttagccaccatttgccgtcttattcctggctttaagagatattccaagatctgctataagagatgggctgtgcctgatctgggtcctaaatgtgtcttgactcaaaacacacctcctcggtgagttccagagcataattcagattctgtcagtatactgaattcactctactacaaataatgggccaagggctaggtgggctgttatcaaattgtgttgtttacaaaaatgctaacccagggtcctcgcccaccagctgccagtgccctctgctactctttgaggctatggttaccccaagtcttttcattgcattctcacctggtgtgaaattggggctccctcgcaaacgctggtttcgctgttcaaaaaagcggaatattgtatagaaaagcatgttgtcttcagtctgctttgcagcatctaaaaattttcgtgcagaaatgttgtcatggccaccaatgccccggataaaccttaaggcagctaacacttggtgtttggaaaggagaacttctactatttcatcatttgctgttgaaagtcgctagcagtaagggagagaagtccaggtcagtgcaaacaacaggaacagagttagtttccatagtctaaaacctcacacatcagagttaccttcagcatgtccagagatagctgatgagcaggaggatagaaactctctagggataacagcagacaagcctgaaagacatttttagacccacttcagttggaaagataacggttaaaattttccatttttaaccacaatggaagtaaaaatctggcaatgcataccaaaggtttggagtcgctgaggacgtggtactgcaggaactgatgcagcatataaaagaggttgtgctggacaagggttttgataacaagttcatgtagrtaatgctgaggacaaaagtaaaaagtgaaagaacacttccaaatcattcagctacaacagactagaggctccccaaggactggctattctaaccaacacagtaaaagtctgtcattacaagaagtggtttcgtcatgcaggtaaagaccccaacttgaccttacacttcccattccaactaataatgtcaggagtcactcagcattctgagtcagggaggcagacctgtcttagcatatgagtcatcttctaagacagtgactgtgttttttttttaaattccttctgttttaacttgggcccagatgatttgaaggtacctgtactgcaatctgaaactggttaagagaacgaatgtattccatcagcacggctatcacaaatttatgaggcatctcctagggagaaaaaaatgtggtcttacaaataccaacgaggtgcaaaagaggctgcatataactctctatccaacccccaccttgtttccatcttaaaatggcccagtgttcatctttcactggttttgcacacatcgctccagaaccacccgtcaacaattatgctttaggcctcagcattagaagccaaactaccagctctagggcctcacccaaggaaactccagtgattctaatcacttcaagtgactctaatcacatgaagtctcctcgttttcagcaacttccttgttttgagcattctcagtccagaagaggcggaaagctgcggcccaccttcttttccacraaggctgacaggacatgggtgtacacatctgactggtccagcaccgcctgggtccgcaccggcctcttgaggagcgggctgcttcggytctgccctgcttccacygcctgaaagaaaaaaaccacaaactatgatcttcggcatcttagaggaagggtgctgtttacagttcatccacaaggactgaattcttcgatgtggacccaggatatgagcggaaaacactttctctacttagatacaactttttcctgtgcgcatgcctgtaatcccagctactcaggaggctgaggcaggagaatcccttgaacccaggaggcagaggttgcggtgagccaagatctcaccattgcactccagcctgggcaataagaacaaaactccgtctcaaaaaaaaaaaagcagttcagatccgtgcagattatgcaatagctgtggggtgtagcctgagaacttgcatttccaagaaactccagatgctgctcatgtggctggtcagtggcccacactgctgagtcatgacggtttatggagcccagcagaccgtgtgggacggcacagaaactgccatttgggatcagacctactgattcccacagcccagaacacccacagcaatagagtccaaaaggactcagccatccctcacgtctggcagcgtaggaatggacactgtcccagcaactggccctcttcagtgcctgtctcagacctcttacccttccatgaacagctaaaggggagtggagttctggggcttttgttggtttaaaaccattttcagcctaggactaatcagatcctggaattgaaataattcattctccttgtcctaaacttttcttctggcttcagaagatatgatgtacaagtaatacagcgggaattggtggcgataagccatggttattaccttgactacaaacacgcctgctaagtgctaacactgaatcgtcactatctcaacaggattctttcccaaaagggaagaaaggtgtggcaaatataaatatttctaatttaattttctaagtcctcactctggcataacagaaaaatatacaaaatattgcaaagcagagactgatttttctcatctataacagtagaccaaggatctacaggcaagatcaaacacagatgggaaaaacaaaaacagtgaaggtatgaagtgagatgcagccgccagctcgtgggatgcagggaccctgaatttactactcctccactatcccccactactgccaccttgccctatggcaggcggcaaatctcagcgaccttattctaatatataggaaacaattttgcatcataattacttagaaaatacccgggagggggtgggggaggaggaccctttgtcatactccatgtaactcaccatcgcataactctgstcggcatccaggtactttttatactcatggttgagtttatcaaaaacagtggctatcacgggcagcgatgctctgtctgactcacttaacactggaaaggcacaatgttcacacacggatcaaaccaacttcatgtcagcttcagaatttccacacgttgctatgataaaaactaatctcaaaaggttaccaatgcaaaagtacctttaaaggacactctaagaaatacaatactttaaagacctgacagctagatgtcattcgcaacccctttctggttacggttaaaaaaaaaaaaaaaaaaaaaagctatagcaggccaggctcagtggcacatgcctataatcccagcactttgggtaggccgaggcagaaggatcacttaacgctgggagtttgagaccagcctgggcaacaaggcaagaccccatctataccaaaacaaaaacaaacaccaacagcacatattggtaggggattattattattatttttttttggatacagggtcttgctctgtcgcccaggctggaggtacactgacacaaacggctcgctgcagcctcgtcctcccgggctcaaggaatcctccctcggcagcctctggagtagctggggccacaggtgtataccaccaaactcagctaattttttttttttttttttttttttttgtagagacagggttttgccatgttgtcgtccaggctggtctcgaactcctaggctcaggcaatcctcctgcttcagcctcccagagtgctgggattataagcatgagccaccatgcctggcctcagtaggggattcttaaagaagacacatatgcagtgagtggcttggattttgaaagaggtgtgtgtgaaggccaggggtggtggcccactcccctcctgtgtgcccactttcattcagaaccatcccatttattgttcttttctaccagtatctctacaaatcatctttccatttagcagcctttcctagggggtcacatagccacccctcacataaagaatgaggctgtgggtcacagacaagacacaacaatgtagcccacatcccgataaaaagtgttgggcagcacaggcctcacactggaatcagagcaagggggaaggattcaacttactctgtgaacagacagacaggatgaccatcttgcattcctttctctggaggagaaagtccatgagtcttcctttgtctggtaagagatttactatgggctcaagtttcacttggaggttccagaggtaacctggattttaagaggcagcaaataaaacagtatgatgcaaaccgtaacaaaagcccaaaagtggttcccctaaacatctgcggggcgggtggcaggtggtgataaaaagccgcaaagtacagtcagtgtagcttttccttcctaaccaaagcagagctgagccattcaggagcaattcaggagcgtgtctaccacaggaggatgacagcccaaccaccgcacacctggctgactcttttccaagtaacctctgcattcaggggcacatcaaaggtgtagctcctagtccttcattccaaacggggacttccctagacctagcccctcttttaacgtttaaaatagaaaaagatgtcaacacgtggcatcaacttcagtcctgtgctttggtttctcctacaacagctcattagtttaaaaggtaactccagaggctctcaatggaacatcataactcatccattcatcgacccataaatgtactgatcacccacactgccagcatctggtgtggcctttcccaattgggatgccacaggagaatgaagtgccacataaaaaatcatctgggtgacccccttttcagttggcccaaggcaggtacagagcagctgtacaggaaaacaccagcgagatgcacaggagagaaatgacttcattacatacatacagtggatgtcacatgaggctatgggttacagacaaggcacaacaatgcattacatacagtggatgcctacagcatcagggctaattctctcctcaagagttcttaggaattccagaggaaaggcaggaaaatacacagaggattaaagagtaacataggagattctctaataaccagcctggcgaggtattagagacacaggggcaacatggcaagaccctgtctctacaaaaaaaaaattataggccggctgtggtggctcacacctgtaatcccagcactttgggaggctgaggtgggcagatcacgaggtcaggagatcgagaccatcctggccaacatggtgaaaccccgtatctactaaaaatacaaaaattagctgggtgtggtggcgcatgcctgtaatcccagctactggggaggctgaggcaggagaatcgcttaaacccaggagt

SEQ ID NO: 5692 - DNA, 30987 bp, Homo sapiens
ctttgaactaagaaagacttaagggaattagagaaatagaaagaaagccagtgtgattgacagtattgagtccatcagttcaaatttgagagatagacaggcaccagatctttcatacagggccttttaggcaatgttaatgtttgttttattttatcctacaatgggacattattgaaggattctgagcagggaaatgacatgattcaaattgtgtttaaaggacatctctttttgagatgttgaaaatggattgcaggccgggcgcagtggctcacgcctgtaatcccagcactttgggaggccgaggttggggggatcacgaggtcaggacttcaagaccagcctggccaacgtggcaaaaccccgtctctactaaaattacaaaaattagccaggtgtggtggcgggcacctgtaatcccagctactcgggaggctgaggcaggagactcgcttgaacccgggaggcaaaggttgcagtgagccgagatcgtgctattgcactccagcctaggtgacaagagcaagactccatctcaaaaaaaaaaaaaaaagaaaagaaaagaaaagaaaatggattgcagtgggtcaagagaggaggagatgccctaatacgagcaagagatgacgttggcttggacaaaggaggtagctgacaataaaggtagagagaaatatgatgtgggagtaaaattctctaacatattatctgtattgtttttcgttttcctatgattgtactttttcattatattaaccttgcttttcccttcatctttctcagtgatttacaactttaacatggcttatgatgtatgaggggtgggagcagaggcatggctggagcagtatggaaaagcaactccctaaaggagtctatatgttatatttattcatttcatccaacagatacttactgagctcttactatatggtaggcaccagtgtacatacagggatacagtggttaaagataaacaaggccggccaggtgcggtggctcatgcctgtaatcccagcactttgggaggccaaggcgggcggatcacctgaggtcaggagttttgagaccagcctgaccggcatggagaaaccccgtctctactaaaaatacaaaattagccgggtgtggtggcgcatgcctgtaatcccagctactcgggaggttgaggcaggagaatcgcttgaacccgggaggcagagtttgtggtgagccgagatcgtgccattgtactctagcctgggcaacaacagtgaaataccgtctcaaaaaaaaagaaaagacaaacaaggcctctgctcctctggaacttaccttgtaatgggatgagataaacataaataaacaataaattaaaatatcagatactggtaaatgttatgcaggaaattaaaacagtgttatggagtagagagtaactgactcagtgctttagatttagggataagggaaggcgtctccgaagaggtgatacttaagctcatacctgaagagcaagaaagagctagctatgtgagggttttggagggagaatattccaggtggagggagaatattccaggtagagggaataggtagtgcaaaggtcctaaggcaagaacaagcttgatgggattaaaatgtagaaggaaaccaacatggttggagcataatgattgcaggaaagaatgatacaaggtaaagttagaggggtagggaccagatgttgagtctgtaagcctctctaaggtatttatattttattatgaatgtgacaggaagaaaaccatggagagctgtggtttgtttatttgtttttggttttttttttttttgagatggagtcttgctctgtcgcccaggctggagcgcaatggtgcaatctcagctcactgcaacgtccatctcttgggttcaagtgattctgctgcctcagcctcctgagtagctgggattacaggcacgcgccaccacacccagctaatttttgtatttttagtagagacagggtttcaccacgttggtcaggctagtctccaactcctgacctcatgatccacttgcctccacctcccgaagtgctgggattataggcgtgagccaccacgcctggccaaccatggagagttttaagaagggaagtaatgatgtgatttatgtttatgctagctattatatgaaaatagattgttgggggtgggggcaacaatggccacagtgagaccagttaaaacattaaagcagaagtccagacaagagatgttagtggcttagagtatggcagtgcggtgtgatagagagatgtggttggttgggttcaggatatactttgaaggtagtacaagttattgagtacagaccaccattgtcagattggattacaaataaaaaacatggattttttactgaagaaatttataatttaacacatttggcaattacttaaacctctgggcctctaaaggaatagggattggatttagatcacctttaatatgtttgagtctctgagacatctgaaatttgttctttcaaaacaagtttgccttgttataggtcaagttgagagagagatggagagtgtgtgtgtgtgtgtgtgtgtgtgtgtgtgtgtgtgttgccaagtggaaaatgaaatttgagattgaccttggaagatttcatgatgctcatggagtttaaaccaggatcttaaggtgcacataaacatgtattagttacagaatgttgggaggactttgtttcttcatttttattgggacataattgacaaatagaaattacatatatttaaggagttatagctcgatgtttgtacatgtacgttgtgacatgatcaccacagtcaagctaattaacatatccatcacctcacataattaccttttttcttttatggtaagaacacttaagatctaccttcctggcagatttcaaatatacaatacagtattgttaactatagtcacaatgtagtacattagatctccagaacttactcatcttgcataactgaaacttatacgctttgaccagtatcttcccatttccctcactccccaacccctggcaacccccattctattctgtgcccctatgagttagccttttttttttttttttgagacagagtcttgctttgttgcccaggccggagtgcagtggtgagatctcggctcactgcaacctctgcttcctgggttcaagcaattctcatgcctcagcctcccaagtagctgggattacaggtgctggccaccacaactggccaatttttgtatttttagtagggacggggtttcaccatgttggccaggctggtcttaaactcctgacctcaggtgatccacctgccttggcctcccaaagtgctgggattacaggcatgagccaccacgcccggccttattttagcttccacctataagtgagattatgcagtatttgtctttctgtgtctggcttattttgcttagcatagtgtcctcgatggaggacatttctaataggggtaatagcattcactttacttctgatctaatgtgtaatctctttgctacaggaaaagaaaatgttaaaatgtgatgttggatatgttaagtaggtatacatgcccttactgacccttttgctctgtgtatcaggtactatttgttttccctcatcatgaatttgagccgtgatgcttatgagattcgcctactgatggagcaagagtcttctgcttgtagccggcgactgaaaggttctggaggaggagtcccaggaggaagtgaaactgggggacttgggggaccagggactccaggaggaggtctgccccaactggctctgaaacttcggctgcaagtcctgctcctggctcgagtccttagaggtcatcccccacttctgctagacgtggtcagaaatgcctgtgatctcttcattcctctggacaaactaggcctctggcgctgtggccctgggattgtggggctttgtggcctcgtgtcctccatcctgtctattctcaccctaatctatccctggctacgactcaagccctgaccttccggtacaggataaggaggggacctgaattggtgagatggaatcttagatcgtcccccatgtgccagcctcattcgaattctactctttggttaaagttagaaattcagagatttaggggtggaggaagagctttggggaagatgaggtaaggaaagatgactcgtgaagttaataggatgtctctaatttctagatgtgcctgagcttctgttcttttcctctttctttgtgtctctcttgaatatatttactttgtgtctcttaactctgtttaaggttctgtgtctatgcatctctctctttcttttttcaaccttctcattctcctatccagggatttaatcagcagaattactttttgataggggaggtataaggtttggcctgtaaggttctaactgccttcttttttctcacagaggtggcttatggcagatttttcctccttcaaactccaaacataatttttaagactatgtgccagtggactcttyccttatatctctgcaccacaagttgttggatgtttcctcttcctcccttatgtctacctcaccaacctcgctcatcatttggcccttatccttccttgtacacctaccttcagatttctgcttacactttgatttcagagctttattcccyagtctgttcttactcctttgtcgcttatccagaatgatgctatgtgtagcatcttgctgtaaatcctgtacaatgattctgtgtaaatagctgtggcctatgccaataatgaagagcaagcctttcaggtaagcaaattaaagttcagtttgctcatcgacatttggtctggtccctcattttttggtaatttgaggcccctattcctgtcactgtggtttgggtttttctcgggattagccactaacatcacccacattatttttcttgagcacctacagtatgtaaagcaacatacttagtgggcatccaaaaatctaagaagctccacactcccaactttaagaagtttataacctagctgaggagttggggtggcagaggagtggtctaatactaaagttattgtcctggctccacaaagcacatctcataccagttcagatataatccctctaagaagcagaatgccatatgacagcataggctaagagccaaggacagaaccaagtggagtggggctggtaaggatttggagctgtgtcttcacaagttgagactcccctgggtgggtagggaaatgataccactgctatcagctctttcattttccatattccaggttgagataaataaggttaggaagtgaatctatcggccaggcgtggtggctcacgccggtaatcccagcactttgggaggccgaggcaggtggatctcttaaggtcaggagttcaagaccagcctggccaacatggtgaaaccctgcctctactaaaaataaaaaattagccaggcatggtggcatgtgcctgtagtcccagctacctgggaggctgaggcatgagaaatgcttgaacgtgggagacagaggttgcagtgagccaagattgtgccactgcactccagcctgggtgacagagtgagactctgccttaaaaaagaaaaaaaaaaatctgaatctatctcctatctcccagctgggtgcagtggctcactttgggaggctgaggtgggaggattccttgagttcaggagttcaagaccagcctgggtaacatagtgaaaccctgtctgtattctcaatataaataatttgtctaaaacttttaaacaaaagtttaagattcttttcttataaaaaagaatccatctcccactcctgttccaaatttgaggaaagcattattgacctggcaacaataaacagtagaaaaaaagaaatagcagaaatgggcaaaaaaatatgttctctggatatagagatgaggcctccagggggcagcaccaaggcagagaaatagactaagatcgctcagtgttttccttggtctggggctccccacagttccccaccatcactcctcccattccttccaactttatttttagctgccattgggagggggcaggatgggagggaaagtgaagaaaacagaaaaggagagggacagaggccagaggacttctcatactggacagaaaccgatcaggcatggaactccccttcgtcactcacctgttcttgcccctggtgttcctgacaggtgagggaagttaacttcttggtttctggtggggatggaagatacatagattgtttggaattgggaccattatagttaaaattctttgggatttaggttaggaagcgaacactggttgtacatttcttgtatgtgtgtctgtgtccttgtgcatttttatgccctcacatatgactgtttgaatattgagactggcaggggctaaagctgcctaggaccttgtgtaagatttgtatctaataattatataatatataattgtataattatatattatatataatatacatataatatataacaattatatattatatataatatacatataatatataacataattatatattatatataatatacatataatatgtaacataattatatattatatataatatacatataatatataacataattatatattatatataatatacatataatatataacataattatatattatatataatatacatataatatataacataattatatattatatagttatatattgtatataataattattattattttttaaagatagggtctcactttgttgtctaggctggagtgcagtggtgcaaccacagctcagtagttgggactactaggtacgcgccaccacgcacagctaatttttttttttgaaacagggtctcactctgtcattcaagctggagtgcagtggcatgatcatggctcactctagcctcaacctcccaggctgaggtgatccttccaccttagcctcccgagtagctgggactataggcgtgtgctaccacgcctggctaatttttttttttttagagacagagttttgctatgttggccaggctggtctttaactcctggactcaagcaatccgcccccgacagccacccaaagtgccgggattataggcatgagccaccatgcttggctgagatttgtatctaaatatataaaatcttcatcctaagccctataggggtaaggagacaaaaaagaaatgtgatgtgaccttccacgtggctagtctgattcctattatcccctccctaacttcttacccttggtggtccctggggcctgaggcataactgactaactatgtggtcagaactctgggtttatctaaccaatgagctgcagtttctggtcatacagccctgccagttttctggatgcaaaactgctcacatactaaacacctttctgaaaatgagcatggtttgggataaagctatagccattggtaatggtgagggggtagcctgagagggggttgcttagaagtacagagcaagacatagttggggaaaggaccatgggaaggacaagaggcctggaatttttccttggcagtgccctgtaatcattgtttcctaaaataccagctctgattttaaaggcattggggtcaaaagggaagattagctagggtcgggcacctttagaatgggctgaaggctgaggaaaccatggaggtaggtaggggaccagttgggagagtagattagttaaaaaggaagcaggttgtgggaaacttcaggatgatgggacccttggaaaggatggatggcaaactatgtgtgtgggcaggcgagtggccccacccagttaattaccactgagatttccaaggctggaatcaaccagggacctagacattggaaaaagacagtgagagtgtgacaatgacactggaagtcaggaagagatagagaaggagagagccagacatgcagtgctccttagcttcctttcattccccctattttggggagaattggaagcaatggttgttctggggatacagaaaggccctctccctcttttgaccctcacagtttgttgaggagagtgtgtggaaggaatgttgtggaaaagagtagccaggcgcggtggctcacgcctgtaatcccagcactttgggaggccgaggcgggcggatcatgaggtcaggagatcgagaccatcctggctaacacggtgaaactccgtctctactaaaaataagaaaaattagccgggcgaggtggcaggcgcctgtagtgccagctacacgggaggctgaggcaggagaatggcgtgaacccaggggggcggagcctgcagtaagccgagatcacgccactgcactccagcctgggcgacagagagactccgtctcaaaaaaaaaaaaaaaaaaaaaaaaaaaaaagtaacttgaccttttcagacatgtctgtgaatgaaatttcaggggtgggaatggaaatacagctgtacatcagcatggcagagggccacagtttaggcatctggacacaaacacaggaagggaatcatctttgcctggagctctgagtacatgacactgagagaggccagaaaagcttatgagtgaaaaagcaggcaggcagactgagattaagacgcttcctcacagcttctctcgggctgtgcctctagccattcactacctcatactaacattatgatcctgrccccacaggtctctgctccccctttaacctggatgaacatcacccacgcctattcccagggccaccagaagctgaatttggatacagtgtcttacaacatgttgggggtggacagcgatggtgaggaagaaaccggagtgccaggggattgggactgcagtagtgctaacaaaggggaggcaagatagatgggactctaaactaatctggtcttttgaaagtggctggggctctaaacttaccacctccatgctctttccctttggcctatgtcaagggtcatgtttgccctgtgcttacttacattcacatcctcttcccaggatgctggtgggcgccccctgggatgggccttcaggcgaccggaggggggacgtttatcgctgccctgtagggggggcccacaatgccccatgtgccaagggccacttaggtgagaagatgcctgacccttctcctcctaacccctgactttgatactctagaagcttcaactccctatacctcagctttttcacccctaaaatccgcatactccctgtccccaatctgataccaatccctgctcattctcctccaaaatcacatgaattcaagcaccccatctatgaccccatgatctcattctcttccacctccttccaaccaggtgactaccaactgggaaattcatctcatcctgctgtgaatatgcacctggggatgtctctgttagagacagatggtgatgggggattcatggtgagctaaggagagggtggtggcagtgtctctgaaggtccataaaagaaaaaagagaagtgtggtaagggaaaatggtctgtgtggaggggtcaaggagttaaaaaccctagaaagcaaaaggtaggtaatgtcagggagtagtcttcatgcctccttcaactgggagcatgttctgagggtgccctcccaagcctgggagtaactatttcccccatccccaggcctgtgcccctctctggtctcgtgcttgtggcagctctgtcttcagttctgggatatgtgcccgtgtggatgcttcattccagcctcagggaagcctggcacccactgcccaacgtgagccagaggaaggctgagtacttggttcccagaaggagatactgggtgggaaaaagatggggcaaagcggtatgatgcctggcaaagggcctgcatggctatcctcattgctacctaatgtgcttgcaaaagctccatgtttcctaacagattcagactcctggccaggtgtggtggcccacacctgtaattctagcactttgggaggccaaggtgggcagatcacttgaggtcaggagttcaagaccagcctggccaacatggtgaaactccatctctactaaaaaaaaaaaatacaaaaattagctgggtgcgctagtgcatgcctgtaatctcatctactcgggaggctaagacaggagactctcacttcaacccaggaggtggaggttgcggtgagccaagattgtgcctctgcactctagcgtgggtgacagagtaagcgagactccatctcaaaaataataataataataattcagactccttatcaggagtccatgatctggcctggcacagtaactcatgcctgtaatcccaacattttgggaggccaacgcaggaggattgcttgaggtctggaggtttgagaccagcctgggcaacatagagagaccccatctctacaaaaataaaaaataaaaaaattagctgggtatggtggtgcatgcctgtggtcccagctactcaggaggccaaggtgggaggatcacttgagcccaggtggtccaggctgcagtgagccatgattatgccactacactccagcctgggcgacagagtgagactctgtctcaaaaacaaacaaaatgggccaggcgtggtggctcacgcctgtaatcccagcactttgggaggccgaggccagtggatcacgaggtcaggagatcgagaccatcctggctaacagagtaaaaccctgtctctgctaaaaacacaaaaaattagccgggtgtcgtggcgggcgcctgtagtcccagctactcgggaggccgaggcaggagaatggcgtgaacccaggaggcagagcttgcagtgagccgagattgcgccactgcactccagcctgggcaatagagcgagactctgtctcaaaaaaaaaaaaatgttctctacccacatgcctttcctaatattctcttctccttaaacattttcagtcttcatagttgctaccatgtttcattcctcaccatcagaaccactctgcttttgttcccccaccatacagtcattgctatgttcctacatagcatttaattccttcttgttttttagaacattgtatatataaattatatctatgtatataaatgtgtaggtgtgtgtgtttatatacctatatatacatatatacatatatatacatttatatgtatacttacatacacacaattactaaagattactaaaggaatattttattaatttctacacttacacagagcctggcacagtaccttctttgcatgtaagaagtgccttataaatgtctaaattgaatgtgtcctcctgtgacctctttcccttgttgcccccagctcagtgtcctctacctcagtgttccccttccttctaggctgcccaacatacatggatgttgtcattgtcttggatggctccaacagcatctacccctggtctgaagttcagaccttcctacgaagactggtagggaaactgtttattgacccagaacagatacaggtaagagaaggcaatatgagctgggcacagttgcttgtggcacctacttaagaggtggaggtgggaggatcccctgaggccaggagttcaagactagcctgggcaatacagtgagacctcatctctaaaaatatgaaagaaaaaaaaaatagccaggcatggtggcatgcgcctacagtcccagctactcaggaggctgaggcaagagatcagttgagcccaggagtttgaggctgtagtgagctttgatcacacaactgcactccagcctgggtgaaagagtgagacctcatttcttagagagagagagaaaggcaatatggatgggcttggaaggggagagacagagagagaggggataaatgtaggtgttgtcttcagtagtatccaggtgttcatctctcctctcttatatactttcttcttcctcctctccccccatctcacatacatacatttcatttgaatgcgctttattcccaggtgggactggtacagtatggggagagccctgtacatgagtggtccctgggagatttccgaacgaaggaagaagtggtgagagcagcaaagaacctcagtcggcgggagggacgagaaacaaagactgcccaagcaataatggtggcctggtgaggcattgggaagacaggtgtgggaggctagagcaatgaaggcttagaagagttagggcggggccaggcatggtggctcacgcctgtaatcccagcactttgggaggcaaggcaggcggatcacctgaggtcaggagttcgagaccagcctgaccaacatggagaaaccccatctctactaaaaatacaaaattagccaggcatggtggcgcatgcctgttcagaggcatgctacttcggaggctgaggcaggagaatcacttaatcccgggaggtggaggttgcagtgagtcgagatcacaacattgcactccagcctgggcaacgagagcaaaactccatctaaaataaaataaaataaaatgaaatgaaaatctttcccttaaaaaaaaaaaaagaagaagaagaagagttagggcaggtttggagtgcagtgtgtatatcccaagatgtcttgcatactttctttgtatgtacactaatggtacaaagaggaaggctaagtgggctgtcattgtactccctctcactgcatttctacaaagtatctatgtctgtgtctctccatatttcacagacagaagtctctttctatccctccactccaacaatgatcctggcccacaggttctccactactgatgtcctagcccacgttccaaacatgatccaaaactcatctctaggggcacggtggtaaaattgaaacaaaacaaaacaactcatctctgggaggagtccctgcccagatcattcttttccgttctatatttcatcgatatttcccctcccaagtgcaatatttgttgaatgaatctgagtgtatgaacgttgtacttatttggactgataagctactctgtatgttctatgaccttcaaacatttgagctctcactccatgccatctccatgttaaatactcaggaaatggcctaaaaggcaagatgcctgacctcagggaagtgctgatgttaaatcctgtgtgtgtgtgtgtgtgtgtgtgtgtgtgtgtgtgtgtgtgtatgtgtgtgtgtgtgtgtgtgtctgcatacatctgatctcacctcactcctttctcttctcagcacagaagggttcagtcagtcccatgggggccgacccgaggctgccaggctactggtggttgtcactgatggagagtcccatgatggagaggagcttcctgcagcactaaaggcctgtgaggctggaagagtgacacgctatgggattgcagtgagaattcaccctggatctggaagagttggggagtggcaggggggcagtgtcttgtgaactgtccaaggactgggaacttgaggaaaacaagggcattaactacttcccagacttcagccacagcatgttagttggctgtgttctgtaccaactctaatgcctcattccttgatcttatgacctcttaggtccttggtcactacctccggcggcagcgagatcccagctctttcctgagagaaattagaactattgccagtgatccagatgagcgattcttyttcaatgtcacagatgaggctgctctgactgacattgtggatgcactaggagatcggatttttggccttgaaggtgaggattactctggagaaatggacagggcgggagaagttctggagtgtaggtggggctctggagtgagttcagtaggtcaaaggggaaactgtcttcccctgatattgtctcaatgttttctcatgaccaagggtcccatgcagaaaacgaaagctcctttgggctggaaatgtctcagattggtttctccactcatcrgctaaaggttggacagattgaccccttcattacttctcccattctctgactcagataacttcaaccacagggccctccagattcctcctttaaccagcctccatgctcaccttcccatgcctttccaactgagcccagcagaccctcagtgatcttttcactcctggaacgtttttytctctttattccccactgtcttctcagtgaccccatctgcttctgtcccacaggatgggattctttttgggatggtgggggcctatgactggggaggctctgtgctatggcttgaaggaggccaccgccttttccccccacgaatggcactggaagacgagttcccccctgcaytgcagaaccatgcagcctacctgggtgagcagcagagagttgcagaggacttacagggtaggggaggaaatacatccctagtgggggcgggtatgaaatactccctcttaactcatgcggtttctcactgacctctggytacttcccttgggacctcctgctatgcctttagggaacccccctactctggaccccatcttcttttcctttacctctgttactttgcccacttctaggttactctgtttcttccatgcttttgcggggtggacgccgcctgtttctctctggggctcctcgatttagacatcgaggaaaagtcatcgccttccagcttaagaaagatggggctgtgagggttgcccagagcctccagggggagcaggtagggcatccaaggaagggtgggacctttggattcccagggacctctgggctgttggggaggagtgtgaagtgggtaagagagaggcctccaaagtctgtgcggaattctggttggcagagtctgtcagggatgtaaggagcagactagcaggctggtgagtgcttcccactgagtccacttgtctacagttaccttcccttttctctggggtcatcatcacccaccattccccagattggttcatactttggcagtgagctctgcccattggatacagatagggatggaacaactgatgtcttacttgtggctgcccccatgttcctgggaccccagaacaaggaaacaggacgtgtttatgtgtatctggtaggccaggtgagacttgctgggaccccctgccctggacttgcattgtgggggtggagggaggaaaggagggaaggtgcacatatttgagggtttgctgagaggttgggtctgccagattagcatcttctatcttctctcctccaccagcagtccttgctgaccctccaaggaacacttcagccagaacccccccaggatgctcggtttggctttgccatgggagctcttcctgatctgaaccaagatggttttgctgatgtggctgtgggggcgcctctggaagatgggcaccagggagcactgtacctgtaccatggaacccagagtggagtcaggccccatcctgcccaggtcaggagtacccaaataaagcaggggyrcggttgtaggaagaggaatagggggatgctctttgcttgtcaatagtctccttggcttgagacccaaactgaacaagtgcttttattagtaggcaaaaacataaggcagtggacaggttgctgaactaagaactcctgaacacaggcaagtttctcttattcccaggactgacgggagcattataaagagcaaggcatggccgggtgtggtggttcacgcctgtaatcccagcactttggaaggctgaggcaggcagatcacctgaggtcaggagttcgagaccagcctggccaacatgatgaaactctactaaaaatacaaaaaattagccgggcctggtggcgyacacctataatcccagttactcaggaggctagggcaggagaatcgcttgaacctgggaggcggaggttgcagtgagccaagatcacaccattgcactccagcctgggcaacaagagtgaaactccatctcaraaataaataaataaataaaaagaaagagcaaggcaggaggcctgagaaactaggtgtatgggtccctgcctcagtattctctctcttcctctcagaggattgctgctgcctccatgccacatgccctcagctactttggccgaagtgtggatggtcggctagatctggatggagatgatctggtcgatgtggctgtgggtgcccagggggcagccatcctgctcaggtgaggggtcccagctcaggtggtggtggacagcatagcatagctgttaaaggcaagggccttaaagtcacagatggagatttggttttcttggtcaacttactctgtgcctccattcttagtttataaaatgacagtagtaatagtacctaccttataggtttattgtgaagattaaatgagataatccatataatgatttgaacacagtgcctagcatgtaagtgcgtattgaagtgaatctagggctgggtacagtggctcacacctgtaatcccagcactttgggaggcgaaggtaggaggatcatttgaggccaggagttcaagaacagcctgaccaacatggtgaaaccccgtctctactaaaaatacaaaaaaattagctgagcatggttgtgggcaccagtaatcccagctactcgggaggctgaggcaggagaatcacttgaacccaggaggcagaggttgcagtgagctgagatcgccccactgcactccagcgtgggccacagagtgaaactccatctcaaaaaaaaaaaaagatcaatgacatgaatctattatcttacttctgtcagagggttcggggkagggtgacatgtgcattcagcccctccttctttgttttgaccatggggaagcaaacactgggcttgcacttctcagagggcttacctcctactgctagaatttcttttccacactgttcccagctcccggcccattgtccatctgaccccatcactggaggtgaccccacaggccatcagtgtggttcagagggactgtaggyggcgaggccaagaggcagtctgtctgactgcagccctttgcttccaagtgacctcccgtactcctggtcrctgggatcaccaattctgtgagtgactaaaatgcatyacaggcaactctcaattccttgcatgccttcctcactagacccctttccaccctcactcttgcctccttcattcagacatgaggttcaccrcatcactggatgaatggactgctggggcacgtgcagcatttgatggctctggccagaggttgtcccctcrgaggctccggctcagtgtggggaatgtcacttgtgagcagctacacttccatgtgctggtaaggagagggcagtaactgcttagcatcagggcctgagaatgaggagaaagctgggtcagaggaggaattttagctgaatcagcaagaaagccaaagccgggaaaatgagatgattcagactttggagtcagggctgatctgggtttgaatcctagctctgccatttaccacctatgaattctggcaagtccaaccctcagttttcttgtctgcaaaggggtgataataataactgtatcataggagttgtattaaaattaaatttagccgggcgcagtggctcacgcttgtaatcccagcactttgggaggccgaggcaggtggatcacaaggtcaggagatcgagaccatcctggctaacatggtgaaaccccatctgtactaaaaatacaaaaaattagccgggcgtggtggcaggtgcctgtagtcccagctactcgggaggctgaggcaggagaatggcctgaacccaggaggcagagcttgcagtgagccgagatcatgccactgcactccagcctgggcgacagagcgagactctgtctcaaaaataaataaataaataaataaattaactaattaattaaatttagtaatacagttaagatcttaggacagtgcccagcacacagaaaatgcttcataaatgatcactacaattatcacaagatccttgactctgtgactctgtgactctgttttccttcaggatacatcagattacctccggccagtggccttgactgtgacctttgccttggacaatactacaaagccagggcctgtgctgaatgagggctcacccacctctatacaaaagctggtcagcagtgccatgccctgccccttgctcccaacactgccctccttcaagagaaaagggagggagggagaagacatgagatcatggtgaaatctgacctgggctcctctaatcaaaatatacccacttttgtcttttcactttccccctattctattcctttcctccttgctttcctctcaacccttagccccttccctttcttccaggtccccttctcaaaggattgtggccctgacaatgaatgtgtcacagacctggtgcttcaagtgaatatggacatcagaggctccaggttggatggacaygtactaggcaaaccagggtgacctgagacagactggaagggactcgaagggcgggtagggggttgtttcttacccatgataacaaaagtgagacttttggcactcccctccttcaactcctggtctctccctcattcatcattcccaggaaggccccatttgtggttcgaggtggccggcggaaagtgctggtatctacaactctggagaacagaaaggaaaatgcttacaatacgagcctgagtctcatcttctctagaaacctccacctggccagtctcactcctcaggtgcctttggaggagggggtgtgggagaaggaaagaaaggaggaggaagaagattggggtattggcctcagctgtgaggtcctctagagaaaggctcagtgtttagaggctgtgggtaggacagcagttgcagccccagctcsagcttctatctccattcccctgccctcagagagagagcccaataaaggtggaatgtgccgccccttctgctcatgcccggctctgcagtgtggggcatcctgtcttccagactggagccaaggtgggttggggtctaggatgaaaagagggctctaggagggcagaggctgggatctgagggtcctgggacttcagggaagggggcgcacaagggctcctgttcctctgtagttgttccatgaggaagactctaccattaccctgtgtcccctgcccctaggtgacctttctgctagagtttgagtttagctgctcctctctcctgagccaggtcttcgtgaagctgactgccagcaggtgagaatgaagggaactttcttccagacctctcctcctactgagtcttgactggaggggtggggaggaacaayattgattcctctattaacagagaagggtgtcttctgaggaggggttgagatgtgagcctctcccctctgaccctacagtgacagcctggagagaaatgggacccttcaagataacacagcccagacctcagcctacatccaatatgagccccacctcctgttctctaggtatgcccagcttctagggtgggacccagttctgacctcagactcatacccttatgctgcttccctccccttccatgtgcctcagtttttccaaaaacccaagcccttgcggctgctcagtctttttgccctcaatcctattcatgctgaatcttcccttwtaagcatcttactttcctaggtatagtgttttgccaggccttgggcactggagctgggatgaggggatatgggatgtagccataaagcttgcattgtctgtgtcatgttctacttctgtcttctccatgtacccccacctctttatccatgtgctggccctgcctcctctgaatccacgtctgtgtgctgatcatrtgcccctgtgtctgtgttatggctgtgaccatgtacttcctgacttggtgttcacacagtgagtctaccctgcaccgctatgaggttcacccatatgggaccctcccagtgggtcctggcccagaattcaaaaccactctcagggtgagaagctggaggggtcttggcatgaggagaatgtgggggaacaacagctttgtgggaaaaggatgggaagggtctctcttggattttaatggtatctagggtgaaggggaacaaatgaggaagggtcttctgtctcccacttcttcctattcccaaccttcctcttaggttcagaacctaggctgctatgtggtcagtggcctcatcatctcagccctccttccagctgtggcccatgggggcaattacttcctatcactgtctcaagtcatcactaacaatgtgagtctggtctaggagggcatggaatcctgccaccttgagctggtggactcactgaagctggacaccacaccagctccctatctgttgggcctctgctcttggggctcttctctctggggggctttctttttacacatgtggcttattagagagaagaaaaaggtattataaggggaagaactacaagggtgtaggtatgttccaactcarccttgagtggctagcgccaccccatcaggagggtctttcaagttggatcttcctctaggcaagctgcatagtgcagaacctgactgaacccccaggcccacctgtgcatccagaggagcttcaacacacaaacagactggtatgagtcacaaaggggtgtccagagtgggaatgcaagtggagttgggtgacttgggacaagagggtaggaactggagtggggaagaagggatctttccaccccagggtcctgatctggagtgggaatgaaaatggagtcaggtgccttgggacaagactgtgtgaactagaggtggggaaagaggatgtttctaccccagagtcctgatctgtctctctctgtctcttctgttagaatgggagcaatactcagtgtcaggtggtgaggtgccaccttgggcagctggcaaaggggactgaggtctctgttggactattgaggctggttcacaatgaatttttccgaagagtaagcctttccttttctastactccscacttctgctcctttctggaactttagcataggttttggaggtagacagacccacgttcaagtttcacwtttgcctcttactagctatttgaccatgagcaagttatttcatctctctaagcctctttttcctaatctctaaaatgggaagataataccaattycatggggttgttataaagaataaatgaataatgagctggacatatggtgaacactcagtggaagctasttattatccttgtattttcctccactgaccattacttttttttttcctgaccattccttagtgctgtatcaatcaacatttgcaggatacctaaatttaatcagttaagaatccatcacgttcctattacgtaaaaggccctgtattaggttgacactgagaatatctccaacatttagcctcatgcctaactcattgtaggcgcttaacatatttttgctaaatgaatgaattattgatattacatgcaggatttgtactggggagtggtgggaagtaagattgtataggtgagagggatctagattacgaaaggcctctgaagccagggagaaaytgaacttaatatgacaggtagtgaggagtcagtgtgagttcctcctgggcagggaaatggcatcttaattgtaatggctgtttggcactaaggtcaatgttgtgctttcccatatctacctggaataacacaagatccctgggatgtcatcatatgttttagggaagttaagtccaataaaccacccttctccaagtctctgtccttctttggtatctttttttcactagtctattcatgctttcaacaaagatttattaagaaaccactacatggccgggcgcggtggctcacgcctgtaatccctgcactttgggaggccaaggtgggcagatcatgagatcaggagatcgagaccatcctggctaacacggtgaaaccctgtctctattaaaaataaaaaaattagccaggtgtggtggcaggcgcctatagtcccagctacttgggaggttgaggcaggagaatggcattaacccgagagatggagtttgcagtgagccgagatcacgccactgcactccagcctgggtgacagagcgagactccatctcaaaaaaaaaaaaaagaaaccactacatacttggtactctgctatctagtaggcactaaggacacaaaggttagtaaggcacagcctttaacctagaggatcttatagttcaggagtgaaaaacagaagtaaacaccagtgttggtgggggttaggaggaatgatttccctaaatcccagaggggatgacatctaaacttcaatctaaaggaggggtagaggtcagccaaaggaaagaggagtagaatgcatttcaggtaaagcaccagatgtattgattgtccttggaaaacaaacagcagcagcagatgtgaccaggggttttccatctattacccttcctctcttttcccattggtcttcagccttttcttctggtcttgagagccctcaacattatgcctctcagcctcaactttgctgttgggattccaaagaactatatcacctgataatggctcattttaaatgtcttcctatccacttgttccataggccaagttcaagtccctgayggtggtcagcacctttgagctgggaacygaagagggcagtgtcctacagctgactgaagcctcccgttggagtgaggtagggctggagaccgagtctgagagctgtgaaaataatgatgatgggtatgtggtagggccacccgtgggctttttcagaacgaaggcatctccatcaggcagcaggatcctagtgttccactgccgccattcctgcctcagtttctttcctttaagtagcaggaggttatttattctatttgggggctrgctttgatataatgtggggtgaggctagctgggttataggatgcatgtagaaaactactcttctgtccacgcagagcctcttggaggtggttcagacccggcctatcctcatctccctgtggatcctcataggcagtgtcctgggagggttgctcctgcttgctctccttgtcttctgcctgtggaaggtaagcactgctttagtggggagtgtggagcatgatgcccatgagttgagggatccttgattatagcagagagaacaggatttgtgctgggcagctaaccaggctgtggatgtcatgcccagatctccttcactgtaccccacaaatgttggttaaattattctaagccaaataaaataaatttgaattccatttttggaaacagaacaaaagtgaagacctcagataagtctgagagctactggcaaggttcccagtctaggcatttggcagtgacgcttatcttttcttctacagcttggcttctttgcccataagaaaatccctgaggaagaaaaaagagaagagaagttggagcaatgaatrtagaataagggtctagaaagtcctccctggcagcttcttcaagagacttgcataaaagcagaggtttgggggctcagatgggacaagaagccgcctctggactatctccccagaccagcagcctgacttgacttttgagtcctagggatgctgctggctagagatgaggctttacctcagacaagaagagctggcaccaaaactagccatgctcccaccctctgcttccctcctcctcgtgatcctggttccatagccaacactggggcttttgtttggggtccttttatccccaggaatcaataatttttttgcctaggtgcctgactcctttcagattccctctttatcttccctcacagtttggaaaggatgagggttatcttcctcgattcttccaccctctcactttcctgcctgttccccactccacaggagggagctgacgttggcttgaaaggagtaaagtcaacatctgctgctttcctgtggactctggtgattcatagagccggatggggagagtcaacaggaaaaaaggagggaggaggaaaagccacaagagacattctgtacaattccaaggaacagagaagcctttagacaggcaactgccatcccccctgaaacctgagacctgtagtgcactcgaccgccctcaggtgttggtgaaacagagctgcccccaggctcgctgggcataggcttcctgattccaagccttttctgggagcaaagccagggcctggtgcctgattttctgaagccaggagccctcaggtggctggagctggaatagcagggaggactgggtgtacctaggcagtattttctctacttctctcaagtcttatactcactcttgagccctccttggggcctgcttagaaagcagacaggagagagagtactgctacttgatgatgggaaatgctttcactttaccagctttgggaagcagcagccccatgggatctaaaagtgtggagtctgcattaagaaacctacatgggtggcatggggctctggggagcaagcccttacttgctcagcactggttatgtagcacaaatagctcctaggaaaatgtttctggggcaaccctagaaccctggtcatattttgcagggtttctctggtggaatcagtttgccagcccttgcttgatgcttactggaaatctccaggttaatttctatctctgatccctccccaacccactccatatttgggtcatggacagtaaaggcagttggattctcayagacaactgggtaacttatatttctttgtaatcaagacttgagatatcgaagtcagttattggtctccagagtgcagctctgggagccttttgaagaatcagcactcattaagagctgagaagagagaagacctgattgggtggttgactagcagtcacagaacctgtcctcccaggctgttcctgaggcctgaccacagtatttattttggcatgtctctggccttctgcagaggcccaccctcatgggcattgtctctgtttcccagtggggtggacagtatatcagatggtcagaacaaataaagttcagtgtcaaatgacttttggctctatatgtattccctaggatatagactgctcagtaatagtgagaggtagatacttgttttgcctgggattttacagagtggagtccctggaaggcaaagttaagaagtattttaaatgttttctgtggctttcccacaggagatgtattctagcctcctgtaattctcacctgcttaagtgaccagaaagtataaaggtctgggaagcacagaggtttagattgaaatcctatctgccatttattagctgtatggccttcagcaaatcataacttccttgaggctcagataataaaaggctgtgtattacagtggttaacaatgaaggcagatttgggtttaaatctaggctacacaacttaaaaagtctgtttgacctaggacagacttaacttctctaagtcttggctttctcatctttaaacctattagggtcatgaagacaaaatgaaataatccaagaaaagtgagcatttagtaaatgctcagtaaatggtaactattattataaaactattttgtcataaaataatctaccatatcatgccttgtgaggattaagggagaaagtatactggagcaccaggtggtggtgttcctgctctctgacccatctcccagattgtgaagatgtgtttctacgtgctgttgtctcatccactaaatcttgtcctatgcctcatcttttttttttttttttttttttttttgagacagagtctcgccctgtcgcccaggctggagtgcagtggcacgatctcagctcactgcaacctctgcctcctgggtccaagcaattctcctgcctcagcctcctgagtagttgggactacaggtgtgcaccaccatgcccagctaatttttggatatttagtagagacagggtttcaccatgttgaccaggctgatcttgaactcctgattcacgtgatctgcctgcctcagcctcccaaagtgctgggattacaggtatgagccactgtgcctggcctgcctcatcccttttgaaataagctctttgagccctctaaggtgataattagctgaagaatttaaggttctaatggtagagatcaaatctatttgattccattaagcaggtatcttctaggctcctcttgagacacccagagtttttccattatcctgagagaacacgtgcacttaagcaatggccttctagagaccgagtctctgcctctattgcctaaccctgagaattgtggcctgtctggcctatttggcatgaacaccattctgtgtcaacctgctgagttgttttgtgacaggaaagggtttccattgtgaccctcagtgcacttcatacaggctgtaacttgatcagcctttatggagcacacagtttctagggctgagaccgcaaccagattatgttgacagactctcctctcctctttaccctcagtcagcccccaaatggaggtaggtttccttgagtactggttcatctaatgctcacacatatatacatatacacacatatatatgtgtgtgtgtttgtgtgtgtatacatatatatatatttaaattttttttagagagggggtctcactatgttgcctaggctggtctccaactcctggcctcaagcaatcctcccgtcttggcctttccacatgctgggattataggtgtgagccactgtgactgacctcatgtaattcttttttttttttttttaggattaatttcttttatttatttatttattttattttacttcaagttctagggtatgtgtgcacaacatgcaggtttgttacatatgtatacatgtgccgtgttggtgtgctgcacccattaactcatcatttacattaggtatatctcctaatgctatccctccctgctccctgacctcatgtaattctttatccatatgattaagagagcacttttaatatatttttccaactagagattcccctcctatccatcgtcagctccagactggggctttctctaaacccaatcttgttacccctttctttgcaatagtattagtttaagaagcaactgtgtattgttccttcctttccttgttgttgctcctttgcttcttcattaatttttttcattcatttattcatcagatatcaagcacgtaatatgtgcttgacaatggcaataatataaaacacaactaccatcaaagagtccagtccagtagcagaaacaaacatgtaaacaaatagtggcaaatacagcctggacgcagtggctcacacctgtgatcccaggactttgggaggtcgtggcaggtggatcacttgagttcaggagttcgagaccatcttggacaacatgtgaaaccctgtctttaccaaaaatacagaaacaattagctgggcatggtggtacgcacctgtagtcccatctacttgggaggctgaggtgggaggatggcacgagcccaggaagtggaggttacagtgagccgacatcacgccattgcgctgcagcctgggtgacagagtgagacactatctcaaaaacaaaaaaaaatggcaaatgcaaagaggtggttgctatatatcaacaagcactaggagtatgtcatacaagaggcatactttgttgggcggtgggggtggcggggttgtaagggaaaactttatagaaaaaagaaatttggctgcggggttgttctgtgcaggaaacgcacaaggggagaagaagagacacacacaatacctttaagggtaaacaagctttatcccatgtaaatggcaatggagatataataagcaaatggtacaagcaaattaatataataagcaaattatataataagtaagcaaatgatataataaacagattgatataataagcaaattgcaatgggaaggggagaagggaaaagatgtttacattcaccagactatggaggatttaccaccagactggaaagcaacagcctgggttccagagttgaacaccgcactcataagactatagaggattcaccaccagactgagaagcaacagcctgggctccagagttggccactcatccatgcacagacgaggagaggtctcatgaagttttggcgcagtctgggaccctagctctttttgtaacgagttgtttggcatgaggcccagtcacggggcccttggcgactgggctcaaggaacacaaaacattcaacttatttttgcaattgtctattgtttttcaataactaacgtgtaggaatagattgaaatagagatttctccaaaacagtgctggacgaacacctcaaggggctcacacaacctgttctgggacttggtgaccattgtttctgtccacgttcaattgagttcaaatttaatatttaacttttccaccgcagggatcaaatgtgacaggaggcattcttgggaggattaatcaccagctgcaaagggaattgtaaattagaacagtttgaggcctggtgctctgggagttgaggtgaggagaatcgcttgagcccaggagttcaaaaccagtctgggcaacatggtgaaaccccatctctaccaaatatatgaaaattagctgggcatggtgatgtgcacctatagtcccagctactcaggaggctgaagtgggaggatcccttgagcttaagaagtcaaggctgctgcagtgagccccgatcatgctatcacactccagcctgggtgacagcgagaccctgtctcaaaacaaaaaaaacaaggccaggcatagtggctcacgcctgtaatcccagcactttgggaggccaaggcaggtggatcacttraggtcaggaatttgagaccagtccggccaacatggcaaaaccctgtctctactaaaaatacaaaacttagcgggcgtgatggcacatacctgtaatcccagccacttgggaggctgaggcaggagaattgcttggaccgggaaggcagaggctgcggtgagtgagccgagattgtgccactgcacttcagtctgggtgagactctgtctcaaaaaataaaaataataataataaaaaaagaaacagtttgagtggctcttttgtgtgaaagtaatgagagatgggactgggaaagagggcggcagcgtatgactcctgaagagccttgtaaaccacttaagaactttgggctttaccctgtaggttttcatatgcattttagtgagctctctccggcggggagaggagaaaagaaagacaggaagaccagttggctgcgactgactgttcaagaattaccaagagcctgaacttcaagggcagtggaaataatgaagacagttttttgtttggttattttttgtttctatgcgggggcgggggcggggggggcagcttaaaataaaattgctctcctcgctctctgctgttttctaattcagatgtgcgtttaaaaattgagcctgggccaggaatagtggtggctcatgcctataatcccagcgctttgggaggctacggtgaggagaatcgcttgaggcctggagttgaagaccagactgggtaacatagagacactccatctcttaaaaaaaaaaaaaaaaaattagccaggcgtggtggtgcatgcctgtagtctcagctactcgggaggctggagtgagagaatcccttaagcccacaagttggaggttacggtgagctatgatagcgccatgcactccagcctggccgacagagggacagattagagacactgtctcagaaaacagaaagaaaaaataaaattgaacctgatcacctttccttaggttttgtcccccaggttaccgtgggccgcgcattatctctgctctgcttaacactacaatctcctatttccgaactgctctcttcaaatgctcttttttgcttgggtttttggccggggaatagtggcgggggagaggcggggggagttggcgggggcagaggtaactttaccagtgattaaatgcaaatgcgacagtccgtgagaccgaagcccctggtagaagccgggaccctcctgcctctggctgccgctctccgaggggcggggctgaggcggggcttggggcggaggccccgcctggaactgagggtggggcgggtccgggtccgggaggagtctcagctggagcccacccggttcctttcctgattgagcaggtcggatcccagggtgggttcagatttgaagggcgaggttcgaggccaagcccccgtcgcagcctaagactgcgggcttttctcctctgcagggatggggtagggcagggccaggggcggagttttgagcccagcccttgggttcttgcctctgattgagcagggcgggttctgaggcggatcgtggggcggggcccgctctgctttttgacagctgtctcttgcacagccgcagccaagtccggtgggttcgggaacctgtggcccggctctctgcgcgtccccatcccccgtggccccgaccccggccatgaagcgtatcttctcctgctccagcacacaggtggcggtaggtgccaaaatgtgtgggaggatggggttgggatcccagctctgtggtgacagaagtctttagtcccgtctcaatgcatcatcgccttttctttttatcagtctttctagctcttctagtcttgcaaggaagcccgccagctttgccttcctcaagaccctgccctgcagcttctgacttgccctgctcacctctgccatccccaaggccctttccccggcccctttcttgtcctcctagcatctacacccccgatttctggttcgttttctgcaactctgtccccttcccatggccctgaccctacttctgctccgtctcccagtaccaaacctcccccaagcatcttcctcagcccctgcctggcctcaagctccattctacaccaccaagtcatgccccagagccccatatttcatccctgccctgtccccgcaatcttgccttccacgtagctctatccttgctgtttcctgttagttcaacaagcactcccagccctgtgccttctg

SEQ ID NO: 5693 - DNA, 18913 bp, Homo sapiens
tcactgttattttaggatagctctctgccaaagaccttttattatacaaaagttgagaatgattgaagttattttgcttaattttttgccactaaatttgatgtgccaaagaaacttctaaaaaacaaaaaagaaatgcataatattcccagctactcaagaggctgaggtgggaggattgcttaagcccaggaggtccaggttgcagtgagccgtgattgcactccagcctgggtgacagagtgagaatttgtctaaaaaggaaggaaggaaggaaggaaagaaggaaggaaggaaagaaggaaggaaggaaggaaaagcaagcaagcaagcaagcaggaaagaaagaaagaaagagaaagaaaggaaagaaagagagaaagaaaggaaagaaagaaaaagaaagggagaaagaaaaagagagaaagaaagaaagaaagagagaaagaaaggaaaggaagaaagaaagaaggaaaggaaggaaggaaggaaggaagaagaaagaaagaaagaaagaaagaaagaaagaaagaaagaaagaaagaaagaaaccatgaaggtagctgccgtatttctatgaaaccttccctccagaattagttccttttagcatctcattcagacacatggaaagcttgtttaaaatgacttcacaaattagacttaatgaagtgacttgactcaactcccctcaccctcaagtggtctttccctgcatcagagtccctttagtttcggatgtcactcatgacatagaatgaacatttaaaagatgaggaggcagccactggctatcacatttttctgagatgtgtgaaatatgattctaatattaataataataattaacaaacaataatatcctaatataattattaatcatgaattattaatacataatcatatcattattttctcttagtctaatttataggttcagatgtgtgcatgcatgtgtgtcagtggcactcagagaggagatttaaatagagagtgggaagggagataaaagataactgctgcagcactggagcaagaagccaaggggaggtatccgttaaaaactttttgggatgtgaaccttttgtttttctagattctggatgccggaacatctgttttttgagatgcatctgtaggagcatttttgtgtggaatatttgaaagttatcttgaaagtaaaggtcagagacaggaattgaaacagggcttaattcttaaacaagaaggtataagatattgcagttgatggaactgtggtgagcatgttccccaagggtggtgagcatgtctgtgtgggcatagaagatacatgtacgaacatttttattttattttatttagatggagtttcactcttgttgcccaggctggagtgcagtggcgcaatctcggctcaccacaacctctgcctcccgggttcaatgattctcctgcctcagcctcttgagtagctgggattacaggcatgcgccaccatgcctggctaattttgaatttttagtagacatgggatttctccatgttggtcagggtggtctcgaactcctgacctcaggtgatccacttgcctcggcctcgggattacaagtgtgagccaccatgcccagccaaacatttttatttttaatagcttaatgaatgtataatgattaaatgtttagcatgtattaaactatgatttcatgtagtttttttaaccataccaaccatgatttcatatggattatttaagcataccaaccataatttcatgtacattattgcttaagatagtaatgatataaaattttcttaaaattattcatgtaaaagaaacaagtcagttaaaaggaaaatattaagtaaaaatgtacaggtggcacccaaatatggtaaaaattgtgaagcagtttaatgaataactgaactttgggaaatgctagattagagaattggaaatactcttttaaataaacacttgctatctatgattatcctatggatgagtgtccaagaaatagagatgcatatgttgtatgtttttaaaatgtacaggatgaatttacattgaccatcatatttcctgtgctaaatcaaccattattttttggactatagggagaagctgtgtttcttcatagctcctggagatgtgtgatgtgtcacaggcctaataactatattacacattttttcacaaaagtgctacatagagtagaaatgtataatagttaccaacccaagactaaatcaggcctagtggtgtggatagcttcactttgcctatgataaaatacttcctcattctttgtgtgattttcaagcaacttaacgactgttagctttgctgagctaaatgcaacatctcataccaartttattggcttggcaaagttacaaattttattacgcaaaagttgagaaaggaaagctggagaatgctaaaaacagtacaatttgctactgtgtagtatctgtattgggggctcagcatgttttatttatagatatctattaatacagagatacagaaagaaatacataaaaaatagttttatcaaatactttccagcattcaagtgtagcctcaaaagcaagaataggccaggagtggtggctcacgcctgtaatcacagcactgtgggaggccaaggtaagaggattgcttgaggccaggatttcaagaccagcctaggcaacatagtgagatccctatctctacgaaaaaattttaaaacttagctgggcatggtggcttgagcctgttgtcccagctactcaggaggctgaagtaggagtgtcacttgagcccaggaggttgaggctgcagtgagctataactgcaccactgcactccagccttggagacagagtgagaccctgtccccaaaaaaattaaaattgagaaaaaaaaaaaggcaagaacagccacagcaaactttctattggggaaaaaaaaaaatcctcctctttacatctctcccttccttcccttccctttctgagagtgactgtggccaaaaggagcattttccccctgcagtcctctgaggggtggggtggggctatgaagctatccttcatattcactcctttgtccagctcttttcacctctagttcttctccccgcatctctgtctagcagtgccttaagtggaggaggggtgggggcatcaagcttgtaaaactggtttgttggggttctccttctcccctcatttcttgattcttgggaaaatgtcttgctgggaggctgcctggcagtgccctagctgccttctgtgggcttgaatggggcttccctctgcccctacaggaggaaaagggagctgctgccagagggagaaatggagagatggacagagaaggcaggtgccacccctcgcccctgacacacaaagaaaaagacacggaaattctctctctctcttctcttctcctatctctctctctctccctctctctctctctctctctctctcacacacacacacacacacacacacacacacacacacaggcgcgcgcgcgcgcgcgcaggcacacgtcttgcaaattcaggattcaaagagacaggggcaccattatatttggcacggtggggcccttccaggtctgaaatcctgcattcttccttactatttactttccccgagctcgagaagggccaggtgtgggcggatggctggccacgttttgtgtttccaattcatattcacgggatgacacagacggggcgtggtgagtgctgttggaggcgcttgggcagtttcattttgccccacttctccacctgaaggctgggcgttgctggaacctgcaggggcagcctcagcaaggtggggtggcgtggagtggggtgggagaagggactccagctgaagtagaacccaggctggacctgagaatattggggagggcatgggcggtggtttccgggtaggggccttgaggacatgttggtcctgactgttgtcagtgtttggtcaaagttgccaaaaggttaaaaaaaaaaaagtagggggagtccctgccaagacatatttcccaggccacctttcttccgcgggagtgttgggggggaggcgctgcttggaacctgtgaatgtgacatcagctctcctctcctctcccaaggtcggctttggagagggaggtcagggcacccttgcctggcacaggcggcagcgctggcttccggctcagtgccgcctgyyctccgggagctgtggcctccctgggccccggggctaggctgaggtaagcgcacagcggaggccaggggccccggcagaggccckggggatagggtggaggcatctctgggtgtgggtgtgggtgtgggtgtgggagggagagttcttgcctctctctctcccatctccaactcttgcttcagtggctcttttagaggatgcatgtcattatggacctgtcgctgccactgtccctgttcccccagctgtgacttcgagggaggtctggggatctgagtctgtccaaacccacggctttgctgttgggataaaaactgtccttttgattttagaaggaggagggaaaaaaggtttcccagcatgtgtgttgtgccagtcttggaaattcatccgtgcttgaattccaccctccatccccagaaaaactggagtaaaacaaaaagaggagatggacaaagtgtgtatttgatggcatcccctgggaagagactctaaatttatcccataggtcttactgggccactgtgagcgctttggtggagaacaaacaaaaattctgggtgctcagttgtctaacctgaaaaatgggactagcggaaaaagccaatgtgttccatgcaccttttgctttctttattaaggcatgatgtcacctgtacagtaactgccctgtgtgtacttcagggggggatttcaaggttagatagacaggaaattgttttgaaaatgtaaacacattattaaatgtgaagtattatctgattccttgttcgaatggcatttccttctcagcaccaccttccttgcatattcacttaaccttgtacaagaacacctttttgccctaaatgaagacacccccccaaaaaaaagagtcccagaaaatatgtccctgcttgtgcggggaataaatagaatattctgaggtgcattcctccttcctatgttaggcaacattccttgaccctcctcggcccccaagccaggttgcgtttttttctgccatttagaagggttttcctttttgtcctagtaaaacatcagcccctgtagctcttcatctccccctggtgttcttctcccgccatgtcttaagattggtggcaccgaccaatcttaagatttaagttctgtgtgaaaaacacctttgcttttcaatcagtttatcagcctcctccgcaggggaagtgtggacacacaaaagaacttatcggggcttctcatcagtgatagggaaaagactgggcatgtgcctaaacgagctctgatgttatttttaagctccctttcttgccaatccctcacggatctttctccgatagatgcaaagaacttcagcaaaaaagacccgcaggaaggggcttgaagagaaaagtacgttgatctgccaaaatagtctgacccccagtagtggggcagtgacgagggagagcattcccttgtttgactgagactagaatcggagagacataaaaggaaaatgaagcgagcaacaattaaaaaaaattccccgcacacaacaatacaatctatttaaactgtggctcatacttttcataccaatggtatgactttttttctggagtcccctcttctgattcttgaactccggggctggcagcttgcaaaggggaagcggactccagcactgcacgggcaggtttagcaaaggtctctaatgggtattttctttttcttagccctgcccccgaattgtcagacggcgggcgtctgcytctgaagttagcagtgatttcctttcgggcctggccttatctccggctgcacgttgcctgttggtgactaataacacaataacattgtctggggctggaataaagtcggagctgtttacccccactctaataggggttcaatataaaaagccggcagagagctgtccaagtcagacgcgcctctgcatctgcgccaggcgaacgggtcctgcgcctcctgcagtcccagctctccaccgccgcgtgcgcctgcagacgctccgctcgctgccttctctcctggcaggcgctgccttttctccccgttaaaagggcacttgggctgaaggatcgctttgagatctgaggaacccgcagcgctttgagggacctgaagctgtttttcttcgttttcctttgggttcagtttgaacgggaggtttttgatccctttttttcagaatggattatttgctcatgattttctctctgctgtttgtggcttgccaaggagctccagaaacaggtaggcaygctcgttgacttgtaagtctcggaattacaagttagtgtgttcttatccaccttcatgcttttcttgcttctatttttccccgttctttttatgactgcagcttagagagcaagtgtctgagaattattgctgaaasstactttaagtcttctagtgtaaaatgtaaaattcctctaytgaatacaattaggtgcaattgactataacatgacattaaaataacttatcgttttattattattattccattatrtgtttccttggcttttaaaaaatgagaagagtatggacatatacaatttagtcaaatgtatgtttgtaatatatgtgtttatacaggtacacaggccatataggaacttaaatcttatttaaacactattttaatagtgtgttaacgtgtaaaatatttaagcattccagcttgaagccaaggaattgtatccagtcgttcaagcaatgtatgttcagtaaaatcacctgcagagcaaaagtctgttgactaactaccgcctccccsscccccgccaccaccccccgcaggcggtttctgggtgaagcagatgttttctttaaaatttgtcatcattgactttaggtttcttttggcaggtttttggcacccaaaacagtgtgagctctcttttcagctttattcacctgtgctgggaggggagctaggataattcttggctgccgaaggatttaggcagtgcgtgtgcatctgcccgggtcccccccgtttttagggtcagtgcactttttttgtcttttcgtgaccctgactaaagagaaaggatgtcaagggaatgaaaatcctggaatgtgtctgatcatttgaaatgtacaaaattgggcagataagctgcatggctaaattgttaggaggaagaggcaaggcagtagtggagaagggggaggcagtggatcccacacaagcctgatgcccagggattcggaattcaaaatccccccagcctaccttcagtcccctgacctgcttctcagccccaccttaggtcactggtttctatggagttaccctmctgaattgaatattgaatagttaatttctctctccaatcattttccccacctaattttgaaagatatacatcatctggggtaccctgtgccctacacagcatgtgaagtggatgggtaccccctaaagagagggtcatcctgaatggggaagtggccccaaagctaggaataactgtgatttcttgtctttagtcatgtgccaatgttaagtaagcttcagtggatagtgctgtcctaccaagttccttgtagaagccagccggattttcaacaggcagcattccacagcatttccctgagcctgcttcaagaggggtgggggaagtcccttttcaggtgtttatctcctctgcatttgtgtaatctccctgaaggtggataagccaagggcatgagggggaggcaaaaggtgaactcatgttaaggagggaaaaaaataaagagcccttttttctgtgtttcttgctgatggcaggctgtgtgcttcatctgcttttatctgctctgctagctctgmctctactgtgatccagcatgtctctcgrcgtttgaggagacatcccccactgacctgctctttctctccccagcagtcttaggcgctgagctcagcgcggtgggtgagaacggcggggagaaacccactcccagtccaccctggcggctccgccggtccaagcgctgctcctgctcgtccctgatggataaagagtgtgtctacttctgccacctggacatcatttgggtcaacactcccgagtaagtctctagagggcattgtaaccctaktcattcattagcgctggctccactggagcccagttttagagtttcttttctagggactctgaaggtagtccttctaacaccatccaagtgcctcagtggggacagtttccctctattcctgaaaataacgacagcttcgttcttagcaaccaaggggagggtcttctgaggccccgtagctcaggctactcatgatgggacaagcaggaggccactgcacgtttcaaatgaggaactttcagtgagagggcctcagggggacactctcacagtggcatctgatggggtttcgggaataattgccgaggtcagatgtgggttagtgcaacctgtgcttctcatgggagggtggagactgagaggcagaagtgatgatatagagggttagaatcacttaattttasttacagaaaaacctaggctcaaagtgttgaagccatttgtgcagragtgagtttgtagcagagctagaactggagcccggatttcctttgctgctatattttccctttagaaatgcccatttcagaactgaaatagaaatactgtccataggcttctctttcacctacagagaagaaaagcagatttcctccttctgccctggacactagttcatcatctgtcggaagcagtcataaacaagcacacatttactatgcatacaatgtaccgttatgacaaaggaggaccaaaatccaaacaatatcaaaccacaccaaaaaccacaaggagcctaataattactaaggtgatacttccaaagggaggactttatttcttagatgagaatgaaaatggacacattggaaattattggagagccctctggctatgagtccttccacaaccatatggtaccaccgactggcaggagaaatgtgtgaacatgtgcctcctcctcccccaaccactggggycggtggggtgayggtggcacttttagcagtatcctccgtggtttgagttgaaaataagttttaaaaatcctgtgagtcatggttttgcattgaaacctcttcccactgtgtacccacaaatagttaactaaatagaccattagaaaaggaagaaaatataaagcagatgccaagcagagatgtcctaatttttgacaaaaaagcaatgttgcttgtgtcaagaagaaactgaactttgtgaagagttgaaatggaattccactgaattagaaaaacttgttttctcctgcctggatacatacagtcagggccattgatgcacaggtgttcctggctgttgttacactttaccctctgaaatgatgctcccaagtgctatgtgatgagctccttgtgtgcccagtggaataggtgtgtccatgtgtcattttaaagactattaatyacactaatatagtttctttctctctttggataataggcacgttgttccgtatggacttggaagccctaggtccaagagagccttggagaatttacttcccacaaaggcaacagaccgtgaraatagatgccaatgtgctagccaaaaagacaagaagtgctggaatttttgccaagcaggaaaagaactcaggtgagcagaaacacctttgcttttcaatcagtttaacagcctcctgaactccttcctatcatggtactgccttcctgttttagagagactaacagagacattgaaagtcagggtaaagctgaatataacattgctgaaatgtttttccttgtgtattttaacagggctgaagacattatggagaaagactggaataatcataagaaaggaaaagactgttccaagcttgggaaaaagtgtatttatcagcagttagtgagaggaagaaaaatcagaagaagttcagaggaacacctaagacaaaccaggtaagagggaaggaagaaaaattaggtaagaggttcacaagaacaactagccccagtcagtgatgccagcagcctgttcctccagcccttcttacccgggcaggtgaaagacttagaaaacagtagcagaggagatctatgcatcctatagattaaaaggagcaaaagaatccctcttaaatatttccatgaagctctggaatgcaaaccgatgtcctctgtacytttagcacataccatttcatctacaggtagatttcccaaccaaaatatatccagagatgcctttgtcattgggttatatacagcctttgcctctctgagtcaatgtatttaccactttccctgagaaatcraaaatcattttggggagcggacatttagaaaaagaatcaaagtgtcatggataatcaaattcttcaataagttgcagttattcagatggccaaaggaaaaataaagtcattagatagggttggtagaatttagaacatgctgtttttcaggtttatggtctttttttttttttttttttttttttaaatagggaaatgtgtttggtgcagagccaatgtcattccaaaaagctctctcttttcctggtcagtcatgtgctgggacagagaagggatctggattaggcaacatcatagagttgctctgagctgctctttggtgataacccttccaaatcctaaactttttggaattcacaagctcaaaggaggaaacctactctctgatctaccacatgttctgcatttttctatcatggtctatggaaacttctcttagaaatccagtggcaagaagttctatgattaaagtrttctgagctcaggccaggcagtcatgaactacttctgagttrtttactactgatttgtggggcagcctcagctrtcggtttcttcacacctgcttatgagagtatccatatttatggtcgcaggccagtaatgctccccacgagatcagtttctgaactaacctggaattttttatgggtttttattatgccaactattaaatcaacattacagttcttccctctgtatttctcctgtaaaacattaggcctgcaaaaaaaaaaaatctttttaaaaataattgccataaagtatttgctctgggcctactgtatgcttcttttctttttctctcttttcaactaagtcaccrtcaatttattaagatggccataactattcaaaacctatgctgagttcctcaaggcagggtcrcatagtgatgaaggttgggatggggctacggaagaaaccagaacaactctagtttatttaaaacctgtatttactgcccacttccccttagacttgaccatatgacccctygctcccattctaagcrtaggggcaggctttatttttacaatggtaatagatatcacttgaggttttatcaaagagttgcggcgggtggtgaaagttcacaaccagattcaggttttgtttgtgccagattctaattttacatgtttcttttgccaaagggtgatttttttaaaataacatttgttttctcttatcttgctttattaggtcggagaccatgagaaacagcgtcaaatcatcttttcatgatcccaagctgaaaggcaakccctccagagagcgttatgtgacccacaaccgagcacattggtgacagaccttcggggcctgtctgaagccatagcctccacggagagccctgtggccgactctgcactctccaccctggctgggatcagagcaggagcatcctctgctggttcctgactggcaaaggaccagcgtcctcgttcaaaacattccaagaaaggttaaggagttcccccaaccatcttcactggcttccatcagtggtaactgctttggtctcttctttcatctggggatgacaatggacctctcagcagaaacacacagtcacattcgaattcgggtggcatcctccggagagagagagaggaaggagattccacacaggggtggagtttctgacgaaggtcctaagggagtgtttgtgtctgactcaggcgcctggcacatttcagggagaaactccaaagtccacacaaagattttctaaggaatgcacaaattgaaaacacactcaaaagacaaacakgcaagtaaagaaaaaaaaaagaaagacttttgtttaaatttgtaaaatgcaaaactgaatgaaactgttactaccataaatcaggatatgtttcatgaatatgagtctacctcacctatattgcactctggcagaagtatttcccacatttaattattgcctccccaaactcttcccacccctgctgccccttcctccatcccccatactaaatcctagcctcgtagaagtctggtctaatgtgtcagcagtagatataatattttcatggtaatctactagctctgatccataagaaaaaaaagatcattaaatcaggagattccctgtccttgatttttggagacacaatggtatagggttgtttatgaaatatattgaaaagtaagtgtttgttaygctttaaagcagtaaaattattttcctttatataaccggctaatgaaagaggttggattgaattttgatgtacttatttttttatagatatttatattcaaacaatttattccttatatttaccatgttaaatatctgtttgggcaggccatattggtctatgtatttttaaaatatgtatttctaaatgaaattgagaacatgctttgttttgcctgtcaaggtaatgactttagaaaataaatatttttttccttactgtactgatttggaatcattactgaaatttgtaaggagtgggccaacgtgattaagtaccataaaggcaaataaatggttaaagacggtttcatagaaaagtgacaattagaaggatattacggtctaagctaattatataaagaattttatctgtatcttaaatgttgattttatactgcattgaggtaaaaacacaaaacaaaaaagcagctttaacacctctgtcttctcttgggtagcagcctcctgcttctccttcacctgaaaaattctccagggacttcatccattaacttggctcaggctattaggcaggattcaacagtttaagctgatggtgtggtgagagatgctttatccatattaatggactgaaggaagtaatggcaagacaaccccccaaaacatacctaattatacaaagttatataccaaagttgcttttagaaaatggcctgctcagagcaagtagaggtttccaatggctttttattttctcacattaaggatgttgtttcttaaggaacattgagtaccattgcttcttcgtgatagcctaggactggccgtgtgcccatggaggtagagacaccaggtactgattctaggtcctctgccacaaagcaccacttcctctccactttgccttggctggccttgtcagctcactggagagcacagtattgcaattgcagtattgcaaatggtcactactaactgaattctctaagagcttgattagccctcgagaatcttccttgcccttctctaatagtgtctgaaggaattcctggcatttaacaaatattagcatgtagtgatcactgtcgtcctaacagtgacacatcagaaggatttcaaataacagtcttcaggcatgcgtaatcaatgtcctgtgcagagtctccgtcctcattgatcctcatttttctctttaaggcacagtccaatgtctttggggaattgtttataaagcttactttatccataaactgtttctcagtgcgtgactctgaagaaaattttgaagttttgcccatgttgacaaggtgcttggtctgaacttggccagtatttaatcttgagcaaacgattcaatttccttctatcgtgagttttctcatctatgaaacaagggagttgaggggagtttctttcatacctctgagaaagagtttgagattacataaagaagttgaagtggcatgaaaaaaaataaagatctgagcttagaagacatggatctaatacatttaagaggaagtcagaatcagagaagccactgaacaaaacagtccaaaggacagcatagtaagtcagattgatgagttttggttgggtttttcatcagtcaaacccttgagcccccctttcccatgcttcctgcttcagtatccagtaggaaaaatgaaagggatgatgtagacactctagggcatgaggatttgcagtaaataagttgggagactcacagaaaattaatatttttcaaacatgaagacgaaacattcaattatattacagtccacatcagcttgaagggtaaactgatgggatggtctgtcacatttcttgctctgtttccagtaaaagcatggtttctggaaacccacttaggacagctttctctctttacactgatagcccaggcaagctttgatctcagaactccagaaaccagagaactctaggtggaatgtggtaacttttgccagggcagagggaacacctactaataggtacttcatttgcaccaccagagattggcatcttttttgatggatccactggctttgatactgcctgtactcccccaaaacacagcttgggtattggactaatctagagctccctcaggagaactcttgctgacattaagaaagagcaacattttgtctttccaggtgaaaatccaaggcccaaaaagggaggtgactcacctaagatcacagaaggagctgtagcatctctggagcctgaacacttaagttaagcacgactatttcagccagagggcccctggaggtctgcagaaacagatgcccaggcaaaccttgctagaaggctctgggtactaaagccaaaatcagtctttctgaaagctttgcctcccagccttgtagacagtgctagcagacccatcccctcaagaggaaagagaagaaatgcaggggaagaaaaaaggactataaggaggctatctcatggcatcgttaagtaaatgtctataggataaaatagaatataaccaagaatttttaattattatttttagactttactcaccaaagaatctatctgagtgaagggggaaatctctcggtcagttctctttttttttttttttttttttttttttgagatggagttttgctcttgttgcctaggcaggagtgcaatggcgctatctcagctcaccacaacctctgcctcctgggttcaagcgattctcctgcctcagcctcctcagtagctgagattacaggcatgtgccaccatgcccggctaattttgtatttttagtagagacggggcttctccgtgttggtcaggctggtctcgaactcctgacctcaggtgatccgcccaccttggcctcccaaagtcctgtgattacaggcgtgagccactgtgcctggcccggtcagttctcttttactctacaatgcaaggcagtggtctgcttttttttttccccctctctgtttctaaggtcttgaaaatgcctgttttcacatttaagttctcaatgtgtaaaacactgctttcaagcttatgttcttaatagagtcccttctgcattggctttatctcacctttatactcacagttcctggggactttgggtctggagctcagaatttatctactgcaagtgaatgttacacatttcacagtaacctctcatctttgtagataatttggtttcctgtagcttttcacatcctttctctcattcgacccctaccctcacacaacaatcctttcgggaagctggaaccatatcatgtatccatcagccaaccaaggaaagagacatatcgagagggtgagtgactcatccagagtccaacatcaggcaaatagcaagaccagaacccgggacccctgaccctttcttcttaaactcctccagagccaaggggatacactggacctgcaacttggactaacgtagattatttccagcttgtgagtgaactgtgagtggaatgaacttgttcttattctcttaggaagatcaaagctccgtatgtaccctgagccctagttttgaacgtctctgtcgtatgattatttgtttactgcatcattcttgttatgacaatgcatggttggcagaaaacttgctggcatttacaaagcttgcctcaaatctggtgccatgaagccatgacaacttcattgacaactactggccacagagccaatacatcggaggaaatagagtgatgaatgtgatggcagcggccatcaaatttcctcaaatcttgggcagtaatcagagagagagctagggctggtgccactaggtagtaaaaagagaagggcttcggccttggagacaatgaatgatggaaatgttgggtcccagggatgacaggctgcccgtagctcagaaaggcagcacatcgggagtccggcatgcagttttgcccgtttagagttttctgggtttctgcatcctattgttatttttcacattccgagtcattccagtccccttctgtgtaagttgctgtggaagtatccagggctaataatcacaatattaagcggccattgacatggcatgggcactgaccaattagaaaaagctgggacagagctgttgggcaggctcctgatagactctggctgggctaggtcttcaacctcctgatgttggcctgtaggggaccttgtgatctgggacaggggtgggcagccagggtggaatttccaagcttcttgttgctagggctatttactaaccaggatgaaatcatttcactgttttacagactagaatagtctcactggtatgtgctcctgtgtacgtcagatttaaaagtatcgaaaccattctctgcttgataaattattctctttacagcttcactgagtgagatgacattatcttcatgcctgcggaggtttggcaccaaatctttctgctcatgcacctttggtgtcctgctgcacagtcatctctgggcaatgcccctctctctgcatgttcccctccctcgtgctctggtgccctatgggagaagtaaaaagaccttaagggtctccttgtctccttggagattttactttaaattttttttttattttatgtgttttctatttcaatagctttaagtggtacaagtggtttttagttacatggatgaattgtgtagtggtgaagtctaggattttagtgcatcccttactcaagtagcgtgcactgtacccagtaggtagtttttcagccctcaacccctcctatcctccccaacttctgggtctccaatgtccattataccattctgtatgcctttgtgtacccatagcttagctcctacttataagcgggaacatgttgcatttgattttcaattgctgagttacttcactaagaataatgacctccagttccaaccaagttgctgcaaaagacatcatttagctcttttttatggctgaagagtattccatggtatatatatattacattttcttggccttctcatcagttgatgagcacttaggttgattccatacctttgcaattgtgaattgtgctgtgataaacatactcacgcaggtgtgtttttgatgcattgacttcttttcctttatgtaaattccaagtagtgggattggcggatagaatggtagatctactttttagttctttgagaactctccatactgttttccacagagggtgtatgaatttacatccttcttggagatttttagcagggcaattttgtggttgccaaagtcaagatctgccttagaccaggtcttcctagggccctagctctgcaataggaaggagcaagagggacgagctgcctgtaagattaaatcttgccctcttagattaatttgggactaggaaagggtggccccataatttactatttaaactgggacatatttgacagcacttagtgacattcttaacaattctcacggagctacacattggactgttgtggacaaacttggacatatggtcatcttagatcaaaataagccttgaatcagttcagaatttcagaaccgcctttgcttcttggatgtgcttggcactgtgtaagcacacgcaatgtctgtatgcctttacctgcagaccaggctgcagcagagcacctcccccttttctggtgcctacagcctcaagttcagagcttagggcataatatatcattcaataaatgcttattcaatggatgaataaatacagaggtgagttccactgttcagtaagagcggggtgaaagtgatactcttctagccagaatgcgactagacaacagaagatttataagacccatttccagggctctctttgcagagctgccatagctgaaatcttcttttattgaggctccacgctagtggtaaattatttgacacaatggggtattctttctacttctttctactccaacccatcctgcatttcaccataatcataataacaataatcttctccaaatgctttaattataatttcaataaatacagagctagaaggaaattaaaaataattttggctattaccctcatctcaaaaaccttccactgccactctgcctatacaataaaaatatgctatctactgagacaggcaccagactaggaagaaaggttgggaaatgttacaatttcagtattgagcatattaagttttaaatttttcatcatagtgtgaaagttgtcagagtcaaatgaagtcacctgtgttaggaaccctgacaaatgga

SEQ ID NO: 5694 - DNA, 61177 bp, Homo sapiens
  misc_feature (1)...(61177): n = A,T,C or G, or insertion/deletion polymorphism (see Tables 1-2)
attcaaccttaacccaaagtataaattaaatatccacaagtccttattgatatagtgattaaataaatcaattggaaattaaagacaaatttcccatgtggaggaattcaaataatttacgtagctactccaccctcaaggaggaggaacataactcctcactccataaatgtgggatgtacatagcatttccttccaaagagtgcactatgaaaaaaagggtgaagaaaaacaattaactttacaatggagaaatctgacaacactgctgagccaggtgatcaaagtcaatgtaaatagagataaatcatgttgatattatgtacctctgatgtaatgtggtatcaagaaaatagcactttacctctgtggtattcctcctccaaacttaacaacctcagtcaaatcatgagaaaaataccacaaaaattcactagaggaatatcttgcgaagtatctgaccatttctcctcagagctattacagccaagaggagcctaaagatacttgagaactaaatgtaatgtaccctggatgggagattggaaaagaaaaaaagaattaggtaaaaacaaaagtaacctaaataaagtatgaattttagttaataatatattaatattggtttattaataataacaaatcaactacactaatgtaagttattaacagaagtaactgtgcaggctatatgagaaatctttgtgttattttagcaatttttctgtaaatctaaaactgttataaacaataaacctattttaaagtaacatatacattatacaatgtgagaaaatataatggcaaaaaaagaaaatgcaagcacaaactatattccgtctctcagggataataattattaaggtgttcagtgaatattgttctaatcctttttctgtgctcatatgtatgtatattgtttaaacaagaaatctcaaaccatatctacatctgctgtttaccagactgcttcctttacttactaagatatggtaaatatactatatttacaagtttacatatttacatataccaaactatacaaaatacacacttttatagtattattttaaaatggcttcatggaattctgttgaattgatacgccataatttattgaactatttttgtcattaaccaaacatggtatccaaattttcactataccacaaagttccttgtgacaccatttttaatgttttttttttgtgcactttatgcctaactccacaagacactgttattaagagccagtgtgtttctccaccatactttctttgctcttcatcccttcttgcatctcagattttatctggggtcaatttttttctaattgaagcagatttttaaagatgtcatttggaggagtcctttactggtaaattttcagttttagtttttctggaaaatctctatttcaagtttatacttaaaagacatctttacagaatatatatagaatacttaattcacaagtattttctctcagcacattgaagacaacattctaatgtctcctaattttcattgatactgttaataatttagtagttgtctgcttctctttcttcttgaaaataatctgtcctctctatctagttcctttaaatatcttctctctctctctgatattctgcagtttaattatgatgtatctacttgtgtgtatgtgtgttttaaaaattatcctgcttaagacttattgagcctcgtgaatctgtggattggtatctgtgataggcagacaatggctccccaaagatcttaaatgtcttaatctccagaacctgtgatagtctaagttaaggttgtagatgaaattaaagttaccaatccacagacctcagggtaaaaagattatcctggattatttaggcaggcccagtataatcacaaggattcataaaacggaagagggagacagaagagatggtcagagtgatatgaagtaaaaaggattcagcttactcttgctggatttgtaaatgcaggaagggaccacgagtcaaggaatgcaggtagcttctagaagctagaaaaggtaagaaacaaattctcccctaaagcctccagaaagggatacacctgccaatactttcattttatccctgtgagaccagtgttagacttctgacctccaagagtataagacaataaatctgctgttttaagccactaagttttgtggtaatttgttatggtagctatggagaactgatacagtgcctttcaatagttcttggaaattcttcaaatatattccccaaatattgcctttgcaccactcactctatcctctatatctcttgacctctctttaacattttttattttcttattttggtaattatttaaaacaattggcttcttgttccacttcaaataaattcatatttttatatctacatattaagaattagttcataaatgtaattgttgtatcgtatatactttaaaaggaaaattgcatttatacttggatattattatattttaggttttgaaatttctttttttaaatgtctgataaatttattctgatcaaaattaaaatcttattgtatttacagtagtctactaaaagagtttacatcaattctctcctttaaatgctagcaattcagttttgtgtggtcaaagataatttagaatccttttatggtaactgatatgatacaaaggatttttttggttgttgtcaaatttgtatgtgcgtatatatgtatagggggtagaaaatttggttagtgactctattttggaaaaatgaatgttctttttggagttttagattcccagtgtttcaaaccaagtttgcttttgataaggaattcagtgaatctttattttctcgtagagaatttttaaacaatacctttcaaaatattgtatgtattcctatataattttgccttggaataaaaaaagtcatcacattaagaatatttttaacttaagaaattttttcaagattctttcaaaatgctaactccctcattgatttgaaaatacttttagagtttaaactattatgaccatgtagggataacttaaagtgtccttctaaatttttttttcattaatgtcatgcttctttctaagaacaaagtgtttcaatgttataaacagactgttttttcacatagctttcatacatcctgactttctatatctagtagggtaatacatttccttccaacctttagtggggtgaagttcatttgtcttctaatctaagaaaatacgttaactcctgacaayctctgacactcaacagaaacacaactgtactttggaattaatcatccatctttatttcatagtctccttatttatcaatgcaaatggaagtatagcaaatatttcacagtgtcatgtactacctaaggaatttcattgcaatagcattgttttgaaatgtatcatttgattttgatctaactatcatagatcagttttacccctgtatgttcagcctgaatgtctaaccacaatttcacaaaaatcaagggctctgttagttttcatacaaaattgtgatgacttattatgaagacagtcccaattaacaattgcatgtcatctgtaagaaatcaatttttttctcactccccacctgtaattttttttaagcaaagaagaatacttgggtctaggtttcaaggtttatttttctgtagtcctaatatcacttcagtaaattaatctgagactcatttttctaatatgtcaaatgactgttgtaaggattattataaaaacgtaaggtgattaacaaagtatgtaattgttccatagatggcagctcttgtttttttactgtgctttgcttctgccctgcttcacatattatgtaaaatagctggtgagttttaggaggtagtgctcacatgtttgcacagtgtttgctgtggacgatcaacagtaacagaagagcatacttcttcgatacacagagtttactgaatttggaaaggctttggcattcttatgtcatctgtaatgaaacaatctccagaagtcttttctaaaatgtccttgtaaaaagaaaaaagttatgtttatattttataaaaggatgatgttatttataaccagcagaagcagccttatttgaacatcttatgttgaaattgctacttaatacagtgactcataggagctttctagtggaaatcaaatgctcaaatgaaatagaatttagtttgttaggcaatagtgatatgtcttttattggttggactctggaaaacacttgacaacgaatagtactttacccgaagggcacgtatcatgcaccacatagcctaaccacaaacattaaaggtcttgtaactgtgagcctcaaatgaaaatacataaggacagctctcatacaatcaaatacaatacaaactagcttttaatttaaataaatatgtaagtaaagttcaagtgactataatgattttatatccctatgtatgtatcacagaaattgtggcaaactgtagaaatctattcaaatggaaagtaacaaagcactttcacattgccttgtattcaaaatccctactcttcataaaaacttatatttctttaacaaagctacttttctgtttaactcccggaaaacttcgtatttataacttaagggggtttctccaaccaaacaatttatttttgctaggtactatagctatattttttatacaaaatttgtgacagcaaatgaaattctaatcccaatagaagaacaaacaattttcatgtttcgatcttcatatatataattcaagaggaaatatgcttaactttgtagatttttacattttaaattgcattgtgtctgtatcaagtctactatcttttacctagattgtctggaagatttaagctcaaggttacggtttgagaaaagggttttgagagtgaccaggatagatttaagaattcattttatactaaaatatggccataaatatttttaaatacattcaaatagccctttgctggcacattttttcccttctttgccaaaacattcccacaggcggcctaagtcacctcattttataggtttagtaggtttagcaggctttatgtgctctagtagggttagtaggttttgttcatatcaggtctctctcatgggagtttccagggacaaggattgcttcagttagtatggccttagccatactagggtatttgctttaattctacagaagttttctaattaatattctgtagcaaaagaactaagatctggaattccccctcttaatctcttcctagaaatgagattcagaaaggacaggactgcatccagcctgtttgggaactcagacaaatgtgtgttgtcacagacacaaatagaggtctactatgaaataattggcttgctagtgtgctaatgacagacaatgctgatttgctccaacctcatacagtttcacacataaggacaatcatctatgtttcatgaaagttctatctactttaacattattttgaagtgattggtkgtggtatgaattaacagtttaaatttaaatcctaaaattcagtgtgaattttttataatagcataaaaattcaaagatgtccatacaagaaaaattaaaatttggttaggtttagcagagtttgagaatccttactaccctcccacatagtattgtaatgtgaatataggcagttactattacaggcataatgatgattatgtattaagcagaaagaagtatcaccaccagtttttttctttgaatgcccctcagtacttctgcatttataggatggtagactggtttggtttagctctcaaaagtgaaaacatttaaagtttcctcaytgggtgaaaaaaattaaaaagagtgagagactgaaaactgcagcccacctacgtttaatcattaatagtgagcccttcagtgaacttaggtcctgattttggagtttggagtctgacctttccccaaagataaacatgattgttgcaggttctgaagagggtcactccctcactggctgccattgaaagagtccacttctcagtgactcctagctgggcactggatgcagttgaggattgctggtcaatatgattcttcttgctgtgctttttctctgcttcatttcstcatattcagcttctgttaaaggtaagtttgtgttgccttttgctaaactttaatttccatctttggagttggaggcagatacgtgcgtgtgtgtgtgtttgtgtgagtgaatagtgaaagagtttctgactaaactatcttcaaaaccatgtaactttggaatgtttgtgaaagcatggctgagttgaaatgaaaaccaaattcaaatccctacaaacattaagaaaacagatatttcttttagtttcagttcctcagaccagtgtgttcttgcttcaatttctcattcatggtctgtttttaaaagaaggaaaaaagatacccactattgttacctgctgttgttggtcacattgaatgcagctccttcatttgaattgtaaatgaggattttttttaaaaaccgagttcttaaattttcttttagttgcttagcaatgtgacctcaagaagaattagacccaatgaaaaaggcatttgatttgccaaagaattatgaatgaaatggcacaacatatatttaattccgttacaattaaaaaatgatagaattcatagtgaattaaagaaaattaaatttcctgatacagatttaagaaataagacattatctttggaaaaataatgttgctacttacagtttctattttaagatgaaattaattttaaaaatacatatgaattaataccattgaaaaggcaagtgaaaaaacattttatgaggaatggtttcataaaactgttgtgaagtgtattaatatagaatcatgtttcagatcagctacattataaacatcggttttccaaatgctgcattgtgtaaaatgatcactttttagtttcttaggaagacacactgttaaaaaccaattgatataacaacatagcgttatagggaccaattttaaaaccatgtactctaagtaattgatagaaaacaattcacttataaacttataaaacctgttagggataaatgtggcttttgatattaaagtaaagtttgcctcaggattttttgtgtagaaaatttccacatgaggaaaaaaacctaatcttcattattggagcaatagagggttaaatttaaaccaattcacctcagcaaatcacactgtaggttcttgaactaaagaaaatattttcaccaatttctaaatatttactatttaaacatacagttcttacttggacaaaagaaattttttaatgagaagaagatttataaattatatctgactgagagtgttatatagaggacttactatttcatctgccaaataaactgttgagtagtcaaaatatgtgtgatttaaataccatagtatcaaacctaataccataagtattttgagaaaaataattgagacatggtacttatcatgagcttctcctgttttcccattttataaactagaacattgggtgacctcatgttttcaaatatacttataaaaaatttaaggccgggygtggtggctcacgcctgtaatcccagcactttgggaggccgaggcgggcggatcacgaggtcaggagatcgagaccatcccggctaaaacggtgaaaccccgtctctactaaaaatacaaaaaattagccgggcgtagtggcgggcgcctgtagtcccagctacttgggaggctgmggcaggagaatggcgtgaacccgggaggcggagcttgcagtgagccgagatcccgccactgcactccagcctgggcgacagagcgagactccgtctcaaaaaaaaaaaaaaaaaaaaaaaaatttaaatatacacatacactagacaatggcataattgggaaatggcataaatgagaaaatgtggtttagaatattataggtagctacagtttattgtaaacaagcttagtagtaaatctagatttttaaagcttgaaacatatataatttaggggccacttttgagaaaagattacaaaaatatcttactattgcaaaggttactgaaaaagatatggcatgtggatacattgctagggtccacttctggagtctttggaaggatcctgggcaagagagcttaagcttcatcagcatcatggtacgttgcttatgctgatatcataaattaaaagtgtacaacttgagagcttctttacctagatggaataactttttgcattatggtaccatgatttaattatagattctttgcccttgtaacaactgacattaattagcaaacaacttgtgaagagtttaccttaaaatcagtccatttaaaatttggggatcccatgcctcattgcctcaaaactcatctctaaattaccaatgcaactgtttggtaaatcctcagatctgggtggatgttgaagggcaggttagaatctaaagaaaattgaggctgggtgtggtggctcatgcctgtaatcccagcgctttgggaggccaaggtgggtagatcacttgaggttgggagttcgagaccagtctgaccaacgtggagaaaccccatctctgctaaaaacacaaaattagccaggcatggtagcgcatgcctgtaatcccagctactcaggaggctgaggcaggagaattgcgtgaaactgggaggtggaggttgcagtgagctgagatcacaccattgcactccagcctgggcaataagagcgaaactctgtttcaaaaaaaaaaaaaaaagaaagaaaagaaagaaaggaaggaagaaaagaaaaaggaaaattgaatggcagattggaatctgaagagggtattaggattaggataaaagagcacatctatatgatttgctgtgtgaactttctaaagactcaagttttccctactttttcttaattatactttgtcatggttggactattttcagcgccttctctgtgttttccttatatagtatttttaccttctatttaattttgtcacctttaaacctgtacacttccttcatttccagtctttctctcaatccctcaccccacccttactttttagtcaatttttattaatcatcttccagttcttttttcttcttacccttcatcttcttttttaacttctgaccctttagttttctgttgggttcataaatgccattacctatcacccttatcatcactgcatgtctcttcaaacctcaccaataactcagctctgctttgtcttcttgactaagccagttatcagtgattgtactcatataaatctgacaaaggagtatttaaaaaatatttcttgaagattcaaaactaacagttttgttgcttttaagtcacttaaaaattctaaatgcacttgaagggcaaatgaaagagattctgacttttttggctaatattactttctgttttggttttatctaacaacagttatcaaaaaatrttactatacatactctgaagagcactatcctacaaaaggaattaagtcaacaatataaatgggacatgccccaatgcccagtgttgccagatctctgcaaagcataaacagagaaatacttatcaaaaaggaaagtataagaggatgacactctagcacagtccaccttatttgaaccgttttaggctttatctcctgttgaaagaggtaggaaacagtttggaggaataaagggcccattcttttctgtgctttaacatttcctactcatagtcaaaaattgatttattatatggccagtaaagtagaggtaagaaaagaagtgaataacataatagtttggaaagctttggaatttaagaaaggttaccttcctacaaatgtttcgtagttattttaaccagaggacaccttaatatagtccacagaacttggattttggtaaatttaaacatcaaatctgcattatatttgctatgttgggttgaacttggggtcagcttctatctgctgtcacacaatgcttacttttcagaattgctctgaggattagataagacaacatgtatttcctttatgccctatgtggaatttgataggtgtcataaaaagaaggcctcctgaccgaaatatttttcctgaccagaaagcyagtatttgaacccgctatagagtccccaattacaatgcagaagacatagagataagagggaatcccagtcttcatccccttcaaggtttttcctgactctctttgccttctgtgtctcacacctcagtttctgcctgacttggtgcttggacacagcttggttttgtgtatacacatagatcctttcatacttccttctcctggctcttcttgattcctatgaaaatgcttgtcccttttctttgaaggttcgacagattatgtgacttcactacccaaaattctatggcagcgtcccatctcactcaaactccccaaatcttcctgccacccatagrtacctcctttaccttgtctccttcactgtgtcttttacttatttatttccagcctctttggtctccctgctcttcctccattacacctgcaggagccctcctcggggcctttgcacttgctgtttcctctgtgaggggaaggggtagaaagggtaggagttgggggagggggatgcccttcccacagatatccatgtagctcaccgaaaacctttgtccaaaatgtcacctttccacagaggtttttctctcagcatctccattccctttcctgcttcagttttctttatgagcacttctatcatactatataacttgcttatgtactcatttttttattgcccttctccatcgcatttaaatgtaccttccaatttacatttacaaagggtagaaaatttacaaagggtattaaatttacaaaaggtagaaactttgtctgctggttgggtgcggtggctcacacctgtaatcccagcactttgggagggtgaggtgggtggattgcttgagctcaggagttcaggaccagcctggccaacaaggcaaaaccctatctctacaaaaatataaaaattaactgggcttagtggcgtgagtgtgtggtcccaactactcagaaggctgaggtgggaggatcacttgagcctggagatgaaggttgcagtgagcygagatcgcatgactgcactccagcctgggtgacagagtgagaccctgtctcaaaaaaaaaaaaaaaaaaaaagtaaagaaagaagaagaaactttctctgcctttctctgcttgttaactggtgtagtcccagagccttaaaaagtacttactattcaacaggtactcactatattctagttgaatgaatgaataaatttctagctcactgcctaggaatggaaaataattcaacctatagttttagagatatatagtatagataagagcatcatctttagagacagacagcctggattaaaatcatatctccagccagacgtggtagctcacatctataatcactttgggaggccgaggtgggtggattacctgaggttaggagttcaagaccagcctggctaacatggtgaaaccccgtctctactaaaaatacaaaaattagccaggcgtggtggcacacacctgtattactagctactcaggaggctgaggcaggagaattgcttgagcctgggagatggaggttgcagtgaactgaaatcgtgtcactgcactccagcctggccgacagagtgagactctgtctcaaaaaaaaaaaaaaaaaaaaaaaaaagaatcatgtctctatgatgaattacctgggtgaccttaggtaaattatatagtttctgtgtcccctcagtctcttcatctataaaatgagactaataatagtgcctacctcattagatttttgtgaggattaaataagttamtacatgtaacatgcagatgatggatttttgaccaccatttcctctgggcaagtacgtgctgtcatatgtagaggagacagtgaacagattgttactgtgtaggtgggtaaggccttttcaggcattgcaaagtaatttttgctatcacctttctcagctgctttgcttcttgtctagtcaccccaaaccccttttctgtccctctccccatatgtatatttcctgagagaaaaaaagattatggttgcgtgtcatagtaaactgggcaatgcaaccccattagcattgaggaataaggtaaactgaagtcttttttaactatctcctgagagccatacatagaaaatatacaaaagaaaaaagatttatgtgaccatacattttaagtcatctctgggaaagacttgctccttggcatttctttgggctaggtaaactgaattggatactgtgtgaactcattcatacatcagttttcttggctcacagtacagatttgtatactatttgatctttttaaattaccccatgccaactttaagcctgtactaagatttcatatagtaaaacattattttattcgggcacagctaatttaaagttacatatgtgcaacgctgaaatgtacctttgtactaaaagtttgataattacattaatagagtaaattacactgaagagatgtttcttaaatatcaaaaatgtccaaattaaagaacttccttctaaccactaaaactaccttggcattgatctgcttgcatttaaataatacgttaattacgaatggctcatattaaatttatcaaccaattcctggtgggtcctctacttgaaatcatgttcatataattaagagaaatacaatggcatttaaacaaaaaaaaacccaaaatatctatagttcaaccatggcactatcggataagtgattaggaatacaaactaaggttctctgaaatgggagtttatttgtttgttttttgtttgtttatctatgtttttcaagtcaatgatttcagcagatgaagtagcaccatgtttcaatcagcgaatatttaccaagcttcctgagccccactgtggtagagagatgcactgatggtgagacagcatgttcccttacaatgaaaactggatatgtgtcattatctttatgcaggtcacacaactggtctctcattaaataatgaccggctgtacaagctcacgtactccactgaagttcttcttgatcggggcaaaggaaaactgcaagacagcgtgggctaccgcatttcctccaacgtggatgtggccttactatggaggaatcctgatggtgatgatgaccagttgatccaaataacggtgggcattttctaccagataaatgcaaagattagatatcagaagtttttgagaagtgtaccattggacagcacttgtattgggttcccgtttataaatccatttagtttcttatctatcactaaaacaagcagttctatgtatttaaaggttttgctgatgaaaagtgaactgatctttccaagttattgcaacagacaatagaaggtatatactggtaaacgaccagagtatggtgttcaattctatagatcatgttaatagggaagttatactagagtcttttcaaaatgttctgggagagaagggtcaataatccatgttgtatgaaaaacaatttagaccactctaactcaagaggagatcagttaggaggttcctgcattccttgatacaacaggtggaattactgaagagagagtaaacctagtctgtgttcttcctgaggaaggaaccaagtactcccctgaataacagtgtttggtcagttaaaatggtttagatttatgtgytgagaagggaggccaaattagttggtctctggggacttttccaattgtaatatatggtgattcccttatttgcttctcaagaacctaaagataatagattccttgagtaaagtcagttattcttctacatcttggtgtgaaacaggtacacaggacaaagtacttggaacaagtagttgctggtgtcctttatattgaggtgtcatagcaatacatttacaagtgatatttgcttctttgggtgtctctaattgctcttgtgttttccaagttagatctaagcatcatcatccatctctctgagccatttctcaatacaacagtaaactgttctccagaaaacattatattcctccttattcagtaattagactttatttttatttacacagataaggtagaatagggcaggggtcctttccaacaagtggtaaagaaagtgaagtgatcaggtagacagcaaccacaaaaaacaaatgaagagtggcaatgataggaaagaatcacactcaagtcacaattattttaagcctaaagtcacagagttctttaagtattgctatttttgccttattaaaaaacctagtttttaaataccttctccattcttttaaagtgagtggcaaggtcctataaatcatgaattgaaaaatgacagaagaaattgtggccaactctttctgtttctttatcattttattttcagagatactctgatgaagacagatataggaagttttttttaacagctttctttctgttactccagatgaaggatgtaaatgttgaaaatgtgaatcagcasagaggagasaagagcatcttcaaaggaaaaagcccatctaaaataatgggaaaggaaaacttggaagctctgcaaagacctacgctccttcatctaayccatggaaaggtaaaggggcgtttagattccacaactttttctccaacttcatatttttcttcccttcagtagatattattttgaggtaatcacattgtaactacttttatggtaaatggaatttcttcaagaactaaagaacagaggttgtaaattaaatgtttccaaactgaatcaatgccctgagttcccttacatttactagccaatttgtttcctatttttctggaaatctttatagtggaatgaagtatttatttattgatgaaaggcattattaaaaggtaaatttctcatcaaattataagggattacaaacrtaatgtaacaaagcaagtcatcaaagcatgattggatgaattyaggaaaggagacaaattatgagactgaaatgatccaactgagattagtaatattgatttgttatgagattatcgatatctggctaaagtacaaggttaaagattttaaragggtatgacaagtctaaagtagagtttttttaaagcctttagaaattattttaaaactatgacatggaaaagccttttatatattaaaataatgattgaacactttataatatatatttgaaaatctgttttaaaaattctatgtgtgcattacttatggcttgattctagtcaattgaaatggtctaaataaatttggaattgagaaacaattgtgatcagttgattattaggcattacatatttgtgtttatgaaaattacagatagtgtgttgacatacataaaaatgtgtctaaagatgagagctcaattttaggaacaaaagcaggaaaacagaaagggaacattgagttataattccatacgtctctgaaatttcactttctaaattcaaaataaagaaaaactgatctttatatactgataaagtaatactttatttattttcaactgaagtatttgaaaacaaatactttggacatttcatatatgtatattgctaatcatgatgcacatttttatatgaagttctaaaaaggaactcacaagaagaaatcttgtgttttcacctcgcctacaaccaaatatgaatcactatcttcaagaatgctttctcttccttctttacttgtcaaaatacttgccatgtttctgactgctcacatgccatttctgtcataaagttcatacccttccagccagctggaaataaccatcactctttagaatgctcttagcactttgcagctcactcatgacccttatcactttgtttttggtcatttgtgttcattgctagattatgggtgttggatagaaaaaaatccaattcctctttgtatttcagcctctccccttcacctccatgcccttccactccctccttccccaaagcacccagaattatgccttgcactgaatattttatgaagccttctccgacatctttccaaacccctgggcctatttctgtcaaagcgtttatcacagtgtattgtcactctccttttatgtcttggctctccacattcagaataagtttctcatgggcagagttgtatctgtctattcagcaccttgctcataggggatactgaatatagatgcttctaaaataaaggataaacaaataagattatatggggctcaactgagttgaactttgataaaggttttacttattgtttacttaataatagctaaaatgaactaagcacttactgtgtgctaggtgctgactaaaggcattacacgaactgtctcttttattcttgtaatggccctgagcagtaagggctgccttatcaacctcttgtgatagatgaggaaccaaagttaagaaaagttaggaaatttgcctatggtcatacaactggcaggtggtggagttgggacttgaaatagagtctatgctcaaacttctatgcctactgtcttccagctggaaagtatttggagaaatgcctgcctctttggttgacttgtagtgttccttatttacatcatgagatcagttgacttatttgattttcttatggctcaactttgttaacaacaagaaatattgttattttcttctctgagcttccaatgtggcaagacacttgagttcatagatattatttgcatttataatcttactgacaaccaatcattttatagctcctttggtagcagctgagtacaaagtcttctgctacacacatgaaaggactcagtaccctcactgttcaaaggctgggatggaactgccacatcattattttaataactgcaatgggccaattctagaggagctatgatttgcgatgatttactgtaaccacaggttaaagtacatcattgtatctttcaagtatataataaaatatttgttggaaaaaacttaacaatgaggactaagaagccaacaggaagttttggccatgtcactgtcagaaagatcattacttaaattatcatttcagtttactatgagagaaattatggacaggcagagtaaggctatggacaggctattttcttagagagcattttctaccacaggctcaaattaagttgtgctcctgaagtttctgggatttcaaggatgctcatcagcatgtaatttttgtccttccagacctccccctgtctccctttcccatctgaggctctcatatttacattttaaaagagagtccattaaaatacttagatacatattcattgcacatcttcttttttccatgcccactcatcttccctacataagtgggcataactctagttttgtctacaaatcattaagttgtaaacgtgacagttatctgattacgttgattaatgctgacgagtgaaagatgcctcaagttataccatggattcttttttaggcctgaaatgctgctccaattaactggataattaccagatttccatttctggttttggctttgtgttgattaaattaaccacgtggctgctgagtcagacctttattttgtattgtttcygggcattgatttgctctctaaatcascatggctcttgtacacacactgaactgccacaagaaatgtgacaccttgaaagtccttctgaaatttgttgtatatttctttacttgtttgttctccagtgtgtcatttcctagccatgctctgtcttagatagatatcaaagataaaattactaatctttgtttgctgggattctttttattatttttattgtttggccacttaatggaatttagtctcctcttattcttaaaataaatataaaggaaggtgtggagaaaggcatcttcttcctaaggaaaaaacaatatgaatgatgcctacctatttcaagaggaaactggcccctcatatttggctggaagaggcactgtaccaccttcccagccattttacccagtctccctctagctgtggtttccttgggttaaagacttcgtttgtaaccaggtcatacctgctgctgctctttggaagctctgagtactgtaaatttagataagaacctgtgctcttggatgttcagaactaatttcattgctgaatgaagtaatcaactttatggcctgagtataataaaacttactcagttcctgttgtgaaataataaatttaagattattgctgtgacagccatgtggcttgaaatgcaaaattctgatttcagattattattttttaaatgattacaaggcagctcaattctaacagttttgacatttagctggtatggatatcagtactatcttcactttggatctcatcagtctacactaaagaaacagaatttaggccctagaagtagcagtcatataaaagaaaaagagatgtgttcatttttctagttctggggaagcaataaaaactaatagaaaggattaaaaaaacttttttcattgtgtytcacagtttatrtctatcattcagcctgccaggagggaaaaaaggctctaacaccattttctaagggatccagaggtcaagatcaaaacttgatccattgcagtgggtcagtaacagataagcactgaaccttatgcacagtccaaagattaaatccaagaactgggtttccttaccttttaggtaaaactttaaaaatagctcagatacattttgtagcctggaaggaaagtgacatagtggtgacaatactggtatttttcccacttaggagatcttgctttctaaagtatttaaggttcataccaaaaagacatgggccatatagacatgtgtgcattgccactgagtgaacacttctgactattttggggcaatctagttatgaacttctaatggtcatgatacctggagatacacttccaaatatttgaaaaggaaattacactgtgattattagaggaaggagatatagtttacaaaatagaacttcagaaactcaggcttgggtctgagatattgccagtgatttgtttgagaatatgatactgtgaattttcagacactgaggtcattattccagttcctttctaagtcggacaaacactattccaacatttataggttagtccagtctaatgactaaaactgattgccagataaagtacctagtaaatccatcactaggcagagtatatgtaggaagtaaaaatagagatttgagacacttgtttggataattcaggaaaagtattctcttcttctaaggcacaagataattttcatgtagactaaattactgagcttggtattatttggattcattgcatagctattgagctttatgttttactttagaagctatggttggttttaaagagtactaggaaggcattcaggatatttctggtagaaatgctcagctataattatcatagaccttgggaatttttacagggaacatgtatctatcctctatttctaaattgtgtgatgcatatcaagtctacagggtgaaaaccaacaagctgattttcattaaattcactttgtacttttatccttgtttcttaaacattagttaaattatcaaaatggcaaaagacacttatcatctctgtgcctataaatatcaaagatgataaaacaaaactaagtggcttactattcctgccaaatcatagtcaccctcctcatttcaacctcctttctctgccttctgatggtaacctcaaagcagtgcctggggcaggttatgcagcagtagcaatctcaacctcaaattttccagccttctgaatatatatatacacacatatatatatatgttcatatatatacacacatatatatatgttcatatatatacacacatatatatatgttcatatatatacacacatatatatatgttcatatatatacacacatatatatatgttcatatatatacacacatatatatatgttcatatatatacacacatatatatatgttcatatatatacacacatatatatatgttcatatatatacacacatatatatatgttcatatatatacacacatatatatgttcatatatatacacacatatatatatgttcatatatatacacacatatatatgttcatatatatacacacatatatatgttcatatatatattcatatatatatatattttttttttacccaataccaatataaatgctctggagggtggaaaacattgcccctgtgaaatgttgaccatgggtattatggccatgcctggggccttgcaatagcccataaaggctgtgccatctcaggaatctcaaaggtagtgattgccattttcgtccaagaacttttttatttgctattattttaaaccttagttattttttgtttcaagtacagttacaggtagagaacatgctgacatgttcaaacagaatkttcatcatttctcttccctgggccatccttgttttcatgaggctcccagcctatatcagtgctctctcccaatgctgtgcccatcatgcaagagccttcattatcggtctccctaaacttcatattctgatggtctcagagatttaaatagcttcttttcacaaaaaggaaattccagatttggagtgtcagatctctttctcccaggattaatacaggtaagaatctgaccttgcctgacacttatttaaatctgataaatgatgcatttttgctycatttgtgttctgttcccctctccccaccaggtcaaagagttctactcatatcaaartgaggcagtggccatagaaaatatcaagagaggyctggctagcctatttcagacacagttaagctctggaaccaccantgaggtacttaccaatattaataaggattcagcatctcaataaaatttgtaaggatttctacttayacaatttcagtagaagagttactactaaggtaatgctcagaaaagrtgacttgtgtagtgaagtcgcatttgcctatgaaacaattgccatttatcccaatgttttgttaattaattacaaggtagagaggattagaaatatttatactaaaggagcttcgtggggatcattccagtggttcccagatatcactgtgcaccactgtaccatggaggggcttgttacaaatatagattccctatattcatcccagagattctgattcagtagatcggggaggacccgaacgtctttttttttgagatggagtctcactctgtggcccaggctggagtgcaatggcgcaatctcggctcactgcaacctctgcctcccaggttcaagcgattctcctgcctcagcctcccaagtagctgggattacaggcgtgtgccaccatgcccggcttgtatttttagtagagacagggtttcaccatgttggccaggctggtcttgaactcctgacctcagatgatccacccgccttggcctcccaaagtgctgggattacaagcatgagccaccgcgcttggtcaaacatctgtattttaacagtctttgtggattatttggatgcattgtcaatgtagggaaccactggtctataccaacactgttcattttgcaaaagaagaaactagagaagttaggtggatcttccagtatcatacctggagtcaaggctggagtccaagtttcttagactgaattcaaccagcccatgagtgggtgaaaaatctgatggtagggttggaccaaaagaatgttggttagcttgctagaaaagagacctctgcttctgtgatgctggcagaggccccaggaaaaagctcagagaagctagacagagtctgtattgggatacatttgcctaaactcaaactgatgatgtagctaatgatgatttgagttaatcccagtggattttaattaatcccacaggattttaagaatttctaatcatgttcagctagttgaagttacacacacacacacacacacacacacaccacacacacacagaatctagatacagcattaacaatcaactcccttgccacagaattacccatttatccaaagtttcaattattaccaggccatttgtctaattttaattggatttcgagagaagtaggaaatcccacattatttgtgaaaaaaaatgagaaggcgctattaagacactcaaccaaagagaatgggagggaatcaatgagctaccagaaaccttgttcttgtctttgtatcttatcatcctgggggagaaaaaaagtcccctatggcctattagagacctcaattttcaagccacttctcactagaattcaaatggccyacaaggaatcccaagcattatgcccttgcctttctttttagrtagatatctctggaaattgyaaagtgacctaccaggctcatcaagacaaagtgatcaaaattaaggccttggattcatgcaaaatagcgaggtctggatttacgaccccaaatcaggtatgatagatgtcactttctttgaggcattaaaataattacattttgtagagactaatttaatgtaatagaaaaataaagtagaaatagaattttgaaacatttgtaatttttagtttaggctacaaattcacacatatgtaatgaatagacccatttcaattgttgtaggtgttagtaatgagggatgggtgtaatggggaagctgtttgtagactgaaagacagtttgctatttgacttgattcaataatttaaacgatgattacttgttataaagatggctatttatttatttaggtcttgggtgtcagttcaaaagctacatctgtcaccacctataagatagaagacagctttgttatagctgtgcttgctgaagaaacacacaattttggactgaatttcctacaaaccattaaggggaaaatagtatcgaagtaagataatgctaaaatttttattttctttgctattctttgttatattattatacttgatttgtaaatagatctgtgtttgtgtgtgtgtgtgtgtgcgcgtgtagtcatgcattgcttaacaatgggaataagttctgagaaaagcattgttaggcaatttcatcactgtgcaaacatcatagagtatacatacacaaacctagatggcatagcctacactacattatatggtatagcctattgctcctaggctacaaacctgtatagcatgttgctgtactgcatactgtagacaattaaacacaatggtaagtttttgtgtatctagacatagaaaaagtcagcagaaaaatacagtataaaagatactatgtaggtgtacctttattcataaaaggtacataagtgaaatttgcagggctgaaagttgctctggatgaatcaccaaatgagcactgagtgaatgtcatagactaggacgttactgtacactactgtagactttataaacactgtacacttatgctacgctgaatttctaaaaaacttttttcctccatcataaattaaccttagcttactgtaatatttttacgttaaaaactttttaatttttgttaacttttgaastactctgtaataacacatagtttaaaacacattgtataggtgtacaaaaaatattttttctttaaatctttataagcttttttctatttttaaattttttatttttatttttttcttttaaaaatttctggttaaaaattaagacataagcatatatattagcctcggcctacacaaggtcaggatcatcaatatcactgtcttcctccagtggaaggcacttacaacctccaaatgttgtctcactgaaaggtcttcaggtgcaataacatacatagaactgtcacttcctctgataacaatgccttcttctggaatacctcctgaagaacctgcctgaggctgtcttacagttaatttttttaataagtagaagaagtacactgtaaaataataataaaatgtgtggtataataaacacagaaatcagtaataatcatttgtcaccattatcaagtattatgtattgtacgtaactgcacgtgctatacttttatataacagtagcacagtaggtgtgttaaccaccagcatcgacaaaaacacgtgagtaatgctttgcactgtgatgataggacagctatgatgtcactaggcaagaggaatgtttcagcttcataattttatgggaccacctttgtacatgggtccatcattgaccaaaatgtccttgtgcagcacatgactgtatttattgtgcttcctcatttcaactgtgagctccttgaaaatagtgattatatcttgttcatctttattttttacatcatctacaacaattcacggcacatggtaaataattactttttaaataaaattgtattaaaaatcaattatttattgaacaggttttaagttttaaaaagacaaactacttgattcattctagttcattttctaatttctctgtcaaatgtttttaatattaaggtaaaaaagtggtagcatttgtaatttttaagagtttttaaaaaaaattgttgttaaaaaacataaaaagttccgtagtgaagagatgtgacaaaatttttgatatgacttatgcaacttaaatatttaggcctgtttatcatttgaagaccattctctggacagaattgttctaacaggattaagaactagaatgttaaatcttagagtttctgttattttcagattttaattcagaaaacaatgttttctagcagtgaatgtgttataccttatgccattgcttctcaaaaaatttctctggagtagctgtaatattagcaccaaatagatgcaaaatagtagtaaaaatgcctgattaaaatgcttgaaattttatagaagtctcatctggaatagaattttgcattctacttcatatactactggtatatctatagtgttttattatattttcatataaaataaatattttaaataacttatcaggcctatgagatttccattgctatgtaacaaccccagatttagtggtataaaatgcaacaatcactgtactgttctctgtcataatttacaggcttgccttggccttgctaggcatctattatgtagtttcagacagtcaaactattcaaaggtggttcccccatgtatctggtgcatgggctggaaagactcaaacatctgaggctcctcatgcaactatctttatttccctgtcgcctctcagcattgcagcttcatgtcagacttcttatgtagtagctcaaggctccgaagcacatgtactgatagtgtgccagagaaaagctgaattctcttttaagacatagccttagagatcacacagtgttactttcagtctcctctattagttgaggcagtcacagagtcctacccaggttcaaggagagggatgtagaccctaccttttgatgacagacaggttctggaagagcatgtcagacaaaaatagagttgagactatttttggaaaataagattttctagctgtcttggttaataagtaacacgtggttgtattgacgatatcattttcagaaagctgggctaaattcaaaagagctgacattgcatatcttattcatcatccaggcaatttttcttccctgtatactgttgaaataatattttgaaaatgcaaacttaaattttcaaatcttttaatataattgttgctccagaaagacttcataatgagctttcagttacctctggagatatcacagtttgaaagacrtggctatatacaacttgaataaattactatcttgtttgccaaaagaatggcaattagtatcttgttcactcaaaagaatgattataatatagcatttccctttggtattatgcaggcagaaattagagctgaagacaaccgaagcaggcccaagattgatgtctggaaagcaggctgcagccataatcaaagcagttgattcaaagtacacggccattcccattgtggggcaggtcttccagagccastgtaaaggatgtccttctgtaagtgcagacaaatatgggaataatcatgacatcagactctgttttcattttgtctccagtgaaagcatcaactcattcaatgaagacagtttctaaagaactaccagctaccacagagttgtgatgacagcagtctcacaatatgcacctgacatagtgcatgacacatcaataattaacaaatagttaccattcattcctctcaaaaagtgttataactcaagggcagcctttaataagtcacatctagaattcagggaggatagagggcttaatgaagttagggggaagcatatggtgtcaagaatgtggacaacggctgaaccttgaaagttcwgtcacataatagttatttgtccacaggtgacatactttactggcctcagtgttctgattattgctgcaaggactgaaaaaggataccaggatctttgcctaaattaggaaacatttatttaccccagtttcccctacaattcctgtcagaaatgcgatatctcatccccagggcaaagtgtagatcattgtaacatttttaatccaacaaagaaaattttccttttattgcatgaatcagttatgatatacattcagagaaatgacttaccacccagmatttccttatctgtaatctcttgtcagaagagcaaaccattggcttcatgctctgtgtgtaactatagggagatgctctttccttcagtattactggtgttcagaaaagtgaaatcatcaagatgtaataccataatttgcttaaagtacaagacagtaattgcttattagtttctgaaattgagttagaggaaaaaggaaacattttaaaacacaaaatcatcattttcaaacattgtttcttcttttacctgttttttttttcatatgtcatttaatgttctaatgtaattttctaatgctgtatgagatggaaattatttaggaaggtggctaataaaactaawcttttcttatgctctgcactattaatttctctcccatagatattaaacattatgagccatctaagatttttgataattatttcttaattattatagaaaatgatttatttatgttattgaggaatttgcttttccaaatttggaattccaaattccaaatttgcttttgtaaattctattgcagccctttaaagtaaaacaaaaacaaaaacacctgaattcatattgatatgctctctgccttcagaaatgacccagtaaatctttagctaagtgcagctggaatttcacttggaatatcttcttaagattacatagytaaaaggcacttgaaaaagagaaaaaaaaggatccattgcttattaaaagtaatgaataatttaaaaactggcagcaagttattactatagagttagagagttagtagtcactgataggatttcataaaactaggggggaaagtagtaaagtatgaaaaataagttcttcagttagtttcaaagccgagagatgctgttaattagaactatttattaggttgttgcaaaagtaattgtggtttttgccattacttttgtgacaacctaatattatttttaaaaccrcaatagaataacttagtgtgtgtgagaattacctttatctaaatgctactctaaaaaacatagatataagaaatgaataattcagaccttagcaacagcaaaacattgaattttgtacaaataataaaataaagagagagaatagggagctcaccgaaaaattgattttcagtgaggtgcaggtaaattagaaacctgatgcaattcttcagcagttctcattattttatctctgaaatattttgctgttaattaaagttctgcacaatttaaattgcactatggtagtcaaagcctggcctcggataaattcccttggtgtagccgtgaaatgacctatatacccagaaaccagttaattattgccctaggatcttcaagctaaatatgaatagacaaaaacagtcctcctatagaggaatggttcacagagtggatggaagtcccaggggtatgatatgggcagggaactgtcatgtgtattgaggtaaggtacaaaaagctgctttcgcttcagacacaagggacattttattcctaggagaacaccctttgtaaatgtggatgttcacagttatgagtggggtatgagcctgcagtgtatgttttgcagctctcggagctctggcggtccacmaggaaatacctgcagcctgacaacctttccaaggcygaggctgtcagaaacttcctggccttcattcagcacctcaggactgcgaagaaagaagagatccttcaaatactaaagatggaaaataaggaagtattgtaagttccccaacctttgtgtggggttgtctgtcagaaacatttctggattgttggttttttgaagtaagaaagaccccttttaaaccaactgccccaccwccaaaacaattattttcttgtactacattttcatcgaaaagttatgccacagtgcagtaatttaatggtcacttgaccagaaatacaatagcagattttcagcagggactaggaataaacatgttgttgtgtttatgagtttaaatcaggactagattggtacatagataagtgaaggcaaggcttcgtcgtgacatcgtggggcatgtgctgcctcgctgtttttgaaattatgttcctcatgctgttaattgacacctgaacagatttgagttcatttaaaagaaaacaacaaaaagggtttgacttcttcagttgaaaatgtgatttcactaaacagccagttgaaactatgttttatgtaaaaaattgagaactgaggcgaatggtgaaaagaatctggagaaaataaatccatatgttacttaatatttggtgaaactatgatccattttacatgtgtaataaacagagttgacttaatttttccccaaaacattgcatctgtttctaaatagaatgtatttttagtctatcatacagaatttgtgtatatatacaaattgagcttatgataccaattatcctaattgatgatatagaacaaggcccaattaatttgacaaacagtgaaaaacagtcattaacataatcaaaagtggaaattagccaagttacacacacacacacagcagtagcagtcactgagttcaaagaactgaattccccaacaggaggaaaattgcagcttttttctgaaaagtctgtttatgctcaattgcatttatttacttgccttaaggacattaaaaaattgataggaattccaaatgactaatcaaagttggttattctcttcaaaaataaataaaccagaaattgaaaaagaagcaaaatcataaattatcaggctctgttttaattacagcatgttaaaatatattggtagagggacttgtcttaacattattttttatatttttaagattctttaaaaattttaccactctcaaagtacataggcattgtcttaacattaaaggcagacattactgagaataaaagtggaataattaggtattaatttagaatagagattacattaaaccttattagcattatctgtatcctaaaaatcttaaggcagcaataatttggaggactgcatgatgtattttctaaatcagattatttatacaatattgaaccatataacatgcaacacacatgtagtgtagtgtaatagaaaggatactaagatgaactaaaattggaaaatttagtttaaattctgacctccaacaacagtatatccttcaaggaagtcttttttttttttttttttttttttttttagacagtgtttcgctcttgttgcccaggctggagtgcaatggcgcaatcttggctcaccacaacctccaccttcagggttcaagcaattatcctgcctcagcctcccgaatagctgggattacaggcatgtgccaccacacccggctaattctgtatttttagtagagatggggtttttccatgttggtcaggctggtctcaaactcctgacctcaggtgatccacccgcctcggcctcccaaagtgctgggattacaggcgtgagccaccgcacatggccaaggaagtcttttatatttagcttctctgagcctcactttcaacatctgtaaaatagggataataattctttctatttattgtaggctagtgagaggcagggtggtggaatgtaacatttcccaaaaagcctatatgttgtatcctgtaatttgcaggaagttaacaggtatgcaaaaaggaaaagattctgtgagcaactgagtttgcaaaactggatgaaaccttgttaatttctctgttgcagaacttttcagtatctttaatcagataatattctggtaagttttgaatattttctaaaacacatgatcttgaaaatcccttttcttaaagcattttgtaagactagtgttaacatggaaaacactttgagaaacatcactataattaagaaaccatggactccagagtcagaaaaacctaggtttcaatcccagcaatgccatttaccatttaccagctatatgaccttgaacaaatgactaggtrtatctgcgtctgtttcctagcatgtacaggggaatattaatattaaactgacagagatgttcagtggattaaatgaggtggtagtattagtaacagctaatatttatcaatcacttactatatgtcaagcactcttctgaatgttttacagagataacataatttaatcctcccaacaatcctgaggtaaatactactttggcttcattttacagatgaagaacttagagattagacacataaaatttttagtacagtgcttgcacaatataaactcaataagtattatgtcttctagttatctaagcttaattcactagttttttgttatgatcaaaatagtacaagtatatcattttttaaaagtataaactactaagcacatgtcacattgtctggtgtgcttatataggggtagtatgtaatatttacatacatgtgttaattagtatgacaactatttttagaagttttaccatcccgggctcaaaaagccaaagatttttgatgactagaatatataactagagttttcctgtaggggttccattctgttcacacatattcattgtggttaaacatagaactatactatggtgtgtttttatttttaaaaagaggaaaacctttccccttggatttaaggttaaaggattttccatcaaataatactgctttagttcaattaggcacttctgaaataggtttgtttgcaaagctaattaaagaaagagaataaatttggggacccatagcttttatgtattactcatataggaaagaatttgaacttaatttataattgtatttatataatttttacttacaaatcgccaaattatacttggcttaggttaatatagtaaaattagtttgtatattctgagtatacattgtttgagtgagagagaggggcgttcaaggagaaaattaaaataaaatggggaggggtctttttgagaaagtcttaatcattttttcatttgttcaaattaaaaaaaaaatcacttcttgagaaaactcaaaycaatagaaactctgtgaatggtagagatttttaagtattccttcccctaaacattgatatccatgattatgcctttttttatagacctcagctggtggatgctgtcacctctgctcagacctcagactcattagaagccattttggactttttggatttcaaaagtgmcagcagcattatcctccaggagaggtttctctatgcctgtggatttgcttctcatcccaatgaagaactcctgagagccctcattgtaagtcaaatagaaaataaagaccctcaactcctataaaacttcttaagaatattaacagtaattaaaagtttcttagatctgaatgaaggctatcaactagagacttctgagtattcatattcaaattggggtattttctatccactaattattaactgtataataaattatttcagttagtgcctttttcgtaatttcagtaagtagtataaactatatggaaatttaaagattgtgttcacctatcatgttatatagcataggacagaatttcagaggggagaaatctagcttatgcttcagtaatcaattttacaagatttgttttgacttcaaaaattctcatgatatttaatacacctacattgaagagatacaattcttctgctgttaaagatttatgttgaaaacaaaagctagacttctcttgtgtccaagaatgttatctatttaattgcacttgtctacctatgatctagtggaatagttcataatctttatggaaaatgtacccattcagaatctgataaaagtgatgaggcccctttttactcatacataaaattttataaccctcacccctcctttttttttttttttttttgttcattgaccccatgaatccaatccataaatttccagggttaagaattccctgtaccacaggttaaaaatccctgaaaaggggattaactcttyaattcaaagctagatagcaaatgtgtaagtgtctcaaaagcaaaattctgagtttgcaatctagaaacataaaaatactttaccaagtatgtgtttattttttaactaaaagtgttccttggaaatatttaaatgtcttggtaacctattttatccctgtttggttaatagagtaagttcaaaggttctattggtagcagtgacatcagagaaactgttatgatcatcactgggacacttgtcagaaagttgtgtcagaatgaaggctgcaaactcwaagtaagtgcaaatccaatctcatgtattacatcattctacaccattgtccatttgatactcaccatgctgcctactattggcactcctaattctctttactctattctacttaccttatttgcatagcaatttttgccatctaacatatattaaaattcagtcatttattatgtttattgtatatttctatttcactagaatgtaagttccatgaagaaatggatctcagtttttttcaacaccaattgctcaccagttcccggtacatagataatatttaataaagacttgctaaaaagtgaatagtacaataacctccctacccatatactttattgagtgcccactatgtactcagttttaaatggtgtgtatgatatacttcttgttttcagagaaatattagactctaagtctatctcctagagtagaactttgtatatagtaagtgtggtttccagttttaagttttgatagtagaaatttagttacttttaatcacagagaactttatattttattttcaatttcatttgcctaaagcttttccacttgcctgagtggactatcaattttcacgtctttcttattaaaaagcaaaaagcaaaaacactttttaagtataactaaatatggaaaaccaaaatagattaatgtctaacacagtccatctttctataatgcaaataaagatgctaaatatataacaacatagtctttttttctgtccacattatacagccagtgtcccatcagcattttttctacctcagacagcactatatatcattttgcttactaagtgcttgctattaaaaatagtagggaaaatgttcttgaaaccaaatggtcccaaaagaggcaagccaaaactagaatatacattaagtatgaaaaagatcactaaaaacagtagtactgaaaaggcttgggtattaacttattaagttctggcagaaattaaatttattatttttatattagggaagcatgacttcttatatttttcaatttccataattatttkagtagctgatttacttcagctatttgtgtattaaatatcttggcaaaagataaaacccacatatcaaaagatctattcagcagtatttaatgagcatctactctgtactaggcatgatgctagtcctcaaataaaaagataaataaaatattctaccatcctcaaagaactcctagtctgtttatcaaatataaacaaataaataatattgaaatataaacaaagtgctcagacaatacagaagatgcagcaacgttttctgtttgagtgtgctcgagaagtttccaccaaaataacaatttttgcacttaatctagaagaggtttttaagtgaagaggtcaaagtatggaatgaaagacattctaggagacatacaataatgtatgaaaaggcccaaagtcaaaataggcctggtatggttgggaacagtgagaaattctgtggggttggaacataaaatatgtatgtttctgggggcagataagtgacagtggagacacaggaaagatgggaaaagagatggaaggtgagccagatcttcattaataacaagctaaggagtctggccttcattccacagaaagaagagaacagtgaagtctttaggcggatgaatgacatactcagattttttattaagaaagaagcaagatgttttgtggactgattgtttaactggattagagttagtgagatctgactggaagcatttgcaataacctaggcaagaattagtaaaggtctgaattaatgtaggggcagagggctgagaggagatagattcaagggccactttatttagtgactgataagatgtggaaaatgagaaagagataagaatccaggtgactctaaagctttcagttgaggttaccaggtgtatggtgatgccgaccacttaagtaaggtttatacagcctggttgggggtgggaggagagtagagctattagtttgttttggccatgttaagttcaaaatcctttgggtcaccaggctcagttgtccaacaggcaggtgtccacattcacctgcagctcaggagagaagttagggtcagaaatagagagtggctgaaaccttcaaagagactggggttacctaggaaagtcatgtagcataaggaaacagaacaaaggatcaaatttaaagttcttctgataatggacagcctggttctcatcacatctttaaaattaccttgaaggtagctgcaaaccatctactatcactggcattcaattttgttaatatttttgagcaaacattttttttcatctttgaggataataagatttggccatagtgaatttactacagaagaactgtagtaaaggttcagtttttcttttgaattttctgctgtgaaacactcatctacgttttgtccaaatcaaagatatatgaaagaaaggaaagaaaattatgtattgtattaaataagcacaaatttaaggtagctactgggcacactatatgcatgctgtgtaaaaggaacctgccattctgtgtagttctatagcctttcagaacttactaggataaaagctacagtcctgtgacagtctgaatggcagctagacaagtgcacaaccagtactatgccacatgtttctkttttatgtttgtcttttgcttatgttttgacctcccggcatcctaattccttattttcactgaatttgtacttgaaaaaatgtaaacctacagaaaagttgtaagaatagtacaattccatgaacacccagatatctttcatctagattcatcagttgttaacgtattttcatctttgctttatctctttctgtcttattttagttgaataatttgataataaattgcagacatctgacattttacctctaaatacttttacttcttattacttgagtgccattgcaactagtctcttacaatgaaaaaaatacatgtatttaccaaattgtgagttcccactgctatctctaattctaattctaattcaacactacagggttattttttccctcatttcatcattctattttccttcycccactgtgacaactgtggttttcgagaacaccaatatattgattcacctgctcaattctaaaacatacacaatatatttttggaattgccatactgatattactacagaaacaaactaaataaagttcaagacttttacagttctttttgtccttagaatatattccatcgcatgtacacaaagttctatgctcaaaagttacttggattaattctttttcattctcttctgtttagtcatattatcaagttgatagacatttagtttcatttgtttctggttaaactgaattttgataattttccatcctgttgatttaattttatttcttgaacatgtgaaatagtaatgtggttcaaaaggcagaactgtgttttaaaagtattaacagagaggtctcatcgcttctcgatgcttttcccccaatctcacctacttcctctaggtaaaaaaaatcactcattaaaaaaaatttttctttctatgtttctttttgcaacagtaaacagatgttcacacatttacatacttttttgcacaaaatatatcattctatacatactctttttgtatcttacatttttcacttaacaatatatcatgaaaatattccctacatagagatctttttcattccttttgacaactgcctagtactccattgtgtctatggactatgttttatttaatatctcctatgaatggtcatgtaagtggcttccactattttgctgttataaataatactgaagtgaataatctcaggcacagatttttgctattgttgagatgtagcttcagggatagagttgctggtcaaaaagcagttctgtttgtttttctcacattatcttccataggaattgtaccattttaggctttcatcagcaatttatgaaaaggcctatttccccatagtctcacctacaaaatatgttagcaaacttttgaatttttcaccaatttgatagttgagaaatgtcacttctctgattaagtgtgatgtttagcatctttccttctattgggagccttttgttaatacttctccactcttccccatatcatccattctccccaaccccatgtatgtgtgtgtgtgtgtgtgtgtgtrtgtgtgtgtstgtgtgtktrtktgtgcytgtagcctaatttcagaggttatgaatcctgtggatgaattagatcttaaaaccctttatttttaaaaaatttttcagcctagactctgtcatacaaagaatctttattttaaacatgaaactgaagcctctaaaacatatgtagtggcaaatataagaccagaacccagatgtccctatttctaatttgctttcccattaaactattaacttacactcaatccccctttttctcagactaggacaaaaggacttttctgattgtagaacatatttgaaaagtacctagtaaagtacctaccacataggaggtactgaggaaatattttttgaactatattgcagcattaattaaatttggaattaagtgaaaacaaacacttttaaaacatttagagccagactttatggttgaactctaagaggtctcacccaagttcttacttaaggaaaggtgtatggtgacactaagactccatctaattgttgctttagcaattcagtgaatgagcagttttttgaataaccaatcacaatgaaattaaaaagtggccttatatattcaaaatgtgttcaaaacaaaatatgcccattattgataatactcattgcttcttaagaatgtatatgtattttttttaaaaaaagcataacacctttatcaagctttacttgtttgcttttattccactgtgtgcctcagtcaagcaaccaatgcaaaactttgtaaaactgtaggttgctttcttggacccaagaataaagccagtctcacccaagtcttcttcaatgtatggtcatgcatatatctaaggtatatgatttttcaggcagtagtggaagctaagaagttaatcctgggaggacttgaaaaagcagagaaaaaagaggacaccaggatgtatctgctggctttgaagaatgccctgcttccagaaggcatcccaagtcttctgaagtatgcagaagcaggagaagggcccatcagccacctggctaccactgctctccagagatatgatctccctttcataactgatgaggtaaaatctccaagaatatttgcaacatttacagaagaaaaaaaaaaagcatgctgaacatgagtcaaatgcaaattccgctcaagtcactctgtattttccccaaatagtcttctctcctgcttaaaaataactcttaaattgcatttgcggctattctaaatatcctcacagggtaacgtcctatatctatatcctgaagcataaatattgaagcatattctcttattttaagaaacaaattcttttttgaaatatatttacttttataagttttaagatgctgttacatttttcaatactgaaatatcctggtttaagtataactttgtttgttactacaactacatttttcaggaagccatctaaattaaacctttgttagggcagagaatgtctataaatctcaagataaaccatctgccgagaatggtgtttccagtttatagctaagcaccttcccaccagttttgtgttgaagttggtggctgcaaatcatgatggttaggggcacaggcttttgagaaagacagacctacgtataaactctggctctgtccttccctggttgtttgttcttgggtgacttgtttaacatctacatatctgagagcaaagccaagatttgagggagttagtaaaaggtaaagggaaatgaaattaaagaaatatttataaatgcttagtatagatccttacacattgaatatcattaggcagttctaataatcaatgaagttacttgttgctatggaatgcaattattttggcacgttttcttcgatgctaatgttttgtttagaaaacaaaaggatcctaatgtaacctacagactttgggtaataatgaagtgccaggtagatttattgaatgtaagagatgtaccactgagggcattgttgatacaaggggtgattgtgcgtgtgtagggttaaaaggtgtgtgggaactctctgtactttccactcaattttgctgtgaacctaaactgctctttaaaaagtctattaattaaaaaaaagagagatgggaagattctgaggtacttcattgtaaggaaacattacttcatataactacctttccccagagccccatgccatgtagtatccttaaaattctatattagttaggtaacaccaggttatgctgcaataamaaatgtccctcaaaatctcagcaatgtgttaaaagtttatttctgagccaggcatggtggctcacgcctgtaatcccaacactttggaaggccgaggcgggtggatcacgaggtcaggaattcgagaccagactggccaacatagtgaaaccccatctctactaaaaatacaaaaatcagctgggcatggtggcacacgcctctagtcacagctacttgggaggctgaggcaggagaatcacttgaacctgggaagcggaggttgcagtgagccgagatcgtgccactgcactccagcctgggcaacaaagcgagactctgcctcaaaaaaaaaatgtttatttctcaggctatgcctaatgtgcataaggaagtatgtggtctgaagttcactacagtcatggaagaaagagatggagaaagccaccagctcttaayggcctcagcctagaagtgatcctcatagattctatccatggcgtattagccagaactagtcacgtggcccccaccaaatcacaaaggaatctgggaaatgtagtaacacatgtatatttttatgaacactcactattcctgctattcctgctgaaatgtccattttaaaaatctagatgtgcactaagtttgaacatcttatgaacaggtgaagaagaccttaaacagaatataccaccaaaaccgtaaagttcatgaaaagactgtgcrcactgctgcagctgctatcattttaaataacaatccatcctacatggacgtcaagaacatcctgctgtctattggggagcttccccaagaaatgaataaatacatgctcgccattgttcaagacatcctacgttttgaaatgcctgcaakgtataatayattgcacatgtctctctgtgtattcaagcttatttgtgtgttcatggggtaccgatgtagctaataataatgatgtggtcattatgcagggttacgttgcataaaaccaaagagtgccagatttcccataatagggctatttagggggccagatgaaacaacttcactttggcactatgagtccatgactggtaactctgggtataatttttagtagggatgtcttgttcagtctggcaagtgtatattgccaaatgttttaaaagctaactgcattttcaacaggattttaaaaataagtacaacaaaacaaagtaaattcttaccaaatggttttcattgtaacatttcaagtgttaggaatttttgaagcctcatttatcacagatcaaataaatttcccatttaagtttaaaatcttaggcacggcccacatttcaaggtgattcaaaatttaaagagtgcaatcagtagagttcatcactctataactcttgctgaattaatttccttccagttaccaagtctgtcctcccaaatgcaaagtggctcccccaaggtgcctcctccctggaattagagggtcagagaaggaagtttcatttttcctgagttacatgcagaacactacccccacgaaagatcagatttaagcattcaccacagagattggaagggtggaaaataaagggaaagaaaatgaaaaaagacagcattaaaaggttgaaagaaagagaaacaaggactaagactgaaggaagacataagaaacgggtgtgagtagaacagagataagagcaggacattcaggaaagagcaatggagcaagtgagtgagaaaagaagccaaatctctctgcagccatgtatttctagttgaacgcatttagcttctccatttctttgtttgcttttatgagrccctgtgaaggagatcctgggtgtacttgctgccttcgtcttatggctctagcatttcagggacccggaaagaggagacagtggggtagagaacagactagaaattgtgaggaaaatatcaccaacattatggttcagagtctcagaaccaaaaacattagagtggggaggaacactaaaggctcccttgcttggtatctctccactgtagggctgtagtctcccagcaggtggtattcagactttgcttccctctcccgatgacaggaagctcaccatctttgagggaacttgtgccagtgttgttcagagactctcaccattatgtctttgtataatctgaaatcttcctattggctctggttttatcccaggagcaaagcaaaacacgtctagtcattcatccacaagaagaccctttgaatatctgaggatagctgtcataacccttctcatctttgcttctctaggctaaaatcttataacctagtgatattggaggggaaacctctcaggatgccattgcctcccctcaattattttctaccttagacctaggaccagatttctataattgattattttgatgttttgctatgttgtcataatgttgctattactgatatgattaatgttatgtaatcagaaatgaacatcttaacactaattacttagacaagatggacgcaatggggtaaggattaagacttactccagaggagacgatgatttctatatgggttttactgagctgtttctgtaattggaaacttcacagatatagaagaaatactggaaatgtactgttatatgtcattagtgagagagactattagggaatgcagaaaaacatttaaagaaatattgtgcaatctccccagtttggcacaattttcctttaagtgtatgcactattaaacaataaaaccatgacgaatcaaagaattttgccatgcctgaaatgtgtctactagtcaacttaagccacctcaaagctggacacccttgccttgctgtcattttgataccaaactaaatttcaaatatctgagtaatgaaggggctagccctaatcctgatgctaccacgccagctggcaccaccctggctcttggaaaggcatgaggaaaatttggcttcctcttttttccactgaggattttttttttccaaatttgacttgggaaacwgtcattacaatgaatgtgcagctttttttttcctcatatgttgcagcaaaattgtccgtcgagttctgaaggaaatggtcgctcacaattatgaccgtttctccaggagtggatcttcttctgcctacactggctacatagaacgtatgtacaccaaaaagaggttctccttccataccycacaacttagcattgctggaactgctattaaattacagttattgtgtgtcatcaggtagtccccgttcggcatctacttacagcctagacattctctactcgggttctggcattctaaggagaagtaacctgaacatctttcagtacattgggaaggctggtcttcacggtagccaggtaactcacttctcatggattttgctyaataaagtatgcaagaaatcaggctgaggtaaaataaaacatatatgctgtgggtaatgctatagaatgtataagttaatggtggcttctgtcatattttgcccatgatttccttatctgtaagaggctgtatggtttatagtcactcagagaaagtttcgaatwtgaacttgaaacctaagtaatttgatccattgaacttgacaaatgtccatttgtcttttcaaaggtgcacatattcacaaaactgaaattgtgccaatatttcttacataaacgtttaaaaataatattttatttttattcacagatatatttcttagcctcctctcacccccaagtatttaattmtagaatatattttccttttctggttgtttctatgaagagattgattccccataataaaacccttcataatagaatatgatgctctaaagagtcaatctgtatttctccaacactgctagaagagaaaagaataaaatgtaggcattcaacagctggctgacttccatccctttagtgttatccaaattgaggtgatggtctataaagacttcctaataatgacatgtactttctttttagtttttatgtacatgaaattattaccttgtaaatacagccatttaagtttttaaaatgatccaatgctataaaaacttgagtctttatcaatcttatattactataccttttggtagtactgtagtcagagtactatgcctttctgtcctgaggaatcacaatctgttttctgatatgtactttgaaatgcaaaacatccaggggttaaagggctgggtatggaggacagaaaatatgtaggattcctatttgttgtggaaataagtgtgttagccccctcatggtgtttatcgacttttttttttttttttggctagggagaaaagtttgacatggaatggggtgagtcatggcttagagaataccatgtcctcacatagcagcagccttagaatgactctgccaacacctttccatctacttttagatgctctgcaagacagctgatgcgttgtatatgacagtcctggaaagactaagagtctgtaggatgccatcataaaatagaaagctcatggttttcatagtcagacagaaggggtatgggtcccgcctctgacatttattagctgagtaaacttgaaaactttttttgcctcatctacaaaatgggtaatatcatatgtacttcaaagagtggttgtgaggattcaatgaaaaactaacccaccttatattcaggcacagaggtttttgtctgttttagtttttgtttttagctgttgcaaatatttaagtttttggccccttgagaagttctagctgcagctcagaagcttcaccattatttacagagcaggcagggagcttgcrtcatgaacattatattgattttatccaggtggttattgaagcccaaggactggaagccttaatcgcagccacccctgacgagggggaggagaaccttgactcctatgctggtatgtcagccatcctctttgatgttcagctcagacctgtcacctttttcaacggatacagtgatttgatgtccaaaatgctgtcagcatctggcgaccctatcagtgtggtgaaaggacttattctgctaatagatcattctcaggtaattcattcagtctgtgagtatttattgagtccctaaaatacgccaggcacgttttaaatatgcttagttcttggaggatacaagacaaaattgtgcccatcttggagctcatattccaagcacttggccctcttggtattggtcccctttctcctttactatagatatgttataatttcatwtattagatgattaataagtgcctttaattggaggcaaagagaaaatgttgatgttaacagaaacaagaaagkttaggacacaacagaatagagctaccactgtctcctcacttggctctctcaggcacgagggcttaggtgatatttatcctgaaggcaggagctgaactatgtggccttataagtcactgatgacatttgtaatgacagagatgatgaagatgcatacagtgcatcattttgaccctgccaaattagtagaggcacaagcaaccacggccatgagccacatgcaagaaatcatgaagactctttgcccaaaattctcatgtatataaaatctcagaaagatgtgttcattcttagagtataggagtactttcattctctagagccacattcttcaaaatggttttcaattttttgtggcccgaaatcttatgatactgtaccaaaaaatgacaatactatctttgatgcagtaagatttaagtggccaagatactgtgggatggagatggtctgcctaattagattttctgaaaaacagaagagggttaatctgaataacctttgagtctgaatgtttggtgcttaaaatttttctttaatagtttgatttattttctgcttcactaagcatagcaacataaaaaatgatatatttgctaaataaaatcttatgaggaatcaaagtgatcactgtgtactctaattcatacttattatattgagaatatataaggagattgaaataaaaatttacagatgattggattgacttgtaaagtttactttattgttttaatacattaatggataatagcctacgtktgaattttgcctccgttaccttcttgctatgtgctcttgggcagttacttaatagccttaagccacaatttcatactagtaaaatgaggcacctggaacaggtggtctgaagattttatcagcttttttgtttgccagataatttgaggattctgatttgttaggttctggttatgaaatcatagattttaagggctgggagatatcttaggtattagactgtattaaaactcctccaaaagctcattatttgggattaaacagtgttaattttctatctttcttgttcctcatatcagctcaggatagctgtatataacaaaaacaaaaagcaatttagagtggcttaactaaatagtttcacttttatagtgtaacaaacatttggaagtasgtggtccagggttaatatggaaatcttaagatatcatcagaatccaagctgccttccttcagctcagccattcttacttgtgacttttgacctcatgcttgtcaccttgtgattatcagatggctgctccacttccagcaccacttcctcattccaagatggaagaagggaaggataagaggtcacagagtctgactctttttcaagaattgtttggaatccctgtctaggttttggaccaaaacggtgttacatggctatctctagctgagagagaagcttttgaacatagtttttcaatgggtgtctgaacaaaattgtttctgtcaatacaaatgtagaaaggacaaagagcagtgcgtcttgtatcccttaatcctcaagtcacacatkaaaaaaacagttctcaaattatatcagaattttacattgcacaattccagttttaatgaaagaatcgtctaaaggcagcataagtactgaaaaagtagtccacgttttaggacacagaggacagctcaacaccacctgtatgtgcttagctacccataaacaatgcctgaggatttgaatcggggtgtaaaaccatgaggagtaatctagatctgggtcagcaaacttgttctgtaaagggtagaaagtaaatattttacgctttgcaggccacatggtttctgttgcagccactcaattctgttactgtagagtgaagacagccatcagcaatacattaacaaatgagtatggctgtgttccaataaaattttatgtacaagaatagccagtgggccagacttgcctgctggccatagtttgccaatccctgatctagattawcttgtacagtttttctattcactaagctagggcagctaaggcaaggcatattctatgagaaagattgccccctagctattaaacatagcccagtgtctgtgtgtcaggttggagtatttggcagatctgaggttattatacaaattaagctgtctgaggccccctggctctgcagagcactccagtaatgccatcctagcttcagagacacataccactctaggtcaagtgctgacactgaaggaaatgttggcagtgggtagcccatcacagccaccagggcagatggaattactctgtgcttgctcacactttctctcttcagctaattggattactcttcagagaaagatgtctcataaagtcagtttaataaggggatcctctttagccagtaaagaacatatttccctaaatggaagcaacaggatgagttgtcaaaatgtcagcatctgagctataagaaacacttatgggaccaagaggatcaaagaggtcacattagctacaaagttctaatawctttttcctctagttcataggaaagaatctaaataaatatgcactctgggccaaacaaggacataaacctatgctctctctctctttttttttccttttttgcaatatttcttagaacaggctttcttgtacaccaggagacaaaagagaggtatgagtttgtgatagccatgaatattagtagaaaagtcttcacccaggccaggtgcagtggctcacgcctgtaatcccagcactttgggtggccaaggcaggtggatcccttgagctcagaagtttgagaccaggctgggcaacatggtgaaaccccagatctacaaaaaataaaaaaattagctgggcatagtggggtatgcctgtagtcccagctactcaggaggctgaggtgggggtgagaggattgcttgagcccagcaggttgaggctggtgtgacccatgatcacaccactgcactccagcccgggtgacagagcaagaccccatctcaaagaaagaaagaaaagaaatgtcttcaccctagagacaattggagtgtttattctggcttcatgtgtagcctctgagcctgatttttcctttcaatcttaagatataatgcctaccatggaatattggtatgaggattaaatgagacaccaaagctttgtagagctttgggcacacagtatgtgctcaaaacctgttagttctacttactttatactgcttaaaaattagcaccatgtggcttagtccctttcaaaaaggaaagagtgctttgtttttctacaggagtcagtggtttatctttataagggggtccaagaaaattcctctttgcacatgcattcttcttttgtccctttgtgtaaggaagtagaattttcccagaaatccaaggcactcctcataacccaccttgcaatggaaatgctctctccccacaaaaggtgcgttgtctaacagccatgaaatggccttttccatggcacttggtgtattttgccttccatttaatatatggttggtgggaaggccaagatccacatcacaggcctctgctggactgggtggatgaacaagattataattttcaaattaggaagagagaaaaagatgcaaagaaaggaatayttctgaggtgaggcacaccatagctttcatttggaaayaatcatgtttggagtacacatacagaactctcatattttggtcccatagttcacaggcataggtgaaaatgtgggcatgactattgtgttttcttcaggatagtttgtgtccatcacattagttataatgcctcaaacaaccccttcatcccatgcagccatattttgtcctatatcaaatgtctctttaagtatccttagrgctatctcctaatgtgtcctgarcatggcactgagaatctcatgcttccatcaaagagtgtccttcagactgaaagtagcttcatgccgcaaccgtacttttttaatacacctggttgtaaaccaagtcctttgcctggggtttcctgtgacctttttttggaaagtgaagagaactcagggagatcaacacaatccttgctagaaagttaaatcatggcagttatagctggcaaatgcatggcttgtttggtctgagtagggcagttacataaagaagttagtcatcctgccggttgccaggaatttaagatctttggaggaatatcaaaattaaggatactgagtctctttctcaaaatcattatcacttccaacactgtccccaggcaatctgattccaatccaactaaaaagttttgtgccaacatcacctcaactaatgtacatgaaaaaaaaatgcaagacttaaaggctaaatgcaggcaaacagcacaaaacaatgggtttcagacaaccacaaaatttgctcaggatgggccatgtttgtaaataattactgtccctatgaaaaatactattgagttcatgttgaacttgactattaactcagtgtcatttcaaatgtcaaacagcagggtattaggcttagttaaabttgccttcgttttctagttggatgtaggcaattcctggaacttgtatacagttggygtctctgtaaccgctggttcctcatcaaattcaaccaacctcagatcaaaaatatttggaaaaaaaacaccaaacaataaaatatagcaaaacgacagtatatattcatacaatttttaaaatacagcataacagcaacatagcatttacactgtattagrtattataagtaatctagagatgatttaaagtgtatgggaggatgggtgtaggttacatgcaaatactatgcctttttatataagggacttgagcacccttggattttgttatactcagggctgggcataggtagtcctataacaagttccccttggatactaacggacaaacacactccactgggagttttaaatcttgtctgttattttctagcaggatgcagttgactgtatttgccacagcacataactagagaagtgctgaaggacctcgagagatcacctgatccaaacctcctccccttacttccctggacaaaaagccacagctagatttctgatggagatgccttcattttccttagttcaaaagtttccaaatttaggtggatcagaatcatacaagggcttgttaaaacatagattgctagaccccatcctcagagtttctaatttagtaggtatgaaggggaacttataatctgtacttcaaaccagttcccaggcaatgctgatgctgttgttcacagaaacacactttgagaaccattgttcctttcaaagtgtagcaatgattgaaggaaaacatccttcttaaytggcacttcatcactctggtattttaattgactaattaatttagcaaatcaacagagtctacttccggtgcttaaaattaggacagcatgtttccaagcctagagaaagactccaacatcaacacaactcaaatggaattatctacagcaggaggtcaaatgtgccattggaaagggggttaactaaattgtacttattatttttataactattattatgcttttttcttctaggaacttcagttacaatctggactaaaagccaatatagaggtccagggtggtctagctattgatatttcaggtgcaatggagtttagcttgtggtatcgtgagtctaaaacccgagtgaaawataggtaagtgtttatgcattatacatttatgaattacatataagactatatacagagaacttccgaaatatgttttgggaattaatcttctgacttttcaaaatctatgctttctatttggaattataaaacgatagagttggaagtgatcataggaaattattctgtctatagcttcttatgagcaggtcagtacctaatatgactcagccaagaattttcctgcttttaaagacatacatagacaggatgccctgtgaatcagatggttcatcttcttttggtattccaccaagagaagaaatttcactttaaggtaaactttcctcttttgttgtcttcagtggggaaaaataaaatagataatttcatctgtgcagaaactaactattaaatgttaagagtccttaagtcttttcatcagcattcctttttctaaataaaatactctaagctcctttaatttttctaatctacctgtgagatttaatgaaagtgttttactttgaatataaaacaatgtctttgaactagtgtgaagatgaaaattattagccttctgttacagaatttttaaaaaggaaatagaaatgcaactaattttaattttttgatatttaaaaacacattcaggcaaaagtgagatatgtgataaaatcaaatttttgattcatcttgagctatggatgaaggaactgagagcaatcaaacagtagcacatttaatgtgaagtgtgacccacagtgttaccaaaaggaamcacagaatgaaaaatgacactggtcatcaaaaggttcacaatataacttagggcttcccacataatcagtcatctttcacctctttccaaagtactttctagacagaagtttttccaaatgaaatggaattgaattctttgcaaagagaaatcaacaacagcaacaacaacaaaaagtaatttggattttttwaaaaagtacacagtatccttaagaatctacccttatccatattgtaaccaatctgtcttccatttccacttgttcatttgaaaaaaatatcttttaaacctttgctgaatataggacatcagaaggtactctaagtgattcagggattaaaacgacctctgacctatttttacactgatcataacagcagcaggggttttaatttrcrcagcaaaaattaatattcctgtcaaaacataagggcataaaactctcatttaattgtgaaagcagtttctcacagtttgatttaaagtccacaattcaattacagtagaagtaagtcttctgttgaaattatttatcctcttcatcattatccagggcacattccccagccaatgcaatctgtttatccagttatctagagcatcattaaaggacccaccatwtttttcctcctaggacctactgtacatgccccactgtaagaatgattttttgtaacacaatattttttcaaatatcttggcaatcaagggcttacgcctctagagactctttggagaaggtaatgaaatggaattaaaatagctgcctagaagccaacagagagatagttaacaaaaaactataagcatcgattgtcttcttggtgagtttagactccattttaatataacttgggtatttctgacctgctgagaggactgggttccaagaatgttttcattttggtctttgttatgcccatacaaaacaatgtagtatcttacagacactccccacatctgcaactgaaggcaggggagagctcaggggaagggcaaaccttccctgcccaatatctgagactcaccaggccctggttaccagcagaactctaagcacatccaggtcacctctgaatcccttaagtgtttccttccagtcactggcatcatacgttcagaccctgtaaagttacagctgttagtccaatwccattaaatataatatgaacaagttttttctttttttctcaaatgtttagggtgactgtggtaataaccactgacatcacagtggactcctcttttgtgaaagctggcctggaaaccagtacagaaacagaagcaggcttggagtttatctccacagtgcagttttctcagtacccattcttagtttgcatgcagatggacaaggatgaagctccattcaggtaagatgcagcgttcaggtcatgttccaggaccatccccagtgcaccaggaacttgcattcagtttagaacattcagtttcagaattaaaacraaacagtagaaacccagggaaagatgaattttctttaaatgagtagaagaataattgataaggccaaaaaaagtcagtttctgggataccaaaaaraaatctaatgactagttcatttgattctggagatagttatcatattctaatccagaaacaatttatccaggaaagaaaggcctatgatttaccataggagttgccacatagtttcataaaaaaaatcagatacacatttactgtctggtatcttcacaataaactgctggacaaaagatttcaaataaaacacctggcaatccatttaccatgtttaagggccaaaatgaattcgcaatttttaagtattccatatagcagcaacttgaccctgtttaagttttggctcaagtttcagagtttgggattctgaatttttttaaataatgcttttggtaaaatagttagtgttttaaaatacaaagatataatttccatgtaacatttgtgctgtgtcatttgaattttgtaaccattatttgtaacaatactatcacatagagctagaatgccttgagtctaggtagcactgaccctttcataatagttgacctacggtaagcataagggtcatttgtacagttaaaacagcaagccacatcttacatcatctccttttttaagtaggccaaaattgagcaccttcattattttactgacatttcatgattcatattaaaaaacgcattgattatataaaagtaaacgagtcagttgtattttcagagaataaaagattgtgctttatagttaaactattaagctgtcactaacttacattaagtkatatctagaatgaacctccacaaatgcattttaaaaaccccaaccttctaatggttgaaatgcagtgaccaccaacccacccacatgattaattggtttggttccacatttgccttgggcsagagctcttagaatgtttctctgtccgcattctctgcttaaatccagctgggcttgcctgttactcaaaaggagagtgctcccaaggtggggcttctggaatgaagggtgagacacagcacagcctgcaaagcttaatggcatcaccaaaaagctgaaatgaatttagtctttcattctagaaaaatgtatggcaggactcccatatcccaggcatttgaagtgtttctgttgatataaaaagaaatgagaagaaaatcacccattcatggagtagcctttgacactcatatcctttctcagattgctttggaacagaarcttcaagtacattcagtaacttggctggagaggtatagggtgacttaactgtgtgtgtaattctgttattgttgctgttgttgtacaggcaatttgagwaaaagtacgaaaggctgtccacaggcagaggttatgtctctcagaaaagaaaagaaagcgtattagcakgatgtgaattcccgctccatcaagagaactcagagatgtgcaaagtggtgtttgcccctcagccggatagtacttccagcggatggttttgaaactgacctgtgatattttacttgaatttgtctccccgaaagggacacaatgtggcatgactaagtacttgctctctgagagcacagcgtttacatatttacctgtatttaagatttttgtaaaaagctacaaaaaactgcagtttgatcaaatttgggtatatgcagtatgctacccacagcgtcattttgaatcatcatgtgacgctttcaacaacgttcttagtttacttatacctctctcaaatctcatttggtacagtcagaatagttattctctaagaggaaactagtgtttgttaaaaacaaaaataaaaacaaaaccacacaaggagaacccaattttgtttcaacaatttttgatcaatgtatatgaagctcttgataggacttccttaagcatgacgggaaaaccaaacacgttccctaatcaggaaaaaaaaaaaaaaaaaaagtaagacacaaacaaaccattttttttctctttttttggagttgggggcccagggagaagggacaagrcttttaaaagacttgttagccaacttcaagaattaatatttatgtctctgttattgttagttttaagccttaaggtagaaggcacatagaaataacatctcatctttctgctgaccattttagtgaggttgttccaaagacattcaggtctctacctccagccctgcaaaaatattggacctagcacagaggaatcaggaaaattaatttcagaaactccatttgatttttcttttgctgtgtctttttgagactgtaatatggtacactgtcctctaagggacatcctcattttatctcacctttttgggggtgagagctctagttcatttaactgtactctgcacaatagctaggatgactaagagaacattgcttcaagaaactggtggatttggatttccaaaatatgaaataaggaaaaaaatgtttttatttgtatgaattaaaagatccatgttgaacatttgcaaatatttattaataaacagatgtggtgataaacccaaaacaaatgacaggtscttattttccactaaacacagacacatgaaatgaaagtttagctagcccactatttgttgtaaattgaaaacgaagtgtgataaaataaatatgtagaaatcatattgaattccttttgtcttttgttacttccaacaccatatttctcattcctgccactttctgagcctagacacatacacagttaagcctctgcagcaatacaggtcaggccaggttctctagatgggagaccagacccatttgaaaaatgggccactgaaaatatcagcagtcagaacctcttaaggacgtgtgagcttgaaaacatgccataaccccagttttcataaagctctggactggcccctttactgtcatgttactaaaaaggaagaaaggaatcagaaactaaggtggtgggtggagcatggtatgtggtagcatcagccttggggaaaccactctgtaaagatgctgacgtcgcagggaaagtgagttggtctagggtactaagctgaagatgttgtggactcaggcgcttcagccctgtgaggtttaacaaatcacagccacctctgcaaaatgtaatcatttacttaacaatgatgactgtggtgctctgaatgttagtgttttgccatttcccaactgtttactgggctgctgagccaagtatctgcccacccagtggagaatggatgatcctgagcaactctaacatgctccaaagaaacaagaaagcagcagcataggacaaacagtaactcctttgtagataaacaagacagaaaatgaagaggggtagagtgatagtccacatttggaaataagatattggagccagaaaaataactttaaacctcatttgcagtcctctagttctgactacttctccattataaatgccagcatacagacacatttgtcttctgaaaagacatctatttgggaattgtatagccccctaatgtgaatctccaggcctctgtccagtcagatctttcctgcaagctttaagattagcgtggcttcttttcttctgtgaagtgttattgtcattccctggctcatgttgcagtcctgcctgtgacaagttgctccctgcttctctaaactgaccaccttcaagtaagtgttaaagctaacacttactgagtgcctattatatgcgaggtattttaaagccttttccgtacattaatttaatcttcataaaaactatatttaataggtagcattatttccatatgatagatcagcactaagagaaatataatatgagtcacataagcaatttggaatttctagtagccacattaaaaatgtaaaccaaaacaggcgaagtaaactgtaataatatattttatttaacccaaaatatccaaagtattatcgtatcaatatataagtaacataaaaattattaatgggaagctttacttttgtggggaagattaggtcttcaaaatgtggtatatatcttgtatataaagcacatttcagtttggatgagacacatttcaagtgttcagtagatgcatgtggctagaagctgctgtattgaatagtacaatattgggcacacaagacatttaatttgccccacagaagacactttctcacttagaaagtgaaagaaccaggactcaaatatgagtagtttcacctcagaacctgctctctgaacccattataggatgtttcccacatgcttttggttttaaagatttgctgccaaacgaatacagacagtaggttatgaaaatgagaaacatgtgacagcagcaataaagctaagagttgttgccctttctttttttttgagacagagtcttgctcggtcgcccaggctgcagtgcagcggcgcaatctcagctcactgcaacctcttcctcccaggttcatgccattctcccgcctcagcctcccgagtagcagggactgcaggcgcccgccatcatgcctggctaattttttgtgtttttagtagagacagggtctcaccgtgttagccaggatggtcttgatctcctgacctcgtgatctgcctgccttggcctcccaaagtgctgggattactggtgtaagccactgcgcccggcggacttgttgccctttctctgtggtcgttcagtctcctcctctgatggaatcagaagcccaccataatcaattgtagaacgcatccatcattccaaaaagaaacctgtacactttagctatcacttccaatgtacccatctcccagccctaggaaatcactagcctactttctgtgcctagattcattgtggacaattcatataaatgcactcatatatactatgtagtcttttgtgactggcttctttcacttagcattgtgttttcaagtttcgtacacgttgtagcatgtatgagcactttattcttttttatggtcaaataatattgcactatacagttatgccatgtgtttatccattcattagttaatggacatttggtttgtttccaccttctggatattatgaataattccgctatgaacatttgtgtacaaactttttggtgggcatgtgtttacatttctttatacttagcagtacaattggtgactcaaatggtaacactatatttaactttttgagaactgccagaattttctccaatgtaactgaaccattttacattcccaccagcagtgtataagggttctgatatttccacattctcaccaacacttattaatatacttctttttgattatagtcatcctagtgggtgtgaagttagcactatatttcgaataaataaaaaaatgtatttggctgggtatggcggcccacacctgtaatcccagcactttgggaggccaaggtgggatgattgcttgaggccaggagtttgagaccagcctgagtaacataggaagaccctcatctctacaaaaaataaataaataaaaaaattagctgggcttggtggcacatgcctgtagtcccacctactctgaggctgaggtcggggaatcgctcaagcccaggatgttgaggctgcagtgagtcgtgatggtgctaatgcactctagcctgaatgacagagcgagaccctgtctcaaaaaagaaaaaaaaagattcaagtccttgccctttttaaagttgaatatttttccttttatttttgaattgcaagaattagttatatattttcagtgtaagtcccttatcacatacataatttgcaaaaatcttctctcattctgttggtgtcttcactttcttgataacggcctttgaagtacaagagtttgtaattttgctgagatacaatttatctctactttttcttttttgtttgtttgttcttttggtgtcatatctaagaaaccattgccaaatccaaagtcacaaagatttaacactatgttttcttttaagaacttcatattttagctgttaaattagtccatcatggttaattttttatatagtgagaagtagaggatcaaaatttattcctttgtgtatggatttccagttgtcccatcattgactgttgaagaaacaactctgtccccattgaattattttggcatccacaaacatgaaggctcatttctggactgttagttttattccattaatctctatgttgatctttatgctagtaccgcactgccttgattactgttgctttgtagtaagttttgtacttgtgaagtgtgaatcgcatattttgttctttttaaagattgttttggcaattctgagtcccttaagttttcatatgaattttaggattagcctgtcaatttccacaaagccagcttggattcaaatggagattgtgttgaacctgtgcatcaaaaattaattatattgtctccaggtccatgaacacgaaacatctttccatttatacacatcttgaatttctttcaacagtgttttgtaattttcagagtataagctttgcacttttttcgttaaatttatttcaaatgttttattctttttgatgctattctgaacacatttgttttgtttcattttttcattgttcattgcaagtatataaaaatatagtttttttttgtataatatattgctcctgtaaaaacaaattatgttgcaacactgctgacctcatttattcattctatatcttttggtaatagattctttagaattttctatgtaaagaataatgtcatttttgaatagacatagttttacttctttctttcccatctgaatgtttttctttttttattttcttgactaattgccctggcaagaacctccagcacaatcttgaatagaagtggtgagagtggacatagcaaagatgataatgctggtgaaaaatgtggtggtggtgacagcagtgacagacactaataaccacgggacatgaaaggaaggcccaaattgtttggcagtagctctagttctattttcactaagtaatatacagttgttccttggtatctgtgggggattggttccaggacccctgtgggtactaaaatctgtggatgctcaatcccttatataatggcatagtatttgcatataaactacacacatgcttgagtatactttaaagcatctctagattacttataatacctaatacaatgtctaaacatcacttcattcacatggcttcaacttagtagtcaatgtggggcaaattcaagttttgctttttgaaactttatgaaatttttcttccgtatatttttgattctcagttagttgaatctatccatagatggagaactcatgcatatgaagtattgtaagttctgctgtgcttgaaaattaataaaagcttatttgaacgtttaaaacactttcaagatagtctagatgtctgactgcacagagaagagatacacaacttgaggtgcctgtaccagcactaaggatatgtttgagattcagattggttgaagcttcagtgttgtcaacttagtcaacttcctcccctagaaggaagcggggagagaaagggaataggacagggaggcctggcttagaaatccagttccactacctgctggatcttggacatgggattcaacctatctgccatttccaaaatgggtattataatctttatttcattgtgttgttttaaggattcatggagataatgcatgtaaagcatactgcccagcacatacttggtagcatttggttaatgtttttaattttggagatgtagtgagcaatatcttataactgatcagttttaataaaaaggagtttgtttgcactttatttctacctcttccttacaggtagttggagagcatagtagtaattttctctctaactctccagaattggtgcagaatggcatgaaaacctttcccatgcagcatccaggaaggtaggaggcaggggattgcagcagtgaggagatttggagtaagatactcctgcatacgtgaaatctcacctcttcttcttactactgctacataaaccttcaagcctctcagcttctacattgggaaaatgagcagcacctcataggttgttgtgaggatgaagtaaggtaataagcaagttcctggcgcataacaagcatttaataagtactcattaatactaacttttcatgtgcagtcttatacaatttctgagtaaagcaacattttatgttttgactcaatggagtgaatctattttctggacattcatccatgaacatcataagttttggaatggctaccagttttgtttatttatcatgaaaacactactttcacattataaaaaattattcctccattttgtaaaaacatgactttcatccatttctctgcatacctaaattgacctgagatttcactgatcctttctttaccatttttctttgcttttgtcctctgtaaatatgataattaccaagagtaaaagaataagtcttttcactagggggcatggaatgaatttaaaattcatccacaaaataagaaagttctagtagaaagtttttggagaaaatcttaagagaactctacatcataaataaaatggataggatttttgagaggaaagaaaataccagaagacaccactccagctcagtcattcttgtttaggacttgagcagaatgtcata

SEQ ID NO: 5695 - DNA, 53323 bp, Homo sapiens
tctatatataagatcatgttgtctgaaatcatagacaagttcttgtgatttggatgtcttttatttctttctcttgcccaattactctggcttggatttccagtactgtgctgcatagaagtggcaaaagtgaatatccttgccttgctcctgatcttacaggaaaagctttcaacctttcactattgactataatgttagctgtgggcttatgtatatggcctttattttgttgaagttactttctttccacacctgagggtattattccttcctattgcctgagggcactattccttctttaccaattgttatcataaaattatggtaaaatttgtcaaatgctttttctgcatatattgagatgattatatggcttttgtccttcattctgctaatgtgtgtatcacatttatagattttcttatgttgaaccatccttgcatcccaggggtaaattacacatgatcatggtgaataatccttttaatgtgatgttgttgctttgtagttactgtgagacttagataaaacatataatagttataacaggctattttaagctgataaaatttaacttcaaggataaaaaaactccacacttttactctccctccacattttataggtttttaatatttttcagactttatgtttttgatgttataatttacatcttttatattgtgtatctgttaacttattgtggttataattatttttaatagttttgtcttttaaccttcattctaaagatataagtgatttatacagcacaattataatattggaaaattctgaatttgactgtatttttatttttacctgtgacttttatactttcgtagattttcatgtaattaattaacatccctttctttcagcttgaagaattccctttaacatttcttgtaaggcaggtctcgtgttgatgaactacctcagcttttatttgtttgggaaagtctttatctcttctttatttctgaaggatgggactcttggttggcagttttttctctttcaacactttgaatatatcatctcactctctctgggcctagaagcattctgctgagaaatcttgtgatagccttattgcaattcttgtctgtgatatgcttcttttctcttgctgattttaggatcctgtctttgtctttgatttttgatagtttgattattatgtcttggtgtagtcttttttggattgaacctgactggagatttttaagcttcctgtacctgaatattaatattttatttcagatttgggaaattttcagctagcaatctttaaatatgctttctgacccccttttcctctattttctccttcttaaactactgtaatgtgaacattagctctcttttttaatttttaatttaatttttgtttttattttttgagatgcagtctcactctgtcacccaggctggagtgcagtggcatgatctcagctcactgcaacctttgccttctaggttgaagagattctgctgcctcagtctccccagtagctgggattacaggcatgtgccacaatccctggctaatttttttgtatttttagtagagactgggtttcaccatgttggtcaggctggtcttgactcctgacctcaggtgatccactcaccttggcctcccaaagcgctgggattatggcatgagccactgagtctggctgaatgttagctctcttgatgctgtcccataaatcttgtaggctttcatcatttcttttcattcttttttctcctctcactgtatattttcaaaaacctgtcttcagttcacagattctttcttctgcttgatcaagtctgctactggtgatttctactgcatttctcacttcattcattatatttttcagctccaatttcttttatgatttcaatctttctgttacatttcttatgttgtgcatttattgtttctctgatttcaccaaattgtttctctgtgtttgcttcaaagtaactgagcttctttaaaaacaattatcttgaatccattgtcaggccatttgtagtactccatttcttttgggtcagctactgggaaattattgtgtttcttaggtggtgatattttaatttgggttttcatgtttcttgctgccttacactgctgtctgagcatctggtggatctgccccaatttcaggctgtatgggctgactttggtggagaaataccttcttatgtggaataatgcgaggatgctggctgggtgggatgcaaaagttctgacttcagtaggggcaaagctgtgtggtctccatgcagatctgtcagctgaggttggtgttagtgaatactacagggatccttagaggccaacactgtgggtatctacagtggcaatgaggctgttgaggttttcaattgtgacaagtcctccatatctctttttttccccacctgggaagtcatgactgaggacatccctcttggaattaggtctaacttgcaggcctgctcctggtggtggtgacactggtgtctgatgaacagtgcccatggagtggccaagagccaaggcctgaagcatgggcatgcatggagggaccacagcaccagattcaattgtagcaatggtaccagtgcccaaggcacaggcatacttactatcacattgataatggtgtgtaaaatgcaggtacttataaagcagctaaggagccagggactttactgcatgcatacgcagagctacagtggctccaggatccagggtgtgggctagctctccttggtggctgagctggtgactagagcatggacaggcacagagaaaccttgactctaggacccagggtgttcactagctcactatagtggtggctctggtgttggaggtgtgggtgtgtgtagtacagcctcagagacagggtctggagcgcaggtgtgcacattactacagcagctctggagttgagaatatgggttacctttctacagtggctgaactagtgtctggagcaaagactttcacagagagaacttggcttggggttccagggtgagatctagttcacaacagcagtgactccagtgtctgagacatgaggaggtgcactgcagccacagagccacagtccagagtgtgaatatctgtagagcagccacaacttttggggatcaggaacacacatagacttgtgagaggtggtaaccctggccccagtcctggggcagtgcaacaatagctgcttcttggtgagggggtgtgaggggtagtgcaactgtgtttccctttttagcatcctgctatgggaatggctgttggacaaaagatgccagtgtcctctgtggagcaggacactgggggcctcagtggctctgtgtcacatgactgacacagatagcctacaaatttctttattcgtagctatctcctggtgtctcatatatgccagtctcaccggtgattcttctacatggatattctttcttttctccattgtgttgttccaaattctttaacaggctcttgagccccatcccccaactccccacccttgtgagggctattttggtttgtgtataactgtctatgtttgtttttttgttggggcataaggctgacatctcctactccaccatcttgctaatgtcacctgcataggaatctttttatgctttccttatattcactaaaatttaacaatatcaaacttaaaaacatatgatcaattgaacttattaatatcaaacttattataaataagaaactaccaggctgggcatggtggctcatgcctgtaatcccaacattttgggaggctgaggtgaaaggatcacttgagcccaggaattcaagaccagcctgggaaatatagagagaccctatctctagagatttttttttttaattagccagtagtgatggcacacatctatagtcccagctactcaggaggctgaggtgggagaattgcttgagcccaggaggtcaaggctggagcaagcagtaatcatgccactgcactccagcctgggccgcagagtgagaccctgtctcaaaaaaagaacctactagtctacataccacacttcctcatccccatctgagactatatatattttttctaacatgaggcaatgccaaaaagaggrgctggtgagtgaaagtaagaacagaaagacatggaggcaagtcttatagaataatagccaacacttaaacttacacttaacagcgtgataggtattgttccaaacacattaaattcatttaatggtccttacatgtctatgtatttggtgaytattatccttattattcacattgctgagtgtattattctgttctcatgatgctgatagagacatacccgagactggataacttattaaaaaaaaaaaggtttaatggactcacagttccacgtggatggggagtcctcacaatcatggtagaaagcaaaagacacgtcttacatggcagcagggaagagagagaaatgagaaccaaacaaaaggggtttccccttataaaaccatcagctctcatgcgacttattcactaccatgagaacagtatgggggaaaccacccccatgattcaatgatctaccaggtgcctcccacaacctgtgggaattatgggagctacaattccagatgagatttgggtggggacacagccaaaccacatcactgaggaaactgagttatagggagattagtaacgcccaacacagctggtaggtggtggagccaggcagtctgactctagggtctggactctgaactgcatcatgctgccaagaagttcctcattttttcctctctctaagtttcccttattcccctacagtcattccttcaacagcatttccttcaccatcttttctacttctactatataattaattttttcttcttggtcccaaattccaacgtgcaaatgcagccttatataccctaattcatctttacctttagactttcttccaatgtttctacttcattccattttaaatttatccatgagatgcctatttacaagctgtaaccatcatgaagtgaatgaagaataatacctactactgtacaatagaattccaagagtataaataggagttatggctttctgacttgaaactaaatacttgatacttgattttgctgtctgagatcaatctgaaaagtaataataatcactaacatttgttgagcatcaattgtgggccaagtgtcatttcaatcactctgtacatattaactcatttcatcctacaacaacccggtgaggcaagttctgttattctgttttacagttgaggaaacagaggcatagagagcttaagtagtttgcccagtagatagccagaagaggagccaggatgggtctcgggcagtttaacagcacagctgaagtcttaaccactatgccaacagctttttggtcctacacatcccatgggaagaggaaaataaaaaggtatctatttgtatacctttttatttctgatataagaagcagaattcctttcacatgacctatgtctatttaatacgtcattttgaaacttaccaataaaatttcccaagcgccagaaaactgttagtggctttttccatttctctctatttttttttgtgctactaattttgcttctttccctcagaaggctgccggaatagtaaacattcactgacatgtcataattactggaaaatgggcactggaaaatcacattgtaattaattcaaagcatgttttccaaatgtactactttaaattggagcttatatcataatccaaggaaacctttgtgtgtgtactgttcccacattgctcagcctgggatatccaggagtaattcaccttgcgcctgcctccagaccatcttccatggaagggggtgaccccttgcctcttggcaaccactatttctaagctgccaacattactcttgcattatcaacattctaacttcatgggaagggctgtggtgagtttctggaatgtgaataggaagttgtttttctaaacagcctgacactgaggggaggcagtgagactgtaagcagtctgggttgggcagaaggcagaaaaccagcagagtcacagaggagatggtgagtttatttttttctgcatgggaagtggttgaagtgagttgragtggtatggrgtaaagtcaggcaggtaaaggttcagaaagtgaggaacagcgatagccatggagttttatgttgaattgcctattagattttgtgagtacttttaaacttgctgtccactttgaccctcccaacacccttgtgagttgaggttgctatttctattttacaaataaagccatcgtggtttacagaggctgtgttttatctaagcttcactgttaggctacatgatgttgggatctggggcctgtcctctggctccgcagstgctgttcctcctactagaatttataggggmtctctgagaatagatcatggtaaacctgtcaccccattttccaagactgtacttctctctgggataaatgatggaataaatggaagactgggtaggtgccctgggacaagcttacaattgaatagtttctcatccccatccctcccatttctttctgtgagcctatgaatcttctgggactgatctggaatatccacatagtttccttttctgccctaagactcaatcttgttaatgactcagtttcttcttctataaaatggatatagtaataatactctatagtttcatcatgaggattaaataagattttgctgaaaagcatccagatctgagcctgacacatagtaagtgattagtaaatgttagccattattgttacaataaaaagaaaattcttaggaatagtggggtttaggattcagggaagatccaaggatagctaggcattttgaactcagcaatgttatatgctcatggataagatgcacgtggttaggctacttctaattcagggaagatccaaggatagctaggcattttgaactcagcaatgttatatgcacctagataaaatgcacatggttaagctacttccaattttcctcagactttccaagagtatcccacatagtcccagggtccgaaatcctgcagtctgtggctatggaggaaccaggcaggtctctgtttttgagcacctttctgtgggactccagaaaaaagtaccgcatacacctgattcatcctactgctttgctttactatagcacacttttcaagtacttataatgtgggtttctgtgttggggaaaacaggaataagagtatgataaagagaagaggaaggagtttgagcctgtcttaagtttgaaccacaatgacctaaggatatgaattacttttgtcctgtctttttgcatgtcatacttctgaattggttaacttaaatgagcagttattcctctcttccttctactctccttggcatcctcctctatttcaaaggtatgaacttattggatcagagagttctttgagattttgatgaaagttacaacttgtctttcccagatgaaagcaaaaacatcgacataaacaccaacctttagagacaaccacaggaggttcccagacctccatgtggatcccagggtaagaacccttctcgattgcctsctgggctttatgttcagaagcccctctcttggtaccctgaaattaggcttgagctctacagcgaagtgctaaggccccagccctggaatggtttttaatatttcaaagacaagacctcttccttttcctctgagcacatttggccccaaagattcagaaacctcaaactgcctgtgtaaattttgcttcaagttcagagagtggctttaattaacttttaggacctgagaaaatgaggataaggtttttctggtggggtattttcaatcasatagatctcagaggagtagctcttgattgggaacttatagttaaattgcactgatgtttgtcaaagttttagcgggctatggccgggctcagtggctcatgcctgtaatcccagcactttgggaggccgaggcgcatagatcacttgaagtcgagagttcaagagcagcctggccaacatggtgaaacaccatatttactaaacttacaaaaactggctgggcatgttggcatgtgcctgtaatcccagctactcaggaggctgaggcaggacaawctcttgaacccaggaggtggaggtggcagtgagttgagatcacaccactgaactccagcctgggtgacagagcaagacttgtctcaaaaacaaaacaaaaaaaaagttttagtgggctaaggagcaggtctggattttcgtccatttataccttttaaccaccttatgtggcttccagtccttactcttcttttcattacctgtttttcaaaatgcaactaaaatagttcagactctcctgggctagccaccagctcttagaatgtgcatcttcagagatctttaagtagaagcttattgatcaaatcctcaaaaatcaaaatgacttactacataaaaaactgtgtttagaaaaaaccctggacctaaacctagagagtaggcacacagtggttttataaatgacattcattatattgtcttcaaggtgtctaatctttttgattaaaaagtaaatcagaaacttcatgaagtcaaatacagagcaaatcctcactatttgtagagatataactcatctctgatccaatagactttttaaaaaattttaagtgtcgtactttatttttaatgctaatattttactcaaaataatggcaattggtagtctaaattaaatatatgcttggattctaagtgttgatgtcctgggtcccttcttgtctatattcataatttgctctttggcttagagacaacctcttttctcactgtatttctttttccacccctaagctgggctaccaatatctgtgccacaccactaacaccaccacygtccagaaacataagggaactaatgtattagctgtaatagcttgtaacatctgggctttgctaccaacaagttgtatagttctgcatcctcaacaactctcatattcacctcccctatttgcattcccactgatgccagaccaaaccwgtccctctttaactctcactgggaccattgcaatagcctcttcttttgcagtgcaatctccctgattgtaactcatttaaaaaaaaaaaagtatcgcactactctcacccctataatatcagcatttttggaggccaaagaaaaagtattgcttgagcccaggggctccaggccagcctgggcaatatagtgagaacttatctctacaaaaaattagccgggtgtggtgatgcatgcctgtagtcccagttactcaggaggctgagatgggaagatcacttgaggccaggaggtggaggtttcagtgaacccagatcatgccactgcacttcagcctgggcaacagagcaagaccctgtcccccagccccacaaaaaaaatcataccaccattaagtgcatgtgttcatgatacttctctgttcagaagtatcccttctgccaactggtatttgtgacccacaagatatggtctcaaactaccttttcagttaacctctaggatctcccaatcttcagcaggctggagtgcagtagtgccatctcagctcactgcaacctctgtctcctgggttcaagcgattctcctgtctcagcctyctgagtagctgggattasaggsatrhrccaccatgcccagctaatttttgtattttttagtggagttggtttcgccatgttggcaaggctggtcttgaacttctgacctcaagggatctgcctgccttggcctcataaagtgttgggattacagatgtgagccaccgtgcccagcttccgttggcttatcattgcacttagaataaaatctcatccccttgttttggatcccaaagcccgatgtgatctgtcactacccccggctcrtatttttctctccattgctcattccattctggccacactaatgtcttcatgttctttgaacacactgcagtttgcttccaccttaaggcctttgaaatagctttttcttcttcctttaatgctcttcttcctgcttctcactggctggtttcttgcagtcattcttctctccacttaaacattatctcattaawgaggtcttccctgacgttcctgaccaacatagtgacacagtcattctatcacataagtttcatttcctacctagcacttatggctatattctgttaatatttttcatgtttacttgtttagtactgttgtgtagttattagtatttgtttcattgtcttctctaccaatagaatgtgcattctatgaggactggaattatgtctgttttcaccattttatttgttcacttagctattatcactactgtaaaagtaatgcattcagttataattattatgtatttttccaacattttcttatttagcatatttttgtcttactttcagttattcctctgccattattcattcatatatttatccataaaatgtttattgagtattgagtatgtgccctaccatggctggggattcagacctgagtaagtaatagtccttgcccttgagaagcctctgtcagtagcttcctcagctgtatgctcacatgtttgttgcgcatttaaattgtggacctcctgctcaagagaatattcagaaacggagatgctgattagaggacattggaaacagatgaccataaggaggtcatctttacttcccaggaaagcagaagaatgagaagagaatagggccatggaggtgggaacctagagaaacacttacctctgcaagggaaggcagaggattgaggtagattcagaagaagactcagaaaagtttctcaaacattagagcagaagaacaacagaagagctaagggaagcattttaggcaaaaggaagtagtggtatttactgctacagaaaggtcaaggaagataagggtggaaagtcttcatttggtttggtaatgaggatgtcagcaatgaagtttgcagggacactttgataggatggtcgggcagtgggctggagagtaagggggaggcaaggaagttaagaaagtttagctataagaggaaggagagaaacaggcagatgtgggcaggaggacaaagggtcaagggagggacattgtttgattccgcctttctaaaagcacaaagctgtggtctacaatgtagacaaaaagaacaagatctcctttctgtggcactattcttgccaactttgtaagccacctggaacgtggcaagccatgggacacctactagcctctggtacctccttgtgtgaaaagttaggtcaaggcatttgcttcttccactttctctctgcttttctcttcaccctgcaatcattattagtttttttgcttgtttgtttgttttgttttttgagaaagagtctcactctgttgccaaggctggagtgtctcggctcactgccacctctgccttctgggttcaagcgattctcctgcctcagcctcccaagtagctgggactacagacatgtgccactatgcctggctaatttttgcatttttagtagagacgaggttttaccatgttgccaggctgttctcgaactcctgacctcaagtgatctgcccaccttggcctcccaaagtgctgrgattagaggcatgagccactgcaccagcccagttctttattaaagtaaaattaaagataatcatggtacttaatgaaggcttacacaggcacaggatgttattctaatgacccagtctctgactcctttccagcaacttccagttgaaccagccttccagagaacattaaagactagcagagcatgtggatgcttctagagaggaatttcctcttgttttagtatttaacttgcttagtaacacaggacagagcagcatcctgcagactataatgcagagtaggagcaggtatgagaaggcctgcccaccccaagcaggtttcagaggaaaactgttactcaaagaagatttttaaacatcatccattctccatacctccacacaaaatccctatcagttgccttacagttaacacagaatcttgaacttgggccacattaaacatggacagacttagtaggtcatgaaccatctgagattctctaaactactgcaagcatgcatttgttttgaagaaatctgaccacggcttttatcagattttcaaaattcataagccctggaagaataagaataactgtgttaaccctatgcacattcatgtgagcaagcttgggcaaatcatttacgctcactgagtctcagtggtggggagtggtggctgccccatcttaggcattcgaagtctgaaagacttcctgcagaacagcagataaatgctaagttggcttggaagtgacctttatgktctccyatagctctgaaataacctgtaagaggtgaatcttggtatttggtgatgcatagaaacagaaaagtatgtcagattaaagcaggggatgcacactgacttgcattttcctttcttagatgttgtgccttcatcaaaagcactgtaccagtcctctaaaaccttcaaatgtttaaaacaagttgtctcgctctctctcactttgttttatcttgtgtggtagagaatttgctgatgaaattttgcttaaaaaaagttcaaacaaacaaacaaacaggttaaaatgggaaacatctctttttggaaattttgtttaaaccaaatcttatttaaaagtttaaacaaacaagtcaaagcaggaaacagtgggtagggttggccactgtgatgggagactgggagcctcaccgactccttcgccctacacactcttgtgagctggccccaaagccagggaaatccctagaaatamkctgttcagggagaaaaccacttccacaggaagagtaccactaaatttaaaatcgttgcactccttctgcaatctgtctgaatagaggcaaagcccaggttcaaaggcaagcactcaggtccccttcatgaaggctgcagagttgtgctcttcagcagcaatatttttgctcctatacctccaaaaatatcctggaacactatgttacctcttacacctttctaagtggaaagctacaattttttatcccaaattttaaaagcaaaagaagattggattttccagtgtattacaaaaattagackgtaaaaataaaattgttacataatttcttaaagtttatccaatggaataaagtactagcatgatctgcaatcctcatcacttaaaagaccacaagcaggctcttaagaaattttatattattcatttttctctccttgaatagttatttctatcccacttctacagtatttagcctaagattacacattttaagcttaaagtattttcttgattattatacttctttgcaaaataaaaatataaaatttcaattttctacaactgtaagtctctatgtgttaaaatgtttttcttttctattgagttagcatkacaactactttcagtacacaattaaataaagtaaatatactrcaagttttgacaagtaacttaaamctttatatttaaattgctattaaagattcatctctaagacaggaggagctttccctcatttgttcatatatccatgaatgaatattacttatcaacaaaattagacaagtttggcatcaatattaytcccatatttcattttcaaggatttaaacattgagaaacttcattcatatgaataagtaaatggaattagaagttttattatagcaatgtctcaattccttgaagtccttccaagttatatgccccaaattatatagtgatttactatcaaaatktagtcagacttgacaacttaatcgggtgctccctcaaagctgatgaaaggaaataaatggaaatcactagacttgaaaacggatttgctgcaatatcatttacaatattcaaattcttaatacctataccaatatttcgaatcatctctggcatacgaatgtatttatatccaarggcaaagctctggaataaataagaaattagtaaaaggtayaatttttctcttataaagtggragaaaggtgtattttaggcagattgtttttaagaaagtatatatgtgaaagttgagaatctgaatacagatttaattaacactctctttgcttgtgaaccccttgggaagtcagccttatcctggtttgaagaattccacttcagcrtttggaatggtgcattttgaaatgtgataggaagaacagcttgtgacacaacacaattcagagaaagcagyggggttaggttcrcaccaaagggttatcgatcactctgcattttgtgcaaataaacagctgtaaatcataacgttatgatactctcagtgtttaatcataggtcctgcagagatcagcagcttataagaayacaaaatatgcctacttaccaaagtcaagattcagaagctcccagatgaaragttctaggcttatgagataactctactctctgggacacattaactggtttgagttgagttctccctggtatctggtcaggctgtagtcaaaagtgcatgaacacatgcacacacaygaccccacactgtcccatgcaccctactgggcgtgacacatacacaaccccacactgtcccatgcaccctacataatccatcactgggcgtgacacacacacacacacacacacacacacacacacaacctcacactgtcccatgcaccctacatcatccatcactgggtgtgacacacacatacacacaatcccacactgtcccatgcaccctacatcatccatcaccaggacatgatacatgaacacacacacaacaccacacagtcccatgcaccctacatcatccatcactggggtgtgacacaaacacacacacacacaactccacaccatcccatgcaccctacatcatccatcactggggcatgacacacgaacacacacacaaccccacacagtcccatgcaccctacatctcatcactggggtgtgacacacacacacacacacacacacacaactccacaccatcccatgcaccctacatcatccgtcactgtggcatgacacacacatacacacagaaccccacactgtcccatccaccctacattatccatcactgtggcatgacacacacacacacacacacacacacacacagaaccccacactgtcccatgcaccctacatcatccatcactggggcatgacacacgcatacatacacaactccacacagtcccatgcagcctacatcatccatcactgtggcatgacacatacacacacacacacacacacacacacacacacacacaaccccacaccgtcccatgcaccctacatcatccatcactggggcatgacacacgaacatacacacaaccgcacaccgtcccatgcacgctacatcatccatcactggggcatgacacacgaacacacacataacctcgcagcaaattgtcacagaccaaattgtggtctgaggcaatttgagatttctttacaggaaaggttttaggtagcagtctggctgggatagtgacaaaactgcaaatgcatagcaaatgcactgtttttatgttgatagtaatgttgagtggctttagaggggaactgatgtagcagctaggcttggtcatgtcgcatgctttatcatccaaaacagcaatgcagcatgggatttagaagcctggaggttaatgaaggttaaaaaaaaaaaaaaaaaaaagtacagtggaaagagctctttcttgtttcaaagtcaagctctgctactgtcattctgaacgtgttatttagatgccccaagcttcagtattttcatgtgcaacatgaggaagtcggacaagatgagcatcactagaacttagatgcccaaaaacattttttgttgtttttttgagacggagtcttgcactgtcgccccggatagagtgcagtggtgtgatctccgctcactgcaacctccgcctcccgggttcaagcgattctcctgcctcgacctcccaaggagctgggattacaagcacccgccaccacacctgtctaatttttttttaatgtacttttagtagagacagggtttcactatgttggccaggctggtcttgaattcctgacctcakgatccgcccacctcagcctcycraagtgctggsattacaggcatgagccactgtgcctggccccaaaaacattttaaaaatattcatagatttgatgaaatcccaacagaagagagttcatgagaaataatagttgctatagatccaaggggaacaagtttactgcatatattaagaaatattaaatatatacatacatatgtatattaaacattgaatagtattgtagatgtgtacagaaatgaaaaagcaagaagataaaacaaagatccatagtacaaaatagatggcatagcataacacaatttgttgatgctctgcacctcaaagtataggttagacattatttgtgtgggtcaggaagttctcatgtgactttctgttattcttgggtatgacataccacttcttaaaaagattgttttataataataatgacagccatattaatgtgtttagctttcttccatacacattaaaaatgtatcttaaaataaaaacattggtggcacaaactactcaataaacatttgttgaatgaatgaagaaatgaactctgtccccagccttgctacagtgtccatccagggtagaacttagaagcagggcaatgagaagcaagaaggaagcagagggcttgaaccactcttccagtggaaattggcacaattatacttcaacataatgattgttaactagaattatttttggccatgttggtggtgtatggatactaaaagaaagttttctcttcttgtttcaggccaactgccaaatagccatcttgtaccagagattccagagagtggtctttggaatttcccaactcctttgcttcagtgccctgatctctggtaaactttatgytaacttttcacttaggcctaagtaattagggtagagcccagatctatgtgtgagaaatttaaggattgtagccagttggtttgaggcatgggaaaactgtccaagtccagattgctggaagacaaatgtaccyaacgccatcatattggtagaaagggcataggaaagaacttaaaatgatatatccaggacgaatgtatccattaggcacagtagacacagacgcacaaaattttyaaagacccacacaygtctgaatttcttttataattattttctttgaagtcaaagaaaatgttttaatatatagtgatatattcatctttgtaccagtgcagttgcaaaatagaatttttaatatgttagcatggaggaagaagcctacataggcaaagttgcctgaagtctatgaaagtcatratgcagccctggctatatcagaatgaagtctttaaggcaaaacaatgccctggaaatgtcagcaagggaggtacaagcatgactaaccctcatgcaggcagcagaggagagggttggatagaaacaagcctttaaataaacaggaaagaaacccatttccaggcctgattgcttgctttgtacacctcttcatgtgggaaatggcctctcctgccccgggtggactcccayagactatgataagagtgctgtagtacctttatacttttgaaacgcacattctttagttcatttggtatcaaaaacacttgtgaaaaagggctgttctgagccctatcttaataagggagtattcagacatggaagaagtagagtagttaatgaaagacaaacagccaagaagaatggaaagactataagattgyagatcaggatatctgatttcccacccgggttctgccacaaacctactgtgtttcactcattcaacaagtatttattgaaggcctattaagtgctaaactctaggctcagtgctaaggatccaaagctaaaaagaaaacaccgtcggagatttacaacctggcagatgtagmctgtatcatagaaacagacattaccgtacatggcaatgagcacaatggaggcagggatgaggtgctgtgggagcctggaggaaggaacacagagtccacctgggaaagccatggagaataggtggagtaaagtttatcagacataagaagagaggacagccaggattgtggggagagcatgtgcaaattcaaggaagtaggaattctgttttgctgagaaagtacatacagtgggcaatgaggctggaccaactggtaggctccaggtcataaagcatgttattttccatgtgaagaggtagagcytgcccttaagacattttatatgtcatttaatctgagcttgggcaaattacttatgtctccttcttttataaaaggacaggagtaarttagatgacttcyagggtccctcctaactttgatatcttatgattccaaacctttaacatcaaggatcctcagaagatgacattttcctattctgacatcattcacacttttaagtgaaaggtggaaaccactctttttccttcaaacaactacattagacataaactagtcgttgttttgtgtattaatgttctggtcggaaattcatctgagtatgcagaagcatacttgggatcacggcctcttttttggtgaggggtactaacctggcactcmctctcctttactctagaactaacaaaccagaaagaagtggcagcatggacttatcattacagcacaaaagcatactcatggaatatttcccgtaaatactgccagaatcgctacacagacttagtggccatccagaataaaaatgaaattgattacctcaataaggtcctaccctactacagctcctactactggattgggatccgaaagaacaataagacatggacatgggtgggaaccaaaaaggctctcaccaacgaggctgagaactgggctgataatgaacctaacaacaaaaggaacaacgaggactgcgtggagatatacatcaagagtccrtcagcccctggcaagtggaatgatgagcactgcttgaagaaaaagcacgcattgtgttacacaggtagggccttctctactttgaaactttcctgttaaaaaaaaaaaaccctgccttctctggttggccaacataaccaccgagtcaacacaaagatacaaaggcaggacatgaaatcaaggggtaaattgttagtcaatcagtattattgagcaccttgaagaatataagatcagaattagagaaaactagctgcttaaaactagagggaaattttaatatcatccagctcacctgtctcatcttataamtgatgaaaaggacactcacgaggttttagtttctcaaggccgtggagcaggacagaagcaaagtgaggaccagaaaccagtctcccaaattttaggtgtagagcttttttttcacccctgtgtcttgtataacagagagtgtaaattggaaggaaatttagccctgcccctaggtgacacagctgtaactaatagctactgaatgtcagtatgctctaggcattgtgttattagtttatttagttcatgtgtcatttgctcatttaatattagtcaaatttagtcctcatgacaactccatcagtcaggtttttctattactcttactttgctgatgagggaaaggctcagagctattaagtaatctgcccagggttctaagctagttgatggtggagccagtttcacactcatgttgattccaaagttggtgttttttagccatgtaaactaccacattctttgctctacatttttatgagacaatttgagaatataaccaaggattgtaaatgctttatagtttctcttcaacaacaacatatctttagatccattgaactttggtgggagggtagtggtggggagtgggcaggaaaggaaagaagtaattgaaggtgaaatacttcgagtgtattttaattctcaactttaccagtgccagagtaagcagacattcctgaaagcttggtcttcctctagtcacgagcctagtgtcagagctgattccttctttctgatgttgcttccctgtccagaggggccggttctgtcctttgtagcacacgaacactgtgcctaaggatggtatggactgccccgagcaggaagtttctaagtactctgaagcttctttgataaatcatctgccatacatattctgaattctttagattttaaacacctctccctcagaagccctcaacagtacaggtatggaacagaatacacagaataaagcaagccttctacattgtccctcttctccccaagcctcctagctgaggcaaaacatatccatgaatgcattatcatataatcagatctactttataaataatgcatttatatataaataaattgattaattgagcatatattcatggatcaggatggacattaccaggatattagctcatcctactgctctcccagtcagctctctacccctttctgggctatgcctccctagaattatctcttatcagataaccttgactgccactagctgtttcaatatgccactacttccccttcacacccaaccttcaaaatccatttctgcaagacagtcttcctcaataaagcttgccaaaaaaattgcaagatagaaaaaagataaaaaattactggcataaatgatgacactcctctaacccacaacagtggtagagacatcactaattaatacaactttacctgaacacagatgggttttatctccaccaacacagtactctaagcagccactaccattgattgtcgttttgccatctragatgtaaaggatgtagagaagcatcaattatccatgggagatgagaaatagatatatttactgtaatatgaaattaagtttgattgttggaataattctccacatgtcaggaattattagacctcagagcaggctatcgaaaaaagatttattcattgaatcatcatgaataaatcatcttctccctggagatccaaaggaatagacaaattgctaacctatctattcaggaaaccctgaaatgggatagaatacagaacattgtctctttttttcccctagagttctgagatcccaaggaagctataattggggaaacatttgtatgctccaagaacatagggcaggcaggggttgctactgtaaggtattaagacattggtggggttaaggtcagggagcgaagtgaataggatgtggaccaaacctgtatccatttagctgctattgcctcctacatcttctctttatttgaacccttcccagtgtctcagtgcagcttcaccaaattcactggctgccayaggaacttcttcctatagaaccttgcatggtttatagaattttagtatctcagaattgagaggaaacatagagatcatgtagcacagcatatccacatatgacatatggatattcttttgtaatatacttccaagtgaaccagcatgtggacagggcttaagacagaggaagtaaccaccagaaaacagttcagccatagaacttacccccaactatgacctcattaataaaaacatctcagtgctttgaaagtatcaattctaatactaattctcatcaagtgcatataccctaaaatactttcttgcaggaaagaaaccatggcccttctctattctgtcacctgagtggcactatcttggtgaagaggacatggcagttcagccatagtcagtactctcttcgcctgctgtattcagactcatgaaacatcacctcataagattgtttgtcctttaccatgagtacgtcttaaacatctcatttggctcctctgtttctccactgtaggattctggacatagatttgaagcaaatgaaaggtgaaagggtttgggctctaacactgtgcaagctgagctcagagaagtaacttgcctaaggtcacatagcaagtaggcagcagagccaggattcatatcacacctgtgtgaccccacgccccacatctggtgcctaacctcaatgcagtaatacgtgacattgggcttccataataaaacaatgcttggtttgaaaaccacagcccattttgtaccacatagggtttctctgtccacacatctgtcattggctccatttgtccctctgtgtccacacacaacaataccctccttaggaaatactaaatgcagtatgaaatgggagccacgcaatactccagcaggcccctacaatgcttttcacaagggacaggttggctctctagaagatactgtgcttccctcttgtctggctagctcagtcctatctgagaggggatgagtctgtggtcaaaacgagaattcagcctttcctcacatctgtgaatgtccatgactctgacctttccatatctatgcagcctcctgccaggacatgtcctgcagcaaacaaggagagtgcctcgagaccatcgggaactacacctgctcctgttaccctggattctatgggccagaatgtgaatacggtgaggcttcctttttgttgatattattttggttttatgctagagatgatgccaagaagtaaataaatcatgttgaagtctctccagtgagaatagratggtaccagcccccctctatcatctgtctcctccactcagtgtccctagacacacactctaggtaaaaacattttattcttgggagaaaacattgactcataaatttcaaaaaagaaaagggaaagggaaaggaagcaaaaccaacagaactttcaggctaattttacttgtttgaagtaaaaacttgtgaaagaatgactatttcccaagatgcagccaatacaaagagaccaagtagagatggatagcttgggttaaaagtttagaaaattagagttaagagggttacacaaatagttacagctttcagcaaacatgacattsctgttaattctacatggaaaataaaaatcactattttgtctcctgcagtgagagagtgtggagaacttgagctccctcaacacrtgctcatgaactgcagccaycctctgggaaacttctcttttaactcgcagtgcagcttccactgcactgacgggtaccaagtaaatgggcccagcaagctggaatgcttggcttctggaatctggacaaataagcctccacagtgtttaggtatgtagaccttattcttttcatcctcactgacatagaattttgggggagaagaggacacaatgagctttctccattaaaaaatgtgagaaataatgaccatctaggttagatggaaaactctggttatcactgttaactgtcaaccagagtaacattaatttcaattttcatggtatttttttatgggtagagtgacttagtcagtttaattgttgattcgcaggcaaaaacattacaaagggacccctctttccctttgttaattgtaaagtaaacagagtacaatgatgaggacttaggggttaagaattattaatttgataattttacctaacttctctacatgaaaaacaagggtgtttgatctttccaagcagctattgaaaacaccatttaaccattctagtgcatcaacctgcctgccactttgggaaggtgtgactgctgcagaatttgaaggcttccaaggtgatggacaaaatttgtccaaggactcacactattattctgtggttggttttagctgcccagtgcccacccctgaagattcctgaacgaggaaacatgayctgccttcattctgcaaaagcattccagcatcagtctagctgcagcttcagttgtgaagagggatttgcattagttggacyggaagtggtgcaatgcacagcctcgggggtatggacagccccagccccagtgtgtaaaggtgagtttcaggtagttgggatgtataatgtccattgcacccagtccttacttagtgcatagatgaaattgaccagcttatggagaagctggcctgaattgccaaaatttaattctcttcctacctgccattcagctagattgggttcatctgagatgagaaaggaaaaaaattcctttctttccccaaacacaaatgcaggcagtttcagaatggcctcattcataatttccccataagattagaaagggtggcctctacatctataagtggacactagaagacctactgagacaggtttatagaagtatagggaatagaggacattaagaatacagcttggaggaatctttgtttttaacagactcagatcaccctgggaactggtaatccaagtctggacaaacatcattagggtctcttgacctttacatcttgctagctccacctgcatttcagaggtggttccaccattgctctctgtgtggcttttctcctttctcagtatctttctctttatccttggttattctctccagctgtgcagtgtcagcacctggaagcccccartgaaggaaccatggactgtgttcatccgctcactgcttttgcctatggctccagctgtaaatttgagtgccagcccggctacagagtgaggggcttggacrtgctccgctgcattgactctggacactggtctgcacccttgccaacctgtgagggtaggatttttcattagcaacctccattctgtccaagaaggaatcatggcatggtagagaggccaagggctctcagtgtcggggtgatctcttctaagttcttgcactagagcaagctcttcaacctccaggaaccatggttttctcatctgtgaaatggagctaagaattgcaaggtgcttgtgaggattaagtacataaaaagtatacaattaaatagcatgtataaagtacctagcatagagcttctgctctactgacatatccgaggtataggaccatgtcctatacttgagagggagttgggagcagcggctaaggtggctaaagagagtggttcaccatgtagtctttgagggtagcctttgacaaagaagcaaaggaaggaacactgcatcgaaaaagtgtgtgatgcaatcccaggcaattacataattccrccaaaatgaattctctgcaattgcctcacaccctcagtttataaggcggacagtggtaatgggagaataggaaatttacgatagattagtgaattcccagacctggatgacaagcccaaccctgctactatctagctatgagactttagagaagtcacttaacacttctgaacctcacttttcttgcctaaaacataagagagaagagagaaacactagaggattttggtgtttttgtttgtttgtttgtttgtttgtttrtttgtttgttttgagacasagtctcactctgtcgcccaggctgragtgcagtggcrcgatctcagctcastgcaacctcygcctcccargttcaarcgattctcctgcctcagcctcccgaatagctaggattacaggcaactttttgtatttttaatagagactagggtttcaccactttggccaggctggtctcaaactcccgacctcaagtgattcactcacatcagcctctcaaagtgctgggattataggtgtgagccattgtgctcagcyggatttttggttcttaaatgctctgagtctgtaaaaaccagaggtcaaagcccagagcaaagaggtagtctttacactttgaaaagtttcagaaatagcctggaaatraaatgctttatcaaggaagagcatgaggaaaccaatctttatcagaactgaggtcactcagggcttaattgtgctcaggaattcactttggctgcactcacttggcaactgaagtctgattaggatgacatcctgtgttctagagacaaagcccggtcaggatcattttacaggactaggtaacagtgtcaacaataagctatgctagtccagcttttttttttttccctataagtccagcattttcctgtatatactcttttcagrttcaatttcacagataatgtcaatatttaatgagcactttcaatgtacaaaacactctgctcagctccagaataaaactatgaatgactgagcccaacttcgaggagaccayggtataatggggaagaatgacaatcatgtatgaacagcgcaagaacagaggctgtgggagcacattgcaggggcttctacccttagttaaggtgggaagggagggcttcctaaggaaagggaagtctaagctgagacctgaagggcaggtgagagtgagtcaggccaagaggggcatgggaaggtgttccaggcagtctctcttttggaaaatggaggttttagggttctgaacacactgaaaatgtggacaggaaagatatagcatctaggaattttttctgaggaagaacccggcccttccattacctggctttagaagataccttttccacttagctatttcgtgtgagccgctggagagtcctgtccacggaagcatggattgctctccatccttgagagcgtttcagtatgacaccaactgtagcttccgctgtgctgaaggtttcatgctgagaggagccgatatagttcggtgtgataacttgggacagtggacagcaccagccccagtctgtcaaggtactgtaacagtggtaatgtttttctgtgtgtctcagctcgttagaggcatcagcatctgcactgagcattggcatgcctttctttatcagatattcactgagaacctactatgggccatgtcctttgtgcttgggaccagggatgagatgaaayggtgcgtgaagccagtcttaggcacatgtccactatagtatagtcaaggtgaggtttgcactgattgacacatatagggtgcattggaatgaagaagatggggcttgggggaataaatcatgcatgaggaatagcatgggatggggaagggtaatggacaaggtgtttagctcagtcctgtcacttcctgtccttaagctagtggtttagactctctgaggctcagtatcttctgtaaaatggggctactattatcagccttacctacctgcctcactagtagttgtgaattaatgtgtgtaaacgcaactttaaaactcttataggatttatagggaaaatgatgatgatgacatgttaccttataaatcacatgtctgtggtctgatttgacaaaatgatcctctttcaatatgttaggtttctaatcttttgctcttatactaaggcactcatggggggcgggtgtggtggttcacaaggattattattttttttacgaggagtacctcacactaaagtcatgttccagaagtgtaatattgacattttgtgttttcatttacggagacctctgagcaatctatgtgactcccctgggttcctaagtataccttgattttaaaatgaggcagtggtttgaaagcaggtcttgaagagatatttgtgcacccatgttcatagcactattaatcacaacagttaaaatgtggaagcaacccaaacacccatcaatggatgaaaggataagtaaaaagtattccacatacttacagtggaatattattcaaccttaaagaggaagtaaattctgacctctgctacaaacatgaatgaaccttgaagacattatgctaagtgaaataagccactatgaaaggacaaatactgtatgattccactcatatgaggaacttagagtagtcaaagtcatagagacagaaagtagaacggaggttgccaagggctcggcggaagagggaaatagggagttatggtttaatggatacggagtttcagtttgagatgatgaaaagagttttggagatgaataatggtgatggtggcacaataatatgaatgtgcttaataccactgaactgtacacttgatattggtgacatggtaaatggtaaattaaatttcatgctacgtatatctcactataataaaaaattgaacagcaaaaaaaaaaaaaaagaaaaaacaagaaggcaatagaatagatggctatacaccatgatgctgacacytagtctgagttatggaatgtattgtatatgttatctgggagaaaaagacacaatgagctctttgacacacttaaaacggatcataagggattattcaagccattgttgtctccaggaaggtaaatgtctaatcaagaaaagatagttggatattctcttaagtatccagagatgtggtctcactaacccccttcataggccttctgaatgtttcccactcctgaactcagtgtctgcatgtgacgcaaagccttaatgatattattactatctattactaccactgctactaatatagcagctaatgttcattgagcactttctatgatctcagtctaactctatgaggtagttacaattattactaccattttaaagatgagaagagacaacacatggaatatgtgtgctctcttcgtatatggttatttattttacatctttgagatcatggtgtatattataatttttactctgattttttatttaacatcatacattgagacctctctcctatctttacaagttaaaatatattatttttagtgacctttaacattcttttcatggatccaccatmattaatttccaccctcaattaatggcatttgtgtttgttttcaatattccgctcttacaaataatgtcttcacaaaaatctctaaatagattttttggtatgcatcttgattacatacttagcataaattcttgggtccaaaagcatgataacttaaaaattattgacacatgttgccaagatgytcaacaaaggtttagcatttcctaataaaatccttcatgtgccgttataattaaatgacactttttcttatcttctatgttaaacaagcccaattcaggaatccctgttcttgacactagaaagagttaatggtcaaaaatcaatgagtacatgtgtattactgtttctttattccttacttcctcatcccttagctttgcagtgccaggatctcccagttccaaatgaggcccrggtgaactgctcccaccccttcggtgcctttaggtaccagtcagtctgcagcttcacctgcaatgaaggcttgctcctggtgggagcaagtgtgctacagtgcttggctactggaaactggaattytgttcctccagaatgccaaggtaagagtgtattctttctaacatcatggaaataaattgtaggcagtatttttaaaggctggattttagaggtgacaactatgtaagatccaccttgaaatggactggaaaattcataaatactctcactcatcctcttgtcctataacccaaggatcccaaatgcaaatgcctccgggrgataggcagattacacaagtgtcaggatgtctggccatagacagtagggcatggcccttgctaactccttatcagggtctttacccagacctgaaggctcctgccacaaaccaggtaaactcttctcacctggccaaacatggcatctggaaagaagaccaggtgggaaaaaaattgcttcagagtggttgtcccaaggctggtctggcacttctaggaaccacagggtataatggtaaaatgggaggggcagaatttacaagtacccagttgcaaacactccaagatctgtataaaattggagaaatagacttagaataaggtgaagagtgatagaaaaaagagaaaaactaatctgtatactggaggttacgggattctcagaagaaagaaatgtgtggattcagtataaacattctatctgcattgtacttgatatacatacattttttgagacggagtctcactctgtcgcccaggctggagtgtaatggcacaatctcggcccactgcaacctccgcctcccgggttcaagcaattctcctgtctcagcttcccgagtagctgggactacaggtgcccrccactgcacccagctaatttttgtatttttggtagagatgaggtttcaccatcttagctaggctggtctcaaactcctgacctcaggtgatctgcctgactcggcctcccacagtgctggtattacaggtgtgagccactgctcccggccttgtacttgatatttaacaagccagtgtgctctgtcagtattgcaacatcttgtatgaacttgaacgggttctagtcatccatgtttgtgaattgaaggatagacgtatattttttatattccccaagctttttccccctcaatgtatccaattccttagttaacttttatagacaatgctgctttttaaacgcaagattttcatttataaaaathtgcagaaatataataaagaaatgaagaaatatcctcttaaatactcctatcctaaaatagacactgttaggcttctggtatgaattcttccaatattttctccgcttttcctcctatgcaattaatatttttatgatgtatatacaattttaacaataaagttgaatggrtaaaagactagacagttctacattatttgccatacctttcactttgtatagactttcaacatttgagtgaaagtgggcagatacatattttttactaaaaggaaaccactcactattcaggtcacacaaaagcataatcacatacacacacacacacmccccmcmcacacaccccattgttaagctaggtcaacagtaaatgaatgaatgaatgaatgaatgaatgaatgaacaaatggacaagcaaacagcagaattgaatgtccttcatcgccaggcaccagagaggatggcaagcccctggacttagggttgggtgcaccttcagagctgggtctggagagaacagggcggggctgtgaccttgccccttaagtgctcatcctggctacgttgaagtctggacatatcacaaagtccacacaactttggggaagttgtgggaagaactgggaatccctgaggacagtgatcacagtgattgaaactcttacaggcaagcctgggtggtgcagggcacagattacagttcattgctccatactgtcctgcctctgggtgtttcacagcaaggaggttgccactcaccacggcttcctgtgaccttccagttcccttctgcttttagttctttatttactctgaactttctcctcttgttgctgggtgcacatcaagtgaaatacccaaatgtgggctgggcaggaaggtaccatgcagwgtgcaatccactcgctgttgtaatacttctgagagagtgttatcagacaatttccctttttaatgtcctcccacccctccacatctacccctgctgtcagaaggcaaagccacagaagagctggaaatgggttctgtggtaccaacatcctcacccacaccctttcccccataagtccttgcagtttataggcttcttgagttgtgtcctctccagccccacatacacacttactacagaaatacttttcaactagaagaaaagaaccagatctttggacaagttgatcagattgaaaggaatgtagctagagaggggaaggaatgaagggaagagaaaggcgtagaaagtgttcttgaaacctcatgctgtttaagtcagtggctgaaaaatgaccctaggagcaaggacttcatgtctaaaacaccaaaagcaatggcaayaaaagccaaaattgacaaatgggatctaattaaactaaagagcttctgcacagcaaaagaaactaccatcagagtgaacaggcaacctacagaatgrgagaayatttttgcaatctactcatctgacaaagggctaatatccagaatctacaatgaactcaaacaaatttacaagaaaaaaacaaacaaccccatcaaaaagtgggcaaaggatatgaacagacacttctcaaaagaagacatttatgcagccaaaagacacatgaaaaaatgctcatcatcactggccatcagagaaatgcaaatcaaaaccacaatgagataccatctcacaccagttagaatggcgatcattaaaaagtcaggaaacaacaggtgctggagaggatgtggagaaataggaacacttttacactgttggtgggactgtaaactagttcaaccatggtggaagtcagtgtggcaattcctcagggatctggaactagaaatgccatttgacctagccatcccatgactgggtatatacccaaaggattataaatcatgttgctaccaagacacatgcacaggtatgtttattgcggcactattcaaaatagcaaagacttggaaccaacccaaatgtccaacaatgatggactggattaagaaaatgtggcacatatgcaaggattttcctttttcccatttcgaagataaagcaactgaggctcagaaaggttattgtctagtgatagattgctagcaagtaacagagccaaaatttgggcgcagattccaccacttggttgggaaagggggaagaaagtattttcctccatttctgtgtttccaatcatttgtcattgttttctggtaaggtcattggggtgtttctgaagaaggtatcaagggagaaaccagttccacccctgtctagaagcaacaaaaatgagttgcaccactatcctcccaaacagagcaccagcttcctttaaaaatcacctctaaagctgtttgtgattgagcacttcaggatgtcaatcaactgtaagctgctgctattttacacctctacaatctctaactggtgatraagcatcatgaaattcaaacaatcacttttagccaaataccatcgttgtatattaatcacacacacacacacacacacacacacacasasacacasasmgagagagagagggagaaagagagagagagttacagagttcaggttgctgaattataaaatgatctcttcttttctcctctgccatgcccatgatagccattccctgcacacctttgctaagccctcagaatggaacaatgacctgtgttcaacctcttggaagttccagttataaatccacatgtcaattcatctgtgacragggatattctttgtctggaccagaaagattggattgtactcgatcgggacgctggacagactccccaccaatgtgtgaaggtaggctgtgggtctgtcctttcttatggctttaaagatgacatcagagaatggagaatcatcagggatttatataaaagtgttcttgagctgaagcaaacaacactctccacaacaatggtaatctagataaaaaagttctccctctctttaaataatattttaatagctttagttaaatattccacagtttcaagaacatcctggccaacatggtgaaaccccgtytctactaaaaatacaaaaaatagcygggcatggtggtgcaygcctgtagtcccagctactcgggaggctgaggcaggagaatcgcttgaacccaggaggyggaggttgcagtgagctgagattgtgccattgcactccagcctggtgacagagtgagactctgtctcaaaaaaaaattgcacagtttcaggaagtgctttcatgtcattatagcattcctgtttaccacaattctaaaataataaggaaaggcagtatcatctcattttatagataaggaagagacacaagcttaaagaggttaaataactcgtccagggtcacactgttagtaagtgaaaaggctcagctctatgtcactgaaagttttacttccttacagagtcttcttcagctacattcttcatttcttcattcctacattcaccttcaactgagcattactaaatcccagccacagaccttatttagggatgggtgagatttaaccctagcataactatgtgtgcacttccctcctctctccacttctatattgaatataagcttcttgaaggcaggagctgtgccttcttcatctttataccccctgcagcagctagacagaataaaaatgggtgtgtgtgacaaatatctgttgaattgaaggtgatcatttaccagtaaaatttactcaaacacaagctttggtaatttagtggaattctcaaaggcaggggccagatcttatctgtctttaattcccctgagacatctggctggcaaagtatctagtatattttatgttctaaaatagaagtgcactgaattaattaattcatagctcctgtttagttgcaaaaggtgctattgttctaatgtattgttcagtgtagagttagtaataatgagaccagtgataatggtaataattattgcttaatgtaggactacctatttcataagcatcatcacattcartccacacaaatgacccttaagttggttattactatgcccattttaaaggtgaagaarctgaggctttgagaggttaagtagctagcaaagttcatatagcttgaagtatggagacaggatgcaaacccaggcctagtctgattatagggctagtgttttgaccactgaactacactatcacccagtggcagagcttctgaatctcaggtaagtcacttgtgaatttactcttttccactccacagattgcagctataactgctaaatgaactttagaaatggcagtgcctggtgatcagatgagagaatatgttggtagaaatctattcgtgttacacaaaaacagctaaaatattatttattccttcctgtggaatgagcactagattaatatccaaagacttgtattgctctctctccaagtcatgtgccattaggaaagtcttgtcacacccttaggctcccgttttctcaattccaaaaggagaagagtggaccagaccatctttgaggtcgcttccctggtcaagaattctgtagggtgaaagacataaaatgctaccatctgctgtcaaaaagatatactacaagttccctgagaattctagaacatgtatggaggaaagcatttgggcttgtggtttttcactcattcatttattcctcactctcttattcatttattccattgacatttctcataagttctattttcccacattttaaggctaaagaatatttaaaaaaacctttaaaaatctcattcacattttaaatcatgtaggcaaccaacatggctgctaaatctgtaatctctaaagcccttgcttcccttcactactttccagcccccctttctctgcaggaggaggcatttgcctcccactttgcaggccccatccccactcactgtcaagacccaaccctgaccatgaacagcagctttaacccactatggcccttggaattatcaaccttgactgatcctgatcttgagccctggtttttgcatttgtgtttcttcttcgttctccaaatttatgctctaaatttaggcaaatggttcctcttattttcccatatgcctgaacccattaatttttaaccctcagcactgccccctagaaccccaattttcacatggtgttttgcagagtwctaggatacatcagatggactcaggggcctccaagtaagcagaggcagtgtggcaggtggagttctcaagctgtctcttcagagtgcaatgtgagatttcattttgggggatggctctaccgatagttccactttagttagaatgccggttccctgggccctctgggatgtggcctctgcctagttgttcctcagtatctgcagggggaattggttccaggactccctgcagataccagaatccccagatgcccaagtcacttatataaaatggcataatatttgcatataacctacatacattctcctttagacttttaaaccgtctttagattacgtataatacctaatgcaaagcctacacatcacttcatctgcatggattcaacatactcagcacatggcaaattcaagttttgctttttggaactttatataatttattttttttctgaatgtttttgatccacaacgagttgaatccgtagatgcagaacccttggatacagagagtcggttatttttcagccttgtctctgcctttgcccttcaggacctgaagtccttttcatgagcctaagcagtgcttgaggttcttgtgccaactttgatgatgccacctgcatgatggagtgcttgtacacagtttccgtatccctcctgtccctgcctgttggaccactttcatgatacagactgctgaattcctaatcccttaacactgtctgtcattgatcctctggtgaccatgtttggctgctgaacccaactcctaatgtctattttcactgcgtggggaggggtcctggttccaagtcccaacctcaactctgctcttctgccatgtgcctgcttactcacgtcctaaaatatggtgaactggtgccccctaaaactctggcccagctgacatctccatttttttcttcattcccccaacatttctctgaatctgtggggcttcctagttttattcctaaagtttgagtttacaatattcaactcagatacatttattattcatactatatcttctttccagaaaattattgagaaaactctatcaaactcaagtaaaatgatataatgaaaggaaacagataatttactaaatctatttgaaataatataaatcaatatgtttaagaattcagatgcaatcatgtatactttcttgatggactatagaagaacaccaatgaatacccatatgtgatagmactgccttggtagtcagtgaaaatagaacactaagcgtgcaataaatgcaaaccttatctgttttctatttttgtaattattcaggagtttttttttttttgccaaagttttagagtaggctcaagaatatgaccacttctcaaagttatgcacaaaagtcattcctgggtataactcttttcctgcatctgcactaatctccattccagcagcatccttgataactccacaaatgtcattcatcccatgtttgctgagtgcccaccatatgccggatctgggttaggcttccatgtaactcatctaggctgcccctcaaacaggtaaacccacttctttacatgatccagagccaaattcttagtatgtaagggtcaaggttaatttttacctgagagagttcagagacttttataaatatgaaagtctggatatgtaaccttggctgagcatgactgataagactgaaaccaaagcactatcccccaaatgaatttaatgctgtagtagttctcattttatactagggcccccttcggttaatttttaaaaacagtaattcctcttgtttcttttcaaaccaggtaggcataccttttagaatgcatttaaattaaattgtattcattactgtattcattcaattcataagtatttgtagaacccctcctatgtgtcaggccctgttctctgggatacagtgttcaaagaactgacaaggtccctgctttcctgcagctgacattatacatattcttcagtttaaagttgtaattctgggagattatgaaaaagttatttttgtgaaaatgttcacagatgacttcatgtctaggagttacaccagtagacatgtttcaaaaakgtttagtaaattgatttgatgtgtcagatatgaagttgttaattactcaacaatttgagagtactgaactgaaattcactgtgttattttggctatttgaatggattcatgcaataagaatccataatccttcaatgaatagcttgttactgaaaaatacatgggccagtatgtaaaagccaaatactgtacattggttttccatgagggagcatataggtcttgaagaggtttgtaaaaatcaaactatctaagtaaatgagacttatctgaccaaggtattgttktcagaatagccttagatttaaagaaagawtartcacttcatttgtctataacccaacatttattgataaataatagtcttatattagagaatyaatggggagaaargaataatgctaagaaaatatgtaactgcaataatttgtaaaaatacttttggggggaaattgtgaattaaaatttaaattcatttattcattcacttggcaagtggttactgagcactgcctcttgagatcctgggatggsagttatggaagactcaaggatgaatcattcttgggttttagacactttcccatccagtagaagagtgagggtatgacatgggacatgacarcacatcagttcagacaaaaagttgaagaattcagaggagaagagttcaggctgtggtgatcagcagagtcttcagagactttaygarttaaatcctggaggattagtgggattttaygycatraaagtggaaaaattctcaggggaatgtgagccaagaaccagaagcaataacacacaaagtcacttcagggaattccaagaaactaatctatcttgaccaggaggttttgagttttcctgtgttatctggatgggtggtattaaaatacaacagcaaaataaacaaaacaattagtgaggagattcaaatggaagaaatagtttgaggcagaaagcaatcattgcagttttaggtgtgttgaatttgagaagatggcrtgatatatgggagcaagtagtctcaggcaagaggaagggcggaaatgaaatcctggattgcacccattcaagtaagatagagggagctgcggcaggctacgaggtctctgaagcagagggtgtagagaaaatagggtgacwttgtaagttcttgagtatggctgyctaaatctttgacttctttgtcttcgtgacttgtacctatactcttctctgtaagcttaccatcctcccactgccctttgcagcaaatgacctacatgatatgttgtggaatgctgctgcctagcaaaatacctggaatataggtgcttaataaatattttttgaatatataagtgaatgaactttgtgtaacacagaacttctgaataaacttggagattgtgacactcttaatttgatactctagccatcaagtgcccagaactctttgccccagagcagggcagcctggattgttctgacacycgtggagaattcaatgttggctccacctgycatttctcttgtracaayggctttaagctggaggggcccaataatgtggaatgcacaactkctggaagatggtcagctactccrccaacctgcaaaggtaataatatgtacttgctaagacagttctacttttggaaatttattctacaacaacaaacaattatctagttcttatatgtgaactagataattgtatatattaccattatttgggtttagcaaacagctgaaggattttaaaatgtctaaggagtgacaggatatttttatgtttgtgaataaaaggtatattgattcttaagcaggaattttgtttcatggcttctttttttgaaagagctttgttgagtgaacggaatggtctccattaatttattgctgagagaaacagacaatactggggtagagtcactggtccagtttttcaaatctaggaattgaggtgcagagaggtcaatcatcatcttcctgccacatggcaagttaatgacaaagctggtgggatcattcaaatggaagaaatagtttgagacagaaagcaatcattgcagtaaatttcaactttcacattgacctttagtcagagaacagtaccatttcycaataaggcagggttgggcaggcagttggcccatgtatatttggctttctgctgaatttcttatatttctgtaccatttcttgcttctttttaaaatagcaacaacaatgactcctctgatttcttctctkggccaggagaatcatctcctcaaggatgmtttttaataattttcctcatctggttttctatctctgacactgayagtttttcttaacttccttaaatagctcttgcaggagcctcccttgttatgaagggagtgaaaagcagttattccagattagccttaactctgttaacgcttcttttaattgggaggtctctgaatkgaaacattttctcacaacagkcatagcatcacttcctactccagggktgcaatgtccagccctcaccactcctgggcagggaaccatgtactgtaggcatcatccgggramctttggttttaataccacttgttactttggctgcarcgctggattcacactcataggagacagcactctcagctgcagaccttcaggacaatggacagcagtaactccagcatgcagaggtaaggtgaaaaggagcaggcagttctgaacctgccttcctgcaagtactcaagctagccattgtgcctgtatgttgaagtctcacccaaccacaaccactactccaagtgtcatctcccttatgaaatccacaccaatccyattagaagtaatgtgtcacaggcatttcacttctgtccttcctcaygtcacaagctaaagctaatacacaagtactcagagacttaaaggaagaaacatttgyagatgtccaagatgtgttagaaaaatagrcatattaaatgtaaaacctgctatagaaattggtaaactagaagttgcatattatgtgacagtataaacattccatattttcataataatttgaacctaaataaaaagttaagccatacatgatatttcctgaagagctatcgycctacacataaagcattgagacctatgtttctttcatttttgtatcccccacaaaacatagcacagtgctttgcaaatgtcactactgataaataacatttatttgaattaaatytaatttcttgacctttamtttcytatccataaattagaaagaataacsctgaagttccctgaaaatgtagtytaaggaggatgacagtctacttctttcaaacttccagtgtccagatatgctgaacacttattaagtatttyaataaacacatactgacatgccagttgatcacaaatgtagtaataayatttagactaayagtattttaagaaccaaaattttgtaaatagtatatktggaggcaagatttatcawtgcattagcaggtatttgtcggatgctactatgtgtccatctttgcatcttggttctttggatatcacccttcgagagaatattttcatatatgtgctgttagaagagctactgtgaatattggaagtggctcatatcctttctgaccttttacattctgcctcatttattggcaatgttaggttacaaaagaaactataatctstttcacctccaatccacatgttgtttctcttgcattmtttcttttctgcagctgtgaaatgctcagaactacatgttaataagccaatagcgatgaactgctccaacctctggggaaacttcagttatggatcaatctgctctttccattgtctagagggccagttacttaatggctctgcacaaacagcatgccaagagaatggccactggtcamctaccgtgccaacctgccaaggtacaattttcatgtgggttaagaagtcactttgatgtggaaaataacaaaatcagtgtttcttccctgtgtctttctcatagtggtcttgctttccatccccgggtttccccctgcttaataagtgtttcacaatgaatcaggcagaatctccttgccttataaagtagtggaaattaaacccagtgactgtgtaggtaatcacccctcctcttcagtgttcagtttgtgaaatgaaaccttttgcttcgttataatctctgtttaacagaccttgaagtttcaaaatgttttaaactgggagttatttcatgcagatttctaatttattatctcagaagacctttgcttaccacctaactctaaaaacctcctagcagatcttccttaattaaattccatctgtttgcaaggtatatttcagccccctattttttcccctcatagcttgtcctgactgccttttgttacataactgaatctttgccaaaaaattatgcacagtttattttatttgcctaaacttacatgtataggcttcttatgtctacaatttaatttcttttattgggaccttaccctaattcttttggaaattacagtttatatttaagtcttaggaataaattaaggccccacttttattttatttgcccatacttacatgtataggcttcttgtgtctacaatttaatttcttttattgggtcctcaccctgattcctttggaaattacagtctatatttaagccttaggaataaaataaggccccacttcccattctgttgcagtggatttatgaattccagatcttctttcatgttagcttgtcagcattcccaggacctttggtgatcctacttgatygcacatcttagagttcttgaaaactttctgggagagaaagactagtcttttgcataatacacttcttatgtcttgcatgtgtgtgtgtttgttttgtagcaggaccattgactatccaggaagccctgacttactttggtggagcggtggcttctacrataggtctgataatgggtgggacgctcctggctttgctaagaaagcgtttcagacaaaaaggtaaataggaaagagtcttctctttgcatcttggttacataaatcaaaagaaattgatttatgtaatttagggtggggaggcaaaaaccacaacttcagtagttcatgttggaaaacatttgcattaaaagaaaataaagccaagataagtgatcttgagaactgattgtccattagaatcacctagggaacttcctaaaaatatagatccttctatggggagacttggtagtgggtgtggaaatctgaatttttcaaaagctctctcccaaaattcaaatgaggctactttgcagttttgcatttggggcctctggtctaagtaccctaggctatcactaaagctaattagaaaggtgttatgcttcctgacttcactcatttcttcatgtagcagtcatttattcatcaactctgttagagtgtgagactcataatgatggtttctgatattaaggaaggaaaaatccagtaggggagacaggtgaaatcagtgccggtagtgaagtgtagtaagtgtgttaggacacaaatacaacctaggtattattagaacatagactagggatgcctaaaccagactggcaggtcagaaagcctttttcaagcttagctttgaagaatgagaggcatttagccaaggggaaaatggaaatagagttccatcagagaaaatggcatgtagaaagacatgaaagtgtaaaatcaatgagaagatggtatgtttcgcagttcagtgcatctgaatcaaaaggggattatggaggaggcaggagatgaagttaggggcagaagaagctgcccctgtattggtgacctggtgtgataagctaagagatttgctttttctcctgaaaatttgtaaagttgatgcaggatttaaacagagaagaccaaatagatgaaaactctctgtaagggaaactgtgttcatcagactgttcatcagaaaaagaactttagtctaggaattaaagatgggaacatcccatctcttaaggtttaaaacatcctttctcaatcttctccagacacttagcctgcctataagttcataaagttttgtttataacctaatggggctcttcttcatcactcctcatagaaagtaactgggggcatcagagagaccattaattgctcaaatcaaggtaatggaaagtggctatgttaaaatatctgaaagagatctcattgaatttctctattgttgacataggtctcaacacctattcttaactgctcagaggcaaaaccacgtgttccttactcttattctttctccatttacaatgctaccaaaacattgaggctgtttttccaaatttccttcatatactctcctgtgagtggctaagacaatagacaaaggtcaatactctgcttcaataccaaagagatgtactgagagctacagtgaatccctccatgcaaaatgtgtgcttgctcaaccaaacccagaaggcagaggcaagagctcctagaccttaatctctatgatcatgtaggaatcactctaatcttgatgtttcccccaagtcctttctttgactttgagacatttccagaggaccctctaacagtggagaaggacaaatggccactcatgccccaatatttttaataataaatacattcatttgttggggatgggagcttttttcctcagcttctcccaatttgattttaggctttgaagttttctatggccaaataagaggaaaatgctgcagccatagctgaaaattcaactatgagagtctgttatttggataaaaatatgctaccagggaggaaaaacatccactgttctgttggtttggattcatgtatgtgattagcttgctcagctaagggctgagggcaagtgacacaagatgccctcaaaagaaattgatttatgtatttactgaaaggaaggaggaagaaagtgacaggactctggagttaaatattgtcgaatgtttaatttagcctaaaacactttctacctttcagggagaaactgttcccaatattccccttataatgagccctcctgaaaatcagtctactggttttccccagtaatttctatccttaatgaccctctctttcatcttgttttttttttttaatcattcattcttgtcttcttgctgattttagatgatgggaaatgccccttgaatcctcacaggtaaggtagaaatgttttatgattgagtaaattttgctaccttaactttawaattcactgtaatatgtcagaatgattacatgcaatgcctgcctcctttttacaatgtcttttgcaatgtcttcttttctactctgaagtaaaatacacagataacaaatattctaattaaaatataaagtaggaataaaaygaaaagtaatttataataaaaacaagatgcaaaaacttaggcgctgtgccagtagatgcaatgaggtcatcagaagcgtgcaccttccacagaatcactaggaaagcaacgcccacgcaggtggactgatgggggaatgttgtattagtgactcaaagagcattagaactgtggccaacaccagcctaatttttcaacatggtgaacaactccggtaaagagtctgaaaacctgtgataattgtcctttgattcatatggcaattgcattttaaagatgcaaaaaaatgcttaatatttacatgtaaagtgcttgagttccaggctcagagatttttaacctgtatgaatatcgagcagatattccaaagttatgtgggatgttggacaattcttttgtgtcctgtaccccttgctatttataatctagcaatagttttcaaaaagggacagtatgcccccaagggtatttttttatttttgtaatgaacaagagttctactgacattgagtgggcaggaggcaggggtgctggatatcttttaaagacatttccgtcctggaggacatggaaatccttatatgaactctattgtcgtagacatccagcacccttgccccatacccactcaatatcggaagaactcttggttataaaaatcaaaaaacacccctaggggtcatattgcaccctttgaaaactatcgttagattatcaagtgttaatgccaagaattttgtaactacctcttgtcacctagaagaggttgcagcaacttagagggtataacaggtattcagtacataaagcatgaacaataacttagtgtgggtgcaaaatgcaatgcaaattacccagagctggtaagtgggatatcgaatatttctttggcatttatttttctttcctttctaaagcagaattccaagggtggatggtaatttgtggtttctggaaatactatgtgttggactgtgttgtcgagaactaagcagtatattgttgccatccttgtgtttctgttctttagccacctaggaacatatggagtttttacaaacgctgcatttgacccgagtccttaaggtaagatccctataaagatatttttgaaggaaatagaacactagggaaaaatggaagaytataaagcttaacttttctttacataatcatatattaaattttaagtatgtattaaattttcaggcatgaaggaaattgtgttggcagtaggacacaggtatgacaatggagttacaaaagagttcacaaaaggattttcatttcctccaggacagaaatgtcctaacaagacataacttatttcaggatgtgtaacatttccattattaactgctaggtggtgatgatgtggccttgcctgcaaagcagaagtcaggactgctgaaaaatgtttacgaactgttatggartcaattccctatgctacctgctggaaaaacaaaaataatctgatgctatccctctcccaaaaagtgggtagttgagtgtcctacaaaaagcctgaatggcagaatattcgaaatctagaaagaaaagattatgctgcgcctcagggtgtagatatgatgagyaatttttttctttcttttatttttttaaggaaatgataattatttaaatttctttggtctcatttccagagacctgtccttttcctggtctcctcattcagcctccatatgatcctgttgtgaacatcaagtttcctgctacactggacttaactataatgcatttgctgcaggtttccataaacacccatgaatcaaagacatggaattaccttagattagctctggaccagcctgttggacccgctctggaccaaccctgtttcctgagtttgggattgtggtacaatctcaaattctcaacctaccaccccttcctgtcccacctcttctcttcctgtaacacaagccacagaagccaggagcaaatgtttctgcagtagtctctgtgctttgactcacctgttacttgaaataccagtgaaccaaagagactggagcatctgactcacaagaagaccagactgtggagaaataaaaatacctctttattttttgattgaaggaaggttttctccactttgttggaaagcaggtggcatctctaattggaagaaattcctgtagcatcttctggagtctccagtggttgctgttgatgaggcctcttggacctctgctctgaggcttccagagagtcctctggatggcaccagaggctgcagaaggccaagaatcaagctagaaggccacatgtcaccgtggaccttcctgccaccagtcactgtccctcaaatgacccaaasaccaatattcaaatgcgtaattaaaagaattttccccaaatgccgtgttcctctattttatggtttgttcagtaaggtctgtatacatcacattgtttaccatcagtgtaataacacacaattatggttgtcctatttacacctcaaccattcattcagtcagcaaatatgtatcgcacaccctacactgcaagagaaaatcagagaaatggaaaaattcttcatcaccttaatattttacagggaagaacaaatgtgttttacatgttctttaaatcccatgtttaataaataggtcattgaaagttatatagtatttatctggaactgatgttaaaaaaaatagagagccaaaaattatagtagtcatcttgtctctgtaaaatgtaattaaataaatatgtcatgtacactgtatatacataagcaaacatgcaaataaaaaagcagcctactcaaaggttacaataatgttgcaacaattctggtagtaaccttgggatttagggacacagtgctttcaaaacgtttctctgatacactgccagtagcatctctgactgcttatttaaatgtcaatcagtaggctaggtgttctaggactttggtctcaaccctgtttcctgagtcagaatctacattttgtaaaagttcccctgggaattctgatggtctgccaactttgggagacactgataatattgtagataaagaagtgtaagcaactgttcagttagggagacaatagatacctgcatggaataacaaaaggtaattaacatgattatataatttgaatagtgttgtaatagttcataaaatggaaaagccaatttgagcccagaatctgggagataggcagaactctggactgtaaagaatggcccagcaaagaggaagaaaatgggcattctaagttggtgcaataatatcagcacaggagaaaagacagaatattggggggagtggggagggaggaagaggctgttgatgagcctgatatcattaacagagacctcatgtgaggtgccagattacaatttattgaatgtactgaatgcataaagcataagacagaaacctggagccatgcagatacagggaacccaggacaagtcattatgatgcctcagacaatataattcgcagattctctatcaatagcaaagtaagatttaaggtgctgtgaaacagtcagatccttcaagaaaaacaagaatacaaggggtcctggagacaggaaaatatgatcataataataaatttgtgattccttctttctctctttttctctttctttctttttctttctttcttttttttttttgatggagttttgctctcgttgcccaggctggagtaaaatggcatgatatcagctcactgcaaactccaccttccaggttcaagcaattctcttgcctcaatctctcgagtaggtgggattacaggtgtccaccacaacgcccggctaattttttatatttttagtagagaagggtttcaccatgttggccaggctggtcttgaactcctgacctcaggtgattcacccgccttggcctcccaaagtactgggattacaggcgtgagccactgcgcctagcctctgtgtgttaagtgctggaactatagtttacagtagcattttatcctcccaacataccctatcaggaaaaattattattgtcatccttatttcacagatgtcaaaactgaacagagaggtacagtaacttgcccaagacaacacagctagtaagtgaaactgaaatctggacaactgatttttttcagccaagctcttcaagcccgctgctatgctgcagcttagctggcgacaggcccttatcaaggcagaactgtgccttgatagaggccaggaaggcgattcagagcagtaggccttgtccatgtgtttgttccctgcttcttcaccacttgaaaatagtgtttcagtgcccagtaacagggcacaatactcttttcctcagattaaaaggggagccatctgcttaaggtggttgggtgccactgcactgcacagaaggttctccaagtgtgagcttggacccaggcaggcctcaggtcagtggtaacggacgactgcttccgtggtgttggcaggtggaaatggagggatacagctttgtccggctcatgaatccctgggcattgtcccgcctgctagagcctctgatctctgccccttcttcacctgcagtaaaacagtcactagtttggttgctctccctaatacctctggtcactgggagctgtgatctcaccaaacccctgccaggaaaagccccagaaaaagcggagggagtgagagccagaggctgctgctgccgtttgcaagaactgcaggggaggaggacgctgccacccacagcctctagagctcattgcagctgggacagcccggagtgtggttagcagctcggcaagcgctgcccaggtcctggggtggtggcagccagcgggagcaggaaaggaagcatgttcccaggctgcccacgcctctgggtcctggtggtcttgggcaccagctgggtaggctgggggagccaagggacagaagcggcacagctaaggcagttctacgtggctgctcagggcatcagttggagctaccgacctgagcccacaaactcaaggtaactcaggtgtggagtccgggtgggcttctctagagaggaaaatctatttcttttagagaacattccctttgcaatgtcatggctttttttttttttaacttcaggtaagtaaatataactaataggagagtatactgaattaaataaactgggcaaatgctaattttgcatccaacaatgtagtttatcattctgagggtttagaaagcaccctatttgattggttagatgctaccttcttttcaagtttattttcaatacagttttgttagtatgtttgtgttggcttatatattggttaattcaaaggcaccaggcacttgctccctcattagcccttcctgcaaactcctgttccagatttttagttgtatagtatttttatgagactcctagttacatattatttattccattgtctacatagcttcatcttctaaaactaaaaatgaacaccttgtgctttttgtcatataattttattgctgccttataaatgactttcaaaatatcatcagttcttgtatgtttttgtactttcaccttttttctgcttcatatttgacttatttatcctattgaatgtgactcttcatttttttttctctctgttcatcatgtcctgggatatggtttaccttggctacttaaaggcatatgtaactgagaggaggtttaattcagataaaatactatccttgagttgcaaactattttttctaattgaaatgttaaaaataagacttctcagaaattaactaaatcatacagtctattcaatatttccagttagttattttttaaatggtaaacctgctagtgtgactcactttttttccttacatcacacttcattatgaaagatgtgttcctcttttacaattacaaaaccaaagtaatctgccaaaaaataatgtaatattttgagatcttttagtgtataatattaacctttttaaaactctcattgtaactgggttattttggagggtattacataccatcttggtcttataataagaagagatccctccttctcaaaaataatcattttaaatatcgtacttcaaagtgataatctaggtcacacccacaccctttgggaactgccgtaagctaaaaccccaaggaaaataacagtccttctaacactaatcttgcctgctcatgagtagaatgcagacttggttgttggctttcttgtagcatgctgggttcatgcttgggagttttttctcttgtctgtagttagcgttgaaaataacaagcaaaataccggaggcagaaccagatagggcaaaggtctgattcacatggtgagtacacagggaaccatgactggtcattctgtcccctcatcctgtgggtaagtttccaaagttctggagattcgttcctctggtagcaattgttgagtcaaaaccatagaaacacaacccagacaaactgtcatattgtttaaccctaaatcatatcatttctctctagcattttcttatgaaaaatctaatccatatatctggctgcttaaactaagaacttgttctaacttgtcctgcccctagagctatgatactcactaggtgaatatcaacatagccaactccatcttttggcaaagtgtattttagcacaaagcagacatctatctacttatttcatataatattagcaggacaatgccttttaaaggtaaaatgtatctattattcttgctccaagtctaaggtgaacactttcaaaaatttccttagaaaacttgtttagtcactcacatgtatacaaagagatattgaagaaaagatatacatacattttccttctagggttctagctttatatgattttgtgattatgaacaaatcatctttaaacaatccttataaatgaaaaactcgtcgtacacattgtttgaattcatatgatctgtaactttttaatcagatagattattttccaatagaaattgttcagatcaaaatagacatacctcagtatgaatacacagcatacatagtaaaaacatgttaggaaacatctctctgttgaaattactccacgtaagagactgatattttttagtaaagattttacaccatcatctacatttctgtattaaagatctggggcaggggaggacaataacttttcaattgtactaaaaataaataaataaaaatggacttccacattagggacattagtatatagaatcctggaattcttaagttagaagaatgctaagagttcatttaattcatattcaacttccacgctttaaccttctacttttcccctttccctcagcaccaatgaccttaccaagtagttgtctaatttctacttgaatgcttccagtgatggagaatccactaccttctctatctagctattctaaaagtacttacgtgcctcctttaattctgcccccacatattaacacagtttctgtattccacatattacaatttgtgagcattactgtaactacagatttgtttttgctttctgagaaaacctgaagggtaaagactaactcttattacatttacaaaataatattactagctaacatggattgagtatttctagtgtgccagctctatgccttttgcacatatcaacttatttaaaattatacaacaattctgtgaaggagatttcagtattaatctcatttcatagttgtagaaactgaggcacaaatggatgaagtaaacttttcaaagtaaaacaataagaggtagatataggcttcaagtccagagatactgaattcacagcctgcaccctagccaccgcgctgtatagaagtcatggcatatgtgggtgctgttatgtcttgattatggctgggccactgtccccacattaggaagcaaaacaaagccactctgatcaactgatttagacatttgcaaggtattttctccaaattctctttccttttaccctcatctttgagtttaagacaaggataagactgatttgcctttagaggtacagaacaataacaacaacagcaaaaacaggaaagtaacccaccactcacaactctccctgttgtctgtcctctctctaattttatttaaaatcatgaatgcagtggtttcacattttttaatcttggttctgccacttatcaactgtatctcttggacaagttactgactctttccaaaacagttttttcatttgtttgtttccaatatgaatcccagggcttttaccccattagccatctctcacctctcaactagaaataaattccaccaaatcaatactttttcacaatgttccccagtagattaaaactatatttgattgatcagttgaaaaacagctcatatatttattcataaaggatttggtc

SEQ ID NO: 5696 - DNA, 84409 bp, Homo sapiens
cagacacttagcctgcctataagttcataaagttttgtttataacctaatggggctcttcttcatcactcctcatagaaagtaactgggggcatcagagagaccattaattgctcaaatcaaggtaatggaaagtggctatgttaaaatatctgaaagagatctcattgaatttctctattgttgacataggtctcaacacctattcttaactgctcagaggcaaaaccacgtgttccttactcttattctttctccatttacaatgctaccaaaacattgaggctgtttttccaaatttccttcatatactctcctgtgagtggctaagacaatagacaaaggtcaatactctgcttcaataccaaagagatgtactgagagctacagtgaatccctccatgcaaaatgtgtgcttgctcaaccaaacccagaaggcagaggcaagagctcctagaccttaatctctatgatcatgtaggaatcactctaatcttgatgtttcccccaagtcctttctttgactttgagacatttccagaggaccctctaacagtggagaaggacaaatggccactcatgccccaatatttttaataataaatacattcatttgttggggatgggagcttttttcctcagcttctcccaatttgattttaggctttgaagttttctatggccaaataagaggaaaatgctgcagccatagctgaaaattcaactatgagagtctgttatttggataaaaatatgctaccagggaggaaaaacatccactgttctgttggtttggattcatgtatgtgattagcttgctcagctaagggctgagggcaagtgacacaagatgccctcaaaagaaattgatttatgtatttactgaaaggaaggaggaagaaagtgacaggactctggagttaaatattgtcgaatgtttaatttagcctaaaacactttctacctttcagggagaaactgttcccaatattccccttataatgagccctcctgaaaatcagtctactggttttccccagtaatttctatccttaatgaccctctctttcatcttgttttttttttttaatcattcattcttgtcttcttgctgattttagatgatgggaaatgccccttgaatcctcacaggtaaggtagaaatgttttatgattgagtaaattttgctaccttaactttataattcactgtaatatgtcagaatgattacatgcaatgcctgcctcctttttacaatgtcttttgcaatgtcttcttttctactctgaagtaaaatacacagataacaaatattctaattaaaatataaagtaggaataaaatgaaaagtaatttataataaaaacaagatgcaaaaacttaggcgctgtgccagtagatgcaatgaggtcatcagaagcgtgcaccttccacagaatcactaggaaagcaacgcccacgcaggtggactgatgggggaatgttgtattagtgactcaaagagcattagaactgtggccaacaccagcctaatttttcaacatggtgaacaactccggtaaagagtctgaaaacctgtgataattgtcctttgattcatatggcaattgcattttaaagatgcaaaaaaatgcttaatatttacatgtaaagtgcttgagttccaggctcagagatttttaacctgtatgaatatcgagcagatattccaaagttatgtgggatgttggacaattcttttgtgtcctgtaccccttgctatttataatctagcaatagttttcaaaaagggacagtatgcccccaagggtatttttttatttttgtaatgaacaagagttctactgacattgagtgggcaggaggcaggggtgctggatatcttttaaagacatttccgtcctggaggacatggaaatccttatatgaactctattgtcgtagacatccagcacccttgccccatacccactcaatatcggaagaactcttggttataaaaatcaaaaaacacccctaggggtcatattgcaccctttgaaaactatcgttagattatcaagtgttaatgccaagaattttgtaactacctcttgtcacctagaagaggttgcagcaacttagagggtataacaggtattcagtacataaagcatgaacaataacttagtgtgggtgcaaaatgcaatgcaaattacccagagctggtaagtgggatatcgaatatttctttggcatttatttttctttcctttctaaagcagaattccaagggtggatggtaatttgtggtttctggaaatactatgtgttggactgtgttgtcgagaactaagcagtatattgttgccatccttgtgtttctgttctttagccacctaggaacatatggagtttttacaaacgctgcatttgacccgagtccttaaggtaagatccctataaagatatttttgaaggaaatagaacactagggaaaaatggaagaytataaagcttaacttttctttacataatcatatattaaattttaagtatgtattaaattttcaggcatgaaggaaattgtgttggcagtaggacacaggtatgacaatggagttacaaaagagttcacaaaaggattttcatttcctccaggacagaaatgtcctaacaagacataacttatttcaggatgtgtaacatttccattattaactgctaggtggtgatgatgtggccttgcctgcaaagcagaagtcaggactgctgaaaaatgtttacgaactgttatggagtcaattccctatgctacctgctggaaaaacaaaaataatctgatgctatccctctcccaaaaagtgggtagttgagtgtcctacaaaaagcctgaatggcagaatattcgaaatctagaaagaaaagattatgctgcgcctcagggtgtagatatgatgagcaatttttttctttcttttatttttttaaggaaatgataattatttaaatttctttggtctcatttccagagacctgtccttttcctggtctcctcattcagcctccatatgatcctgttgtgaacatcaagtttcctgctacactggacttaactataatgcatttgctgcaggtttccataaacacccatgaatcaaagacatggaattaccttagattagctctggaccagcctgttggacccgctctggaccaaccctgtttcctgagtttgggattgtggtacaatctcaaattctcaacctaccaccccttcctgtcccacctcttctcttcctgtaacacaagccacagaagccaggagcaaatgtttctgcagtagtctctgtgctttgactcacctgttacttgaaataccagtgaaccaaagagactggagcatctgactcacaagaagaccagactgtggagaaataaaaatacctctttattttttgattgaaggaaggttttctccactttgttggaaagcaggtggcatctctaattggaagaaattcctgtagcatcttctggagtctccagtggttgctgttgatgaggcctcttggacctctgctctgaggcttccagagagtcctctggatggcaccagaggctgcagaaggccaagaatcaagctagaaggccacatgtcaccgtggaccttcctgccaccagtcactgtccctcaaatgacccaaagaccaatattcaaatgcgtaattaaaagaattttccccaaatgccgtgttcctctattttatggtttgttcagtaaggtctgtatacatcacattgtttaccatcagtgtaataacacacaattatggttgtcctatttacacctcaaccattcattcagtcagcaaatatgtatcgcacaccctacactgcaagagaaaatcagagaaatggaaaaattcttcatcaccttaatattttacagggaagaacaaatgtgttttacatgttctttaaatcccatgtttaataaataggtcattgaaagttatatagtatttatctggaactgatgttaaaaaaaatagagagccaaaaattatagtagtcatcttgtctctgtaaaatgtaattmaataaatatgtcatgtacactgtatatacataagcaaacatgcaaataaaaaagcagcctactcaaaggttacaataatgttgcaacaattctggtagtaaccttgggatttagggacacagtgctttcaaaacgtttctctgatacactgccagtagcatctctgactgcttatttaaatgtcaatcagtaggctaggtgttctaggactttggtctcaaccctgtttcctgagtcagaatctacattttgtaaaagttcccctgggaattctgatggtctgccaactttgggagacactgataatattgtagataaagaagtgtaagcaactgttcagttagggagacaatagatacctgcatggaataacaaaaggtaattaacatgattatataatttgaatagtgttgtaatagttcataaaatggaaaagccaatttgagcccagaatctgggagataggcagaactctggactgtaaagaatggcccagcaaagaggaagaaaatgggcattctaagttggtgcaataatatcagcacaggagaaaagacagaatattggggggagtggggagggaggaagaggctgttgatgagcctgatatcattaacagagacctcatgtgaggtgccagattacaatttattgaatgtactgaatgcataaagcataagacagaaacctggagccatgcagatacagggaacccaggacaagtcattatgatgcctcagacaatataattcgcagattctctatcaatagcaaagtaagatttaaggtgctgtgaaacagtcagatccttcaagaaaaacaagaatacaaggggtcctggagacaggaaaatatgatcataataataaatttgtgattccttctttctctctttttctctttctttctttttctttctttcttttttttttttgatggagttttgctctcgttgcccaggctggagtaaaatggcatgatatcagctcactgcaaactccaccttccaggttcaagcaattctcttgcctcaatctctcgagtaggtgggattacaggtgtccaccacaacgcccggctaattttttatatttttagtagagaagggtttcaccatgttggccaggctggtcttgaactcctgacctcaggtgattcacccgccttggcctcccaaagtactgggattacaggcgtgagccactgcgcctagcctctgtgtgttaagtgctggaactatagtttacagtagcattttatcctcccaacataccctatcaggaaaaattattattgtcatccttatttcacagatgtcaaaactgaacagagaggtacagtaacttgcccaagacaacacagctagtaagtgaaactgaaatctggacaactgatttttttcagccaagctcttcaagcccgctgctatgctgcagcttagctggcgacaggcccttatcaaggcagaactgtgccttgatagaggccaggaaggcgattcagagcagtaggccttgtccatgtgtttgttccctgcttcttcaccacttgaaaatagtgtttcagtgcccagtaacagggcacaatactcttttcctcagattaaaaggggagccatctgcttaaggtggttgggtgccactgcactgcacagaaggttctccaagtgtgagcttggacccaggcaggcctcaggtcagtggtaacggacgactgcttccgtggtgttggcaggtggaaatggagggatacagctttgtccggctcatgaatccctgggcattgtcccgcctgctagagcctctgatctctgccccttcttcacctgcagtaaaacagtcactagtttggttgctctccctaatacctctggtcactgggagctgtgatctcaccaaacccctgccaggaaaagccccagaaaaagcggagggagtgagagccagaggctgctgctgccgtttgcaagaactgcaggggaggaggacgctgccacccacagcctctagagctcattgcagctgggacagcccggagtgtggttagcagctcggcaagcgctgcccaggtcctggggtggtggcagccagcgggagcaggaaaggaagcatgttcccaggctgcccacgcctctgggtcctggtggtcttgrgcaccagctgggtaggctgggggagccaagggacagaagcggcacagctaaggcagttctacgtggctgctcagggcatcagttggagctaccgacctgagcccacaaactcaaggtaactcaggtgtggagtccgggtgggcttctctagagaggaaaatctatttcttttagagaacattccctttgcaatgtcatggctttttttttttttaacttcaggtaagtaaatataactaataggagagtatactgaattaaataaactgggcaaatgctaattttgcatccaacaatgtagtttatcattctgagggtttagaaagcaccctatttgattggttagatgctaccttcttttcaagtttattttcaatacagttttgttagtatgtttgtgttggcttatatattggttaattcaaaggcaccaggcacttgctccctcattagcccttcctgcaaactcctgttccagatttttagttgtatagtatttttatgagactcctagttacatattatttattccattgtctacatagcttcatcttctaaaactaaaaatgaacaccttgtgctttttgtcatataattttattgctgccttataaatgactttcaaaatatcatcagttcttgtatgtttttgtactttcaccttttttctgcttcatatttgacttatttatcctattgaatgtgactcttcatttttttttctctctgttcatcatgtcctgggatatggtttaccttggctacttaaaggcatatgtaactgagaggaggtttaattcagataaaatactatccttgagttgcaaactattttttctaattgaaatgttaaaaataagacttctcagaaattaactaaatcatacagtctattcaatatttccagttagttattttttaaatggtaaacctgctagtgtgactcactttttttccttacatcacacttcattatgaaagatgtgttcctcttttacaattacaaaaccaaagtaatctgccaaaaaataatgtaatattttgagatcttttagtgtataatattaacctttttaaaactctcattgtaactgggttattttggagggtattacataccatcttggtcttataataagaagagatccctccttctcaaaaataatcattttaaatatcgtacttcaaagtgataatctaggtcacacccacaccctttgggaactgccgtaagctaaaaccccaaggaaaataacagtccttctaacactaatcttgcctgctcatgagtagaatgcagacttggttgttggctttcttgtagcatgctgggttcatgcttgggagttttttctcttgtctgtagttagcgttgaaaataacaagcaaaataccggaggcagaaccagatagggcaaaggtctgattcacatggtgagtacacagggaaccatgactggtcattctgtcccctcatcctgtgggtaagtttccaaagttctggagattcgttcctctggtagsaattgttgagtcaaaaccatagaaacacaacccagacaaactgtcatattgtttaaccctaaatcatatcatttctctctagcattttcttatgaaaaatctaatccatatatctggctgcttaaactaagaacttgttctaacttgtcctgcccctagagctatgatactcactaggtgaatatcaacatagccaactccatcttttggcaaagtgtattttagcacaaagcagacatctatctacttatttcatataatattagcaggacaatgccttttaaaggtaaaatgtatctattattcttgctccaagtctaaggtgaacactttcaaaaatttccttagaaaacttgtttagtcactcacatgtatacaaagagatattgaagaaaagatatacatacattttccttctagggttctagctttatatgattttgtgattatgaacaaatcatctttaaacaatccttataaatgaaaaactcgtcgtacacattgtttgaattcatatgatctgtaactttttaatcagatagattattttccaatagaaattgttcagatcaaaatagacatacctcagtatgaatacacagcatacatagtaaaaacatgttaggaaacatctctctgttgaaattactccacgtaagagactgatattttttagtaaagattttacaccatcatctacatttctgtattaaagatctggggcaggggaggacaataacttttcaattgtactaaaaataaataaataaaaatggacttccacattagggacattagtatatagaatcctggaattcttaagttagaagaatgctaagagttcatttaattcatattcaacttccacgctttaaccttctacttttcccctttccctcagcaccaatgaccttaccaagtagttgtctaatttctacttgaatgcttccagtgatggagaatccactaccttctctatctagctattctaaaagtacttacgtgcctcctttaattctgcccccacatattaacacagtttctgtattccacatattacaatttgtgagcattactgtaactacagatttgtttttgctttctgagaaaacctgaagggtaaagactaactcttattacatttacaaaataatattactagctaacatggattgagtatttctagtgtgccagctctatgccttttgcacatatcaacttatttaaaattatacaacaattctgtgaaggagatttcagtattaatctcatttcatagttgtagaaactgaggcacaaatggatgaagtaaacttttcaaagtaaaacaataagaggtagatataggcttcaagtccagagatactgaattcacagcctgcaccctagccaccgcgctgtatagaagtcatggcatatgtgggtgctgttatgtcttgattatggctgggccactgtccccacattaggaagcaaaacaaagccactctgatcaactgatttagacatttgcaaggtattttctccaaattctctttccttttaccctcatctttgagtttaagacaaggataagactgatttgcctttagaggtacagaacaataacaacaacagcaaaaacaggaaagtaacccaccactcacaactctccctgttgtctgtcctctctctaattttatttaaaatcatgaatgcagtggtttcacattttttaatcttggttctgccacttatcaactgtatctcttggacaagttactgactctttccaaaacagttttttcatttgtttgtttccaatatgaatcccagggcttttaccccattagccatctctcacctctcaactagaaataaattccaccaaatcaatactttttcacaatgttccccagtagattaaaactatatttgattgatcagttgaaaaacagctcatatatttattcataaaggatttggtcatattttaatcatataaaatctaaacctacagtttgggtttctactgtgatattgggttctttttagaaaattgattctgaggaatgatattagggtagattaacttgtgaacaaatagttatcacaacaggatatttttgaagagaccaataattatttcattaactttacttattgatcatatttataaaactgtggacttctgaaatacaataaagatactrgtattctactagaagtctgaagatatgagagatctactttttttgtaatgtgagaaatagatattgaatatgcctttcaaattagtttttgtattttatttccagtttgaatctttctgtaacttcctttaagaaaattgtctacagagagtatgaaccatattttaagaaagaaaaaccacartctaccatttcaggtaagcctgaaatatacttttttaattttaaagataaatttctatgggtaatttggcattcacatgcatctaaaatatccatttactgaaaatttatagaaacgtgtggttttttttttaagaagtactggctacataatatgtggggcccagtgcaaaatgaaaatgtgagtccccttgttcatattattgaaaatttcacagtgactgcaaagcattaaaccaagccaggggccctttggggcatggggccctgtgaaactgcccaggtcacatacccatgaagctggctctgtttttaaccttgattaaaataactaaataaaacttataagtgtttgaatttttattcattcatctaaaaaactgttattgagtacctggtatgggctgggcattgaaataggcattgtggatgcaatagtggacaagacagtctcatatcctgggttcatggagattatggtctagtttaatgagcatagatgtgccttcgcaaaatgatattttgcttccatttggctccctagattcattcaaaggaactatgtatggctgactcttttgcatctctttcccgtctattcttctgtttatttagtgtgatatatacaatagccataatttttaaagaaaatctcttattttttcctcatctcttcctttatcaagaagactgggttgaatagggttctaatatcttaactatgataccatattccgcagggatgatagagaccatcaagggagaacttcctccagttgaatccccttgtcagtaattcacctgtccctttccccaatcagatgaagacctgctgtctttcccagaatcatcctagtctgtcctgcctcttctgatctcctttaatcttcaatatttagtcaatgggagtcttcctttcagttaaaaatcaacgactaaaccaaaaccaaatcaaaccatgtccagttaactcctatctagaaaaagaaaaaaaaaaatctccccttgaccctgcctgccttttccttttctctcctttccttcactaccagttttctgtatgagaactctgtatcattctctacatttcttcgcctatattccttccctaatctgctttagtatgaataagtctactaaaattactctcacaaaagggcacctaggacttgaggtgccagagcctatgttcttttactactagacattactaggacatttaacactcttcctttctgaagctctcgctttacctgttttttctagtgccacttccccttggttttctcagacttctcttaccactcctgctcagtatccccaccagatattcttccccagggttcgaatctcacccaaaaccaaggctttcactactacctacccagaagccactttccctctgaagctacattgacaccccctcaataccagcagaattaaatcttccctcttctatacatccccagtaccttgaattaatccctaccttctaaagatattaagaggatcaattgagttaataagtacaaagtatttataatgatgctgacacataataggcactcagtagaagttagctacattattgttattgttgctgctattactaatcataacttagatcatatatatcatagtattatggatatctatatatctatatttctccactcatttatatagtcttcacatgtgttcatttatatatttatttaattttaaacagatctgcatttaaatattcttttatttttaaataattgtgtattgaggccaggcgtggtggctcatgcactttgggaggccaaggcagatggatcacttgaggtcaggagttccagaccagcctggcccacatggtgaaacccmgcctctactgaaaatacaaaaattagttgtgcatgrtggtacatgcctgtagtcccagctactcrggaggctgagacatgagaatcacttgaacccaggaggtggaggctgcagtgagctgacatcgcatcacttcactccaacctgggtgacagagcgaaactctatctcaaaaaaaaaamaacaacaacaacaacaacaaaaaagtatattgagaacctactacattctaggctctgggataaagtgaataagacatggaccttgatttccaggagccaatcagctattggggataacctatggatagacaagcaatgacagtagagtaataaggaagaactatgatgaggattctgtagtaggacataggagacctatctccagtctggtggtcaggaaagtatttctatttctagattgatagctgaaaaaagagtaggatcttggaaagccaagtggggaggcaaggggttgggtgatagatgcattttaaaccaaggcacagaatgtttaaaagtttggaggtgagagtatggtatatttgtggaaccataactggatcagcacagttggaccacaaacttcagggaaggaattaacaagagatgcaactagatggggatcagggatccatgctaggctttatattgagaggaatagggagtccctaaaaggatttcagcaggagaaatatttgtcctttagaaagattatgttgtccaattatagagaatagattggagaaagaccagtccagagccagagaaagtagtcatgggactgttgtatcaatccagatagcagagaagctgagatggagtccaaagatatttaggagctaaagttgattaaacttggtgactcattagatgcagataatgaggaagaaaagggaattgttatggacttcaaggtgtctggtttgaacagcagaatggatagggtgccattcagtgagaaagaaaatgtaagaaaaggagatagtttgtgagagaaggtgataagtatagatttggagtctgaggtgtgtatagaatatctacctagagatgttaagtgagcagacgggtgtagaagtttggccctcaaaagagagatctgagctagctgtcaacatttgggagacatcagaacaaagatggcaaatgaagaatttagagggtgtgaactcacccagggaggatgtgatgagaagagaaggctgcagacagagctcaaagtagcagcaaagtccaagggatgagccaagaaagaaaagtttaccaaggagcttgagaaagcctgttcagggaggggagaagaaatctagagaatgtgttatcctggaggcaaagggtcaaatgctattaatataagggtcaaaatatggtccctttgttatggaatagtgggacaagaccagatggcagggtgttgaggagtgaatggaaggcgaggaaactgaagcacaagggtcttatagataactcttccctgaaacttggttccagatgggaggagagacagggtagtttcgggggtgggggtgggtactgaggagcttaaggacatttgagaattttataaaaaggaatacagagacttaaatatttaagggaagactctatagaaatgccatgaagtcctttccaatagaaaatgtggggataaaacatctgagagagaatgattaatggagacttagaagaagcaggaagcattgggattcaaaccttgggctggcttggccttaggtagaatggctaccaccttcatggggggccaggaaagcagaggataacgttgcaaataaaattaagtttgtagttatgagtaggaagttgaaggatgtcctgtcctatatcacagagtctattcattttcatagctccagctccaagcttagcatgtacaatagatacttaagaactatttaattaaattaaattgtaggtagatgaagggaatataaggtgggaaacatactcattagggccaggaaaagaggattggggccggtatttgaaggtgtaccttttgtggcttttgccaagctaagcaaattttaatccctttgctgtgtgagacattgtgctaaatgccataagagacggaaaggactaattccaggctgaagacttttaaacaataaaaaggcatggatagcttttgaagaaaagggttctgtgatcaaagtcctttcagatgattaaattttttagtgatttcctgatttaaccttgttagaggtagactctgacagttggtgagaacagtctccaatttatgtgtgaggcctttgcacctttctgtcaacccctgtgtatctcagaatatatttgtttcatgtggacaaaggtgtttcgacgtccattttaatgtaatctcttcctgaatgtccaaagttgcttaactatgaacttatgaagtgcaggagtggtatcttattcacctttgtaactctatagtagttgatacaaggaggcaaatctggcgtgaaggaaaagccttttattttgactgagaagatctggatttgaacactgccattaactatgtggcctctcccattccccagactagtcctgtgttatttgtacctttcccctatgtcctgctccactcatctgctgggtgtgattctagctgagccctgaaaaagtcatgagcctcactcctgcagcatgaactattgttgttgttagttcttgtaattgtagggggctgggctgtaggattggaggtatgaagatgcccatccaataaggtttgtggacatttgggcaggtgagggagtacagctggggtcatttttaggaattctgtcttgggctttaaaatggctagtcttggctgggcatagtggctcatgactgtaatcccagcactttgggakgccraggtrggaggattgcttgaggccaggagttttagaccagcctgggcaatgtagtgagactctgtttctatttaaaaaaatacatacatatatatatatrtatatatatatatatatatatatatttaaattagccagacatggtggtacatacctgtcatttcagctactggggaggctaaggcaagagggtcatttaggacaagagcatcacttgagcccaggagttggaggctgcagtgagttatgatcacaccactgcactccagcctgggtgacaaaataagacctcatctctaaataaataaataattaattaaattggctagttttgagtctgcatatttttcagggacaaattataaaatgtttgtccctgaaggagttttgaaatagctgcaacaatcactaccttgtgttatgtaatgcattgttcacctaagagcaggggattggattagttgaccttctgcagtcctttccagttccacaactgcactaaattgggtacatgctgtgctggcttccccaagccctgaagtaggccactcctttccccaatccagctttgggcactgaggagagggttagaagggttttaggccatctggctgttggaggagctaaagagcagcttgaaaaccatttagccatgtgttttcctacatgcgtgaaagtatttggtatgcatttatgaaaacatccttttgttttgccttaaatctgaagaagcaggaggggaggttgaataaatactccaaactgtccactgaagtaataggtcttattaggttaaataacttaggagactttctctgggcatctggtatttgcaggcatgtgatgccaacaaacaaatcaaccaagcaagagaaccatggcaactaaatgcggcacacaattggcagcatagtcagcaccctgttgggctcattggcagctggggtaggtgggaatagtcagtggaaacttccatcaggagccaagacagagggtagcagctggaagaggggggtcagtcagtggagtccgacatgtcaggagtcaaaagaggtgtagacatctggactattctataaagatgggggyctgagcctgcccygtggaaggaatagggagagctttggctcaggagtccagagatctgagttctgatcccagcaatgctaccagatcactgactgaccttgggcaagtcacctttgtcccccgattcctacctcccaggctttgttaactaaaataaggactgaactttgtgacctccacagtcctgtgtaaagctaacataaaaacaaacaaaaagcttcaggcacaagatcagaataaactccagsagtaggagttcaaggaaaggaataggacaaccgtgggtggcaagacaggggtagggaaagataggacctctgtcccagaaatcagagtttaccattgcttctgtaaccagttactgcaaacttagtggctaaaacaacacaaatttattcttttatgattatatatctgcagaysagaagtccaaaatgggttttattgggctaaaatcaaggtgttggcagagctgcattccttctggaggctctgggggagaattgtttccttgtcttttccagttactggaagctgcctacactcacgggctcatggccccttcctccatcttcaaaaccagctgagtagcatcttccaagctcttcctaactcagattctcctgcatccctctgataaggacctttgttattacatgggatccacctggacagcccagaagaatctcatctcaagattcttaatmatagatacacagtcccttttgccatataaagtagcatatttccaggtcccagagattaggacrtggacatctcagcagggrcacattattctgcctactacacccaccaaacaaagccctcccacggtgtcctccatctcagagaatggcaccctcctccacccagctccccaaaycagaacctcatcagccatccacagcaactgatgtcctttattctctaccccacatccaatccatcttcaagttccaactattttatctcataaatacatcactaatatattctctcctcatcatctcatcataatctcagtcaccaccatctctcctggagtcttctatctgttctctcaattgttctctgctcagtctcctccgagatcatcctccacaaatacagccagagattttaaaaccaaaatctggtccatgttgcacccctgatgaaaactctttaatggcttccagatactcttaggctaaagggaaaactctatgaggcttacaaagccctgcatgatgggactctgaggatgccttcggcttcaccttctgccccttcctttcacatactaagctccacctccccactggataactgtcagttctctaaaaaggccacattttctggcacctcagggcctttgcgcacrctactctaactttttagaatgtctttggccatcccttttcctctctgcctttggacctcagttaaaggattaattcctcgggaarggattccccaactcacctccaattggactagattccactgtcaaatactcttcagagtattccctccttttctgtcataatatttaccataggtttaaattgaatgtttttgtgatcatttgtttaaaatctgtctttcctactataaaaacgtataaagttatagaactataaaaatgtttgacttttataaactctatgaaggcagggagtgggtgtatctattttactcttttacgcaccattgcaattctgatgcctaggataatataggcacttgatattcattgaataaataaaggaatgaataaaggaatgaatacaaggtggaggtgtagtataaagaagtggcttaaaagtcacgatctagagacagacatattaaactttaaatcatgatgctgtgtgatattaggcaagatatttaaactctctgaggctcagtgtcctcacctataaaatgaggatcttaatatctaccttaaaaacttgtgaggattaatgtagggacttacagtgcttgaatgtattaagggaaacagtacaggaaagccttattatgattatcatcaccactgcaaacaaatgctggctgaactccatgagtgcygtgacttccttctcctgcttctaggaygcctaatggcgagaagccaatcccatgacacttgtggatggctcagaaatgacagtagttgatttctgtcacttgtctggaatggggcttttggtcatagattctcaagatttcaaagacatcaagatcaccaaggagcacacgttaaagtccagattcccaagtttcacctccagaactcagattcattgaggctgaggtgatatttggaaatctgcctcttattaagaccctaggtgattctgatgcagagactccaaggactacactttggaaattctagtacagtcatcccttggtatccacagggtattggttccaggactactcacagataccaaaatttgcagatgctcaagtcccttatataaaatttcatagtatttgcaataacctatgcacatcctctcatatactttaaatcatctttaaattagttataatactgaatgcaatgtaaatactatgtaaattgctattatgttakagttttatttgtattgtttttattgtttattttttattgttgttttttgaatatttttgatccaaaattggttgactccatggatgtgtaaccatgaatatgaaccatggtcatggagggctgactatatayaattcctcaaattctgactcagccatcaactttttccctaactccccagacagaatttgtgcttcatcctctcttcttctgtaatattttgcccatatctcagcagtcrctcctatcatacatctatctccaaactagcttgtgagttccttcagtacagggactgtatttgatccaggtagccagaaactttctaacacagtgcctggcatgtagaaagtaaaacctcattcttgatttctgcacccataacctcctgtctctgctgtgttctcccattgcagtaactaataacatcatttacccagttgttctgataaaacaccttgaggtcatccttgacttctgtctctcacaagccacatgcaatccatcagcaagtcttgtttgccttacctacaaaaatgtccagactccaaccactactcatcacgttctgctacatgtgctggcccagtacactgcagtctctttcctatactgcctaatctctctgcttccattcttgtccctacacagactattctctacacagcagctatgatgaactttttgttttaggatgaacttttaatacacgttatactatgtctctgctgtacaaagtggtttttcattttacttagaaatgctccatttcacttagacgaggcgtggtggctcacacctgtaatcccagcactttgggaggctgaggcgggtgtatcacctgaggtcaggagtttgagaccagcctggccaacatggtgaaaagtcatctctactaaaaatacaaaaattagctgggtgtggtggtgcatgcctgcaatcccagctacttgggaggttgaggtaggagaattgcttgaacccaggaggcggaggttgcagtgggtcctgagattgcatcactgcactccagcctaggagacagagcgagactccatctcaaaaaaaaaaagaaaaatgctccagtgatgtcccatttcacttagaagaaaattcaagttcttaccrtagcccatagggcctcccttgttctacacacctaccatccacctcatctcttctttcttcccgtactgtttttcttactgttccttagatacatcaagactactcctgcctcagagccagagagctgtgtgatttggttcctcaattcatctaggtctctgagcacacccatgtcagagaaatctaaagtaactaccctctcgcatcaccctctgtaattgaaatgaacatctttcttaagcaaagaaagttattgctaaggaatgacagtgggtcaaagtgggcaagacttggccagaactatttctcctactctgttgacttcttttgggtccaggacaagtgtttctaccattctattgtgatctgtgtacatgtaatgttgagttaatgagctgctaaaaccttctagattgaaaataagtgagtcagcctcaggaccaggaggaatggtagcaatcactcttggtatcatctgtttgtttttcttgcttagcaactctgcctttgatgaccctgaatacagacatagtttaaatatttgttttcacaggacttcttgggcctactttatatgctgaagtcggagacatcataaaagttcactttaaaaataaggcasataagcccttgagcatccatcctcaaggaattaggtacagtaaattatcagaaggtaagataaatctaatatttttctgaaaagggaaaatgtctaagtctttaataccagcatcaacatttaaaactatactgttaaccacgtgttgttagggaaatctcttgcaactggtaattataaaaattgttgctgttgtaagttttgagagaagaaaaggaaaaggttttggagtcctctagacctgcatttttcactgggttcttactctttaatgtttgggagggcaagttatctaatttctctgaattctcatatgttcatcttaaaatgggaataataatacatacattgaaagatggtttaaggcgggggtcagtaaatttttccgtaaagggccagatagtaagtttgtttggctttgcaggccataagatctctgttgcaagtactcaactctgccttttagtacaaaagcagccatagacgatacctatttttttggctttggttacagatgccagaactaattaactttgttaccgtattctttccctcaagtcatacaccagagtaagaccgcctctgacaatacaattttatttacaaaaacaggaaattggttgggtttggcccatgagccactgacatagtgacatagaactagcctgatataggcttcctggcacatagatgacactcaataagtggtatttggtggtggtgagactagaagcattaatagtattagacttttggacatagtgaagtggttaagaaagtaagctttaaaggcagacaagttaaaattctagctttatcatttctgattctacgactttagcatctctgagcctcagttttctcatctataaaatggaaatgattataaccacccataagattgcctgaaatttaaatgaagtcacttaggtagagtactaaacatggttcctgggatcggataagctctctataaataatgatgacaatgatggcaataatcataaagataatagtcatgcaagttattgtatcagccgctgaatagtaagtacctgatgttaatatggttctaattatcccattatgmygatgttcagatcattgtaagcatagtagagttccatcaggcactggtataaaaaattgtatccatattataatagttgttggtatgakaacattttaaaataatttcagacttttcatggttcacatttaaatatctttccttctacatgttccagccatcatacctttgagagaataattgagtaggagagtggtttatgtgcaggttttagaactagactaataagtgcaaatcctggctcagtgacttttatgaagttatttaacctctgtgtgcctcatctttctcatctgtaaaatggtaataataatcatgtctctgtcatacaggtttgttgtcrtgaaatcttagaataatgactggcatataacagataataaatattagccatgatagtaaagataattcttcaattaaaatgtgttcaaataatttagtatttatcttaaaacttgttagtttcagaaaaaatcagaaagtaatttttaaatttattgttttctatataaactgttgtcaaactcatacccactaaggtataagtgactgataataggtcaatgaactaccttccttaggagtacttgcattagcacttaatctttggcttgaggaaaaacaatgaagcattaactgtggcactgagatttcttccaaagtgaatttggcaagactctgggtgaggtagtgggaacaggagtttctcctatgttcttaaaatcatacagtgacatagtgaacaaccacttcacctacttatgaggcttctagacgactgcatcagaagttcagcaatgtaaagaagaagggggagaaacctcaaaatatcaaaatgtcacatgcaggtttcatttcaaataagggaggaggtaagaattgtagactttggaccctacctgggctgtttgcacagtgaatgaaccttgcaacactatccctcttcctttactgtttatttgtccctacattccctacagccagcaattatttatgagcaattgcttaaaatgctcccacagctttcactggagacatgattattggcatataatattgcctctggtcctatgaatctaagaaaggtaaatacatattggtagggaaagtaaaattttaccttggaaatgagatgcaaayctagtaagcagatagtatcttttatggtaaaagacaagccttataagttgattttattatgccctctgcattaaaataaaacatctcctcctccatgtctgacactcaccctcacctatagcctccctctgtggtttgagctatttttttgggagtggggataaactaactgcatgctgagccagttacatgagaatccagattcctctatctcagaggtagatatttgagagataggtggtagggggttaagatagtattacactggcttgagaaaccacaacagaacataagagaactctggataaccctttttgacagaatggacaaacggtgatttgtaaaaatgcttgtaaggacatttcctttaataatgtatttaataagactgtcttagatcagggaataaagtatctgcaactgtaactaatcacttaaaarctgtcactaaagggtttcaatttgaggttaaattttcagaaactctgtaactagcatgcatcaaattgacttcaatgctgcacctttgagcaaagtttgttgttcagtaaaattttcaaagtcgttttggtcaattacctttaaaaagcttgtttcatggagaatttaatattattcttttcttttagttatattctcatattttaaatatatgagttgcatatgaatgtgatgtcacmaaattasttctataatatatagccatctgctggtaagccagctctccaaataaaacacrttttctgccagacattgttcgttgtatctaagtgttgccaaattctctatacaaaaatttgctcttctagatttttccaaaacattccaatgcttgacttaatgtaggtgattacattttttcacttctcatctgaatattttggccttatgtagagacttccttgagtatatgataaacacctgaaacaaactataacggctatagtttgtatatttaataaatcacaaaaatgtggatcccttttccaaagagacttgcaagtcctgtgcaatgaaatcagctctttataaaacrtcagcattgattcgcccattgcctacattatagcttctaaaagaatattctgaatctttgaatgtagtgaagcattcactaagtttattaacttaggagaggaaaagagttgttcacaaaaataagtaacaagggaagagttactgagtgagcaccctaatgagtaaccaaaaaggctctttatgtaacttcactttcccaaagcttgtatgcaccatttttcatttttaaaaaatactgagagcctttggcaagtaattagtacatcatgacaagaataaatacaatacaaagctgactatcgactgagcaggaaatgaacagaactgagtaaatataaatgaagagctacccttgtgtaaagattttattccagcaagcagctgaacaaggacttcttgtgctctagcacaatagttgtccctgtccatttctcttcttttcagtttagagcttaattttttttattttgattacaaagtcaaaatcacattcaccaaaactgcatctcacaaatgcttcctcttaatagytgtttgtattttatactttatattaatgtatgttgyaaaatcaaagatacaacaaacctgttttattctagactaaaggtaaaataatttgaagtgaaaagaataaaagcattgataaaattacaccccaattgtctcattagccatctcactcagtgtaattatagaatatatcctatgtacaagtctatatcattcactgtttcaagatgctcataattcaacttttagtagtatactaaacttaattaacatcattcatttaattatttgaaattcatcttatatgtaactgacaggcgaatgtgaaattctgagtaatttagtttgatcaattagacagacattaatttgtgtgactagagtaacctttcattatctatctcaaaatatcatgtacacaagtatatacaataattttttaagcccagtatgtgttaaaataaatctaggtgtgaaacattgattgtttacagataggttcaatattgttagaaaatcagtcaccctgctatacctagcacaagtgttatagcatcttgggcaatttttagatacttacattggttggttctcattccagattgacagtgtgttctaattgtagccctagaagaaatctagaggtcaaacctatcacaattagggcaccaacatgtaccctagagttaactaggcagagcccctcaggggcccaggccctktcttctttacatttgtactctggcatttagcacagagcctggaacctagtggatgatgatggtcatgatcatgatgatattaatcattactgaactaaactgaggggccgaggactgattagaaagtaaggactatgcattatttttcccttgctttaaaattattgattttgctgataattttgagcaggtactttgtcttacttattaccaaaaaaaaaaaaaaaaagtacttttaccaaaaaagtcttatttactttcatcgcctttggaatagatacatcactacaatggattggaagtttgtgtcctccaaaaattcacatactgaaatctaacctccagtgtgatggcattagyaggtggggcctttgggagatttttttttattatactttaagttttagggtacatgtgcacattgtgcaggttagttacatatgtatacatgtgccatgctggtgcgctgcacccactaactcgtcatctagcattaggtatatctcccaatgctatccctcccccctcctttgggagatttttaggtaatgaggatggagccctcatgatgagattagtgcccttataaaagggaccctctcactcaccctctttctaccatgtgaggatacaaggagaagatggcagtctacaacctggaagagaccctgcaccagaacccaaccatgctggcaccctgattttaaacttccagcctccagaactgtgaggaagaagtgtccgttgtttataagccactcaatccagggtactttgttaacagcaacccaaactaagaaaatcaccaatttctatcttactcacatgtgttaccagaactcragcacacttaagatctatcttatctaaagtagaacataaaggaaagaggctgtattaattgcaacatgactgggaaagaaaatacttaaccaaaatgtgaacatgtattcccacaggctatcagagcatttgttaggagccagaaattttacaaatattttccagtcttcataacccatcaaaaaggataaagttatctctagaaaaaggattatattatcttaaattataaatgaaaaaactgaggttaaagggacttcaagaaaccttcccaagttcccacagttagcaaatgatacaaccaccaagatattttcaactctgaccctgaagttcaagtgctttctcccactatctagcagaaaaaagtatcgttaaccatatagtctcacaaatactgaattacaaatggcgatgagtgctgtcaaaaaaccaacaacaaacaaacaggtatcacaatcagagatcaagaagggtgtaagatgatatttgatctgacatctgaagaatgagcacacatttacccagaaaaataaagggaggaagaacttcaaaagttatctcctaccctgcaaagaatataatgttttgcccttaggggagcttgtgaaggcagtggaaagaatatcattttctactatagaaaccccatgtgatgttttaacagttgaaacagtggaagctgcctgtccagaaacatcatttttcaactttatgaggccatgtagcaagaagcattgaagaagggctgtcatgcttgattcaaggtagatggtgcagctcatcaactagccatgctaatttcagttaatagacaagttctgacctgagagggcaactctccttatcagtcctgtttgtgctttgttaccaaagctcttttgtaatctttcacagataatgcttcctgcttattagtggagactttctccataaactttttttcttttatagactagaattatgttatmacttacaggaagtgacttaagcttttatcatttctcagctcttgacagttttattatcaaagtgaaagtacagcctagagtaaatattagttattagtgtcaagctatcctttggggtgtgttgggggaagacacaacaaagtccactttatgctagygcaaagttcacaaactcagatgcctatagtagccagataagtagttcagtgaacaaaattggtccagtaagdactgatcatcagaaagcagaaaagggcagctaagatccagatccaacaaaattctgtgcaggagtttggtcctgttgytaaccagatctccaggtttttgttttttaaagagaaaccagtaatccaaattcttatataatttctccggatgtttaatgttggcatttaatctattttaacattacgcaatcataacaacacacagccatgagctttgacttgttgacctaggctgtagcccataggaccttaaattttaggagtttaataaatattcactgagcatcttcttcatgttcatgttccatgcttctctaggtacctatggaaggcaccagagacactaagacaaatacaatccagcacttttccttgaggaactcacacttgggtgaccaaaatgtgcaggacacaaatacttatgatctagtagaagaaaatgaattagtcayataatctcacaggcatttaattacaaattgtgatgggtgctgtaaaagaaaaaaatgtgtatcagaattggagataaaggtagaagtgaacagatattcaaggtgatgtctgaatgatgagcacatatttatcaaaaggaagacgggaggaagagcactctaggcagagggaatggcatctgcaaagaccctgaggtaggacagaacttggatgtctggggaactgacaggggacccaagggacaaggagcccatagtaaacaagagaaaagacgtatgataagactgaagagagaagtagaggtaaatcatacatggacttgtggtccacgttaaggactttatgcaagaagtaaatctagatrtacctactcaacttatggtttccatgctcagaacctcatgagatacattgcacgttactgtagtacctgaatccttcattgctattgaatggatgtgccttattttccactcccacctggrgaatccaaacatatgctgatgccatgcaaactcatgcaaagcgttttgagtggaatagattttccacagttgggatggggaaaggtacaattaaagaagggaagctgacattgctgtaatgtaaaaaaatattttatatggaaatttagcatctcagactttggcttcagaacataaggaacmagatttaccctttttctcaacaactagacaggcagacaaaacatataaaacagaagttttcagacatcgaatgacagacaactcaagacagtaaaagaagwgtaacaaaccagatgtgccctatgagcacctaarcttactgcttgaagagtgtttccagggaacagcacaagcagggagaacccagacagagtctctatgggttgaggaaatagagtttggacttcggagaagctcaaatggctagaatttgtgattttagggcagagtcctgcagaggacagtataatcacagagaaagagctctagagaatctacagagaggttttgtcaagttgaatactgatctgcacatacatgtgaggaaagtactgagggtaagaaaaatgtcacttgaaaggaacaggtggaacagtccctggaccttactcagggccggtaatcgtttatgttcctaccatcaaacatagaaagacctcctaataaatgagcactggatagaattgtcagaaggatttagaaacagtgggtggataaaattagactacaggctgctgaggaggcaacagaataaaaaacaagatttgatttcaagtatcttaactgtgaataaaactcaatactagttaacaagaatgcaacaaacaacaatgtaaattcacaatgttaataaaaataaacaagcattagaagaagcagaaagagatgactcataaccaagaaaaaactcaacagattgagaagtgaaagagagaatagaagcagcaggcagagacagtaagacagctatcataaatcttctcaatatgttccagaaagcagagaaaagcatgagcatgatgaagatagagaatataaatatgcatacacagaacttctgtagatgaatacaattgttgacatgaaaagtaaaaaataaagcatagaaaagaaaggtaaaaaataaaggataaaaaaatatattataaactgaaggataccactaatacaacaaacactggatgaaattaatagcacattagacactgtgaaaggaaatagtagaaaatattaatacattgcaatagaaactgcaaagtgaaatacagagattaaaaaggctgaagaaagtgaacagagcatcagtgaactgtgggaccatatcaagtgatctaacatatgtgtaattggatcccagaagtagcaggaacagaaaaagtatttgaagaaatratgactgaaaaattcccaaatgtaatgtaaactacaaaccaacagattcaagatgtttgacaaaactaagaagaaggaacatgaagaaaaccacaccaagccacatcactatcaagttgctggaaaccagtgataaagagaaaatattggaagcagtgagagataaaaacacacaccacatacaggggaacaaaaccaagaaatgatagcagacttatcgttagaaactatgcacaccagaagacaattagggacatctttaaagtgttgggagggtagaagataggggaatctgtctgtttagtattctataccaagtcaaaaagtcttttttaaatgaaggcaaaataaagagtgttttagacatacaaatgcagaaagaatttctcactaacagagcagaaaaaaatgttaaaggaactcctttagatagaagaaatattatgtcagagagacatttagattcataagaargaatgaaaagttccagaagttgataaatatagagaaattttttcctcrttttaatctattaaaaaggcaattgattatctaaatgttaaagcaaaatagtaacaatttattgtggggtatattatgtatatataaataaaatgtatgacaatagcacaaaggctgggagggaagaaatggaaatatattattgcaaggttcttacaagtgaaatagtataatattatttgaaggaagtttgtgacaagttaaaaatgtactatatattgtaaacggaagggcaccactaagaaaacaaagctaagaaggcaacaatggagattaaacatcactaactatactcaatccaaaagaaaacagaaaggaaggggaaaaggaataaagaccagatagacaaatagaaaataaatataaagatggcagttttaaattcaaccatatcatcaattacattaaaagtaaatggaaagaacactacaattaagaaacaaataagattgaataaaaaagcaatgctaaactgtatgcagaatttaagaaatccactttaatgagagagacaaagataggtaaaaaataaaggatagraaattatataccataccagctaacactaatccaacacaaaagggtgtgtaatgatgattccattgatatgacattacagaaaagccaaattatagtgaaataaagcagattagtggttgtctgggcccrgagggcattggctacaaatggcatgaagaaatgttttggaatgatggaactcttctctatcttgattggaactatagctataagactgggtaattgttttaatcaaagctcagcaaatattatacttaaaagtggtaaatgttattatatgcaaattatacctcaatgaggataatgaaaggaagaaagagagggaaggagggtggggaatagggaaggaagaagacaaagaaaggaagaaaggagaaaagaaaagaaactaggaaaggaaaaagaaaagaaagggaagagaaaggaaggggagggraaggattaatcatttcagttttcaaaaagtgtagttgcttcagtaagagkagttttattggccttttaccccatcatgtaaaacatttcaggcttttttycccagatccttgttgtctgcctacatccacactgatgttctcaccttcttctcktaaagaatttatcaagttattgtaccaaacaaaaataactgcatcccaaagagaaattctgtcaccagctgatgatagggaatctttcacctaattaaatgaggaattcctcaggcagaggaaactgttcattccacttggctmtctatggcactcacctctccccttcctgacctcacttgctccattttattattgaaaacctcacccaaccctctacacttcttttaatattgagtatctcagttccttctcttcaataaagaagaccaatttcttcatcctctccctctcctatcagtagggaaagtccaatatacatggaggtgttaatgatgtgtctttgggtgcacaaagtacaaagtaagacatctaagtttcaggggatggacacrtttcatattcatacagacaaccagcctgcataggggagttagacgctgtggctcgggggaaaaaattgagataatcagatggctaagatgaaataaagagataaaacaaagctgaggatcacagcagttggaaagaagatctgaaatagcaaaacaaaataatacataaacagctctgactatcctcccatctcatgttaataggctaagtatgtcttattaaasaccacaaagaagatatcacccattcttatattctgagatggtttactaatcaaaggcgattcaattctctgattatatttaaataataattgttcaggtaccctggaaaattaacttgctaaactttaatttacaaataacatttgttattcttaagatcaccatgttatcaaagcctttgtaagtacatgagcatagaaatgggcatatgtgaatctttccaaataataaaagttcactattgaaggacatatgcatctccagagarctcatcttagctatcmccagatktgagagtggtgaaaacgcaatcctcagaaactgcccacatgtcttgatggctgttactcctccaggtgcttcttaccttgaccacacattccctgcrgagaagatggacgacgctgtggctccaggccgagaatacacctatgaatggagtatcagtgaggacagtggacccacccatgatgaccctccatgcctcacacacatctattactcccatgaaaatctgatcgaggatttcaactckgggctgattggscccctgcttatctgtaaaaaaggtaagaacacccccaccaaaagattcaacaactaaaygttggaatggtcaggagttctgtcatgggacaaagcttgggagcatcttggtaacttcttgtacatcaagcagaggaagacggcacggagaccagatcattgtttgacaagagaaaaaaacacctgctatttcagggtgtggatccacctctgtttcttctcattcctccttcatctcagtccttaaggttctcccaggcaaattcctgtttgagagtatgttctgatgtcatgcttgtatgatctgtaacatttacctcaaggccaaagtcttttagaaagtatacagtagcctatactctgctgaaagagctcttggaaagaactttggctaacatgtttgacatatctgaggtttgggctggtaatttgctctataaacacgtgaaatgccagcttcctttcttacaaacaagttgaaaactttgggtggtaggtttcaaacacactcaagtgactttacaagaacttttattggctgggcttcttaggagcaagcttggattttcattttatcccatgagaatccagcccatctttcattaaaacaaacaaccacagtgagccacagcatgggaaataacgtgatggactcaccatctgcctatacayacacgctcagrccatacctacatacatgcccaatgtatttactcattatacaaagactttttttccatttcctggtatatataagatactgtgatggtactgaaaaaaaccktaaaacttacaaaagactcttcttgcattttaccatcagcagcatgtttttctcatagtgagaatggattaatgctgatacttccacccaattatctaatgccccctttcatatacaaataagatgacagcattaaacttggggcatgatgcttttaccaactgagctaacgtatctatatactcttctattgagactgggggaaatggatacttgtacagagtcttgagagtcaccaaatgttttcttcccaagctggatgaaataaagcctgttccccaaagcaagaaggtatcaaagaagacagtgtggcaccagattttaaataaccctagaaccattattacttgataaatatgctattttaaaaaataagaatttcttcaagttgaaatcattatggttgattgcttgccctaaactctttgctatccaggaaagctaatgagcrtcttctatctgcagtgctactgaaaacatgtctttcctttcatagggaccctaactgagggtgggacacagaagacgtttgacaagcaaatcgtgctactatttgctgtgtttgatgaaagcaagagctggagccagtcatcatccctaatgtacacagtcaatggatatgtgaatgggacaatgccaggtaacaygagggctgtgtaccattaaacaacagtaaaatcattagtaatttttcggtcctgttttcttcaaagcactagagaagttgaccatactcactgttttscaactccctatcaagaaggaaatattttctctttttttttttaaacaggaaatagaagagacaaattagaagctagagaagaaatgtgcagccttgttaggtatagtgacctgagtaggtttcaccttggcctgtactttgaataagaccttaaggtatcagctcagccactctctccgagttctgcagttcctctatatgatgaccatggcttcttcaaggacaagccctagcaggaaggatcagcaggaagattgcagtaaagatgaacagattaggagtaatcctcaacacacaaaaaaaaccagcatttcaaaaggtgacagaagagtaatattcartggcatctagaatattttctctttccatttgcatttgggcacttatgagaaggcaaaatcatagcaatcgttaagagaaaaaataactrattcccacttagaccacatctcttctatttctctctggtagaactgacctacaactaaagatccagggtatatgatactagcctgagggaaaaacattaaaaaattaaaatgccactttactaaataaaccatatttcaaaacactaaacttcttagaggttattctctaatgccatctgaaaatcacaaatagcttcacttactaaaacacaaatattgttaagagttgagatctgggtagtgtttttaaattgtattctatttcatttgactacattttccacttggttttctgaaaatatactcatatgactctcaatgttgatcccaagttccaatactaggagcttgtaaaaactggggcttagttaactgacctcgaccttagataatctgagttcagacttcagattatcagactaccttctgtggccctggataaattagttgtctcaatgtgcttacttacaaaagtggactaaccatttatcctaacatctatttcctggcagagtgaacaatctgtataagtatatggatgccaagaaaagcaaaaccatatgcacaaaaataaaaataaattgatctgagcttagagtttacgaatttatagttcccaaaagaataaytgggggtaaatgggacaaggtagggaaagaccatcagtagaaactaagaatagtaaacatttgtaaaaaccctctgccttataaagcagaataaattgaatacatatgataaatgctaacacagatatgttaattgctgaactcaatataagcatttctttggcatggataaacgcttccaccaaagcctcctagtgatgcaaggaatcctggctttgttgcaatggtctcctaaaaaaaacaagcctttgtgtgggtaaggaactgattctcagscccattatctagtatctagtgattatgtatctgagatgtaaaacagaaacctaaaagccaaggatggagtctccccacagagcaaatgagcattttcccagtgactgtaggagcaaagaaggagcaaaactaagtttttatattcagttatcactactccttccatgaaaagctcccaatggctcagcataatgaggacttgtacactgcattttaaggagagtgtgtaaccccaaagtgatttcgttgacttgtcattaaaacaatcaaaaagtaagtaaaaataacaattgaaaatcctcayatcatcttcacatcttcttcccttaggcagagcttcgaccactasagctagagagctgagaggattaagtgcttgaactcagccctattggcggttctggtgatttgactccctccagctgagatcagactggggtgaccaaacattccattttgccgtggactttttaccagttctaatagttaaagtcctgaatcttgggaaacccctcagaccagaamagtcggttaccttcttggttcccttcttggcctaatcctttagcaatccctgtgtttytgagttcacatccaccatctctaagctctgttgttacctgtataatgccatttatcacaatgagttrtcactgcttgtttgctggtcactcagatgtctgcttttgcagggcacaaactacaactggagtgtctgttccctcaaagctttatacaatgcctgacacacagcaggtgctcaatacacttggtgagtgaatgtttgatcacagagtacttgactgaatgcttattttggcctgtgtctctccctctttctcagatataacagtttgtgyccatgaccacatcagctggcatctgctgggaatgagctcggggccagaattattctccattcatttcaacggccaggtcctggagcagaaccatcataaggtctcagccatcacccttgtcagtgctacatccactaccgcaaatatgactgtgggcccagagggaaagtggatcatatcttctctcaccccaaaacatttgcaaggcaagaaactctcctgacagtcttgcttctcaatgcagaatcctttcttcccatgcactaactccctctttctccyttgccctttcaagccacctgcaccgcagacaaactttcctcrgttcctaacaaccaaacttagatattttgctcttagatttataacttgctctttggggatggagaaagcgaaggaattggcaaaggttttttttttttttttttttttttttttaattaagcaaaagctaaagagatctctaacttcctcgaaagaagaaaagaggaagaaaacaaatgcatacatagagatattctttcttcgggttacttcatatgcaaaaaagacctagatgctagcacaagacaaactgcaaatttacagaagcactaagttgtagaaagtgtaaaagtttagcatgaaaacattaacctttacagtgggatgaacacaaagtctagcacagagaggaactcaatgaatgtgtgttgaatggatcatacatggcatatactgaggggtgagctccaaagaacactggggaattcaggtgggaaaataaatcaacccacgttatgtggtatcgtgtaaacaaaataactgattgttctactacacatttttgctttaaaactgttgagattagagttcatataaatggagactaaaatctaaggaaatgatatcacaataggaaatcattttgttaccaaaataatgtataagcaacacatataaggaagagatacttcatgagatcatttctgtttcttttcacacgagtagtcaaaattatatttgaagtaataaaaccatcatgatatccgtggaagatagagttcccaataatattaaaacaacaatgtaacttttgtttctttgttgaggataagtgcattatgtattgttattaatatttaatttttaacaacaattttattaggtactggtgctacttcattttatagattaagggacagatgacagaaaaatgagaatttaacaagacttaattcataaggtcttaagaagttaaaaattattagaaatttgcctgctcaagaagaaataaagggaatctttccaaattttttccctaacccctcctccttttcccccttttaaaattcttgccttttctggatgccacttaaagagttccaaactaaaatgttcaaaaattgcctgagcattactttcactcttattatattaatataaaccttccacaagttgatttaaaggatatgcatttcaatcaaccataatttcttctcttgagttatttcattgtctttctgtcctaactcagctgggatgcaggcttacattgacattaaaaactgcccaaagaaaaccrsgaatcttaagwaaataactcgtgagcagaggcggcacatgaagaggtgggaatacttcattgctgcagaggaagtcatttgggactatgcacctgtaataccagcgaatatggacaagtgagttgttggggttcataccactgggcaaaggttcaagacacattccatagggtcctagatgtttggggtgaaatgtaagttcacagctctcaaggggacacatgtattggtttctattcaagtctttttgtaaaaattaatcttgaattacccccaaatcaccaaagaaattcagcctaataataataaaaatgacaacagcagctaccttttgttgaatgtttgccattgccaagcactgtattgtccctttctgagagcttcgcttcaactctacaaactagatactgctcttatttctttttatagatgaggaaatgggtctgagagattaagagatttggaaattcaaatagctcttaaacccttgaaaagttactcaaattcactcataataacagaaatgcaaattaaacttcatgggaatactacttttatctatcacattcacaagtccagatgacatcatctgttgacaaggctgtgagaaaaaagaactatcatatattgttcgtggaagattaaattggtaaaaggattctgaagaataacttggcaatatgtatcaaaattctaaatgcatataccctttgactcagctatctcactctggaaatctaactatacagatacacttgttcacaggtgaaatgatgtatgtacaacatattcactgttgcaacgttagtagtagtaagactggaaacaacycaaaatgtccatcagtagaaaactagtttaataaattaggatacattcatacaatggaatactaagcatcaaaaaaagaggatgcaaacactctgtatgtactaatacaaaaagttctccaagataygttattaaattaaaaagctgggatgtagtatagcgtgtatayatagctgccttttgttaaaggagtgaaagggataagaatatttatattttcttatttgtaagacataaaggtattctggaattacacgcatgaaattaatatatggctacctagaaaattcagggagggtagggaggtcattttgagagtcatcagagaaaagtgagagttttcactgtaataaaaattatgtgaatgtattttctattaaaaacaattaaactaggaaaaagaacaaaaaaaatttggccaagattatagaattgttgacagaactgagataggaatccaggagtgtttggcaacagtcagtgctttccactgggaaaaataaattcataaaatgatattccatcttaaaagattgctgggttaaatgatatttctgactttaggtcttggaggaactgccatactgtcttccacaatggctgaattaatttacattccaccaagagtgtataagtgttcctttctctccatgaccttgccagcatctcttctttcttgacttttcaatcatcgccattctgactggcatgagagggcatctcattgcgtttttctttctttttttgagacggagtctcgctstgtcgcccargctggagtgcartggcgcaatctctgctcactgcaagctccgcctcccrggytcacgccattctcctgcctcagcctcccgagtagctgagactacaggggcccgccaacacaaatacaaaatacaaaaaatataattttttgtatttttagtagagatggggtttcaccgtgttagccaggatggtctcgatctcctgacctcgtgatttgcccgcctcggcctcccaaagtgctgagagtacaggcgtgagccaccgcgcccggcctcattgtggttttgatttgcatttctctcatgawcactgatgttgagctttttaaaatgtgctttttggccgcatgtagttgcttttgcaaactaaggtaataaagagggcaggggaaaagtggttcatgtttctgctcccaaagtatttatcccagtagctacaaaagatgggtgaaggaggttgcttttcagtcagctcagagaattggctagatggtggaagagatagcccaatagcacagaactatgattaacaatgctagtaaatgtttcctggggttggaagttgcttttagggattaagaaatacctttaaaaccaaaaaggctatcatagaataagtgataggacagactttagaaaaattcctagtatcttttcagccagtataggccttttcccagagatatcaaatgtctgctgtagcaataagaatgacaggaagatctaagtagctgcttctaaccagttacctatgacttttatcagtgatgcaggagacaaatcagaagtttccagttttccaactagacagaaaacataaggactttgcaaactacactaagaaatttttagagaactagtatgttagctaatctaagagcagaatgtttaagcacaagggtttccccatcctaccgagatctctatttgagaaagtggtttaatttttttttacttcactttaagaaaatacaggtctcagcatttggataatttctcaaaccaaattggaaaacattataagaaagttatgtacacacagtacgaagatgagtccttcaccaaacatacagtgaatcccaataygaargaagatgggattttgggtcctattatcagagcccaggtcagagacacactcaaagtaagtaacacaaatacagaatcatgggagaaattacatagtaaaatattatggagtacctggttattttttaattttaaaagaaaaagatgctcatataattttaaattcaaatgcaacttttagtttttatttagtatttgtatttatttacagcttrctcagtaatacaaaggatctgagacagtttctcaagttataaaggcataaaacaaggagtctatgtaattgggatagaataygsggacaaagaaaataaagccacagataagtagataccatgtgaccctgtaaggctgtcttcaaattttgtcctaagctttatggcagtcagtgtaaaaaaggaaatatgtcagggtgaagtttacatcatctacaaaaagaaagcaccatttatcctgatgttaagatctaagaggaacttctttaatgagttctacaaaagagagtgctgagtgatacagtagatggcatccttgataaaattcttataaccagcataatagattaaaagttgcataaaataatagattaaaagttgcattaaaatatttctcattatagctaagatataacagtaaacacaattgaatagaaacaatttttactcattttttaatgtagtctaggtatgcagctctctaatggttggactctgatgaaggtaaactccatgtatcaagagcacggagttttcctcagacaattctccttaaatgtcatgtcacttcaccaagatagataagaattggacagcagagaattaaaggttgcaatctttgacaaaatcctagagtgtagwtaatctacagacaaaggatgatccaaaggctttgacaatcaaccaaatagaagataggattaaggttctcttttgcagattaaagagcctaactaggactcctgtgtgttttatgcacctgacaaggtctattctgttcatttaaaatagccaaaggacaaaagcagttttttttctccatgcctctttcccttcttccatttctgatcccttttatgtgctctcagcaagtgtagacataccttattaaaagttcaggatctggctatttgtctgtgcctctcaagcaagtagcttttcccccycaccaagggtcttactctgtcacccaggctggagtgcagtggtgygatcatggctcactgcaacctccacttcctgggctcaggcgattctcgcayctcagcctctcaagtagctgggactacaggcacacgccccaaygcctggctaatttttgtatttttttgtagagatgaggtttcaccatgttgcccaggctggtcttgaactcctgagctcaagtgatccacstgcttcakcctcccaaagtgctggggttacaggtttgagccactgaacctagctgagaagatgacttcaaagacagtgtcctaaaaaatctaccgggcaggggaaggggatcatggtctagagatgagaagcagattcaaaatgagatgtggcccaagctgaaaagagaagggcaggggaaggaggacttgcttggagagagtgatactgtgaggaaaacgtcacttctcctaacctatcctctaaagtcagacttctctttccattttccaccttaatgtgtgagtgaaacactctctccaatgctcctgccaagtgatgaggggaggttactgctcagataaacagatctaattttccyactgtgtgtacacatgtatacacacacaccatccaaaaggtgaatatgcaaagctagtatcttatattatttgtcatgatcaaccttaaatcctagaataaatttgatttaactttgtagatcgtgttcaaaaatatggccagccgcccctatagcatttaccctcatggagtgaccttctcgccttatgaagatgaagtcaaytcttctttcacctcaggtttgaatctttcacttctactgaatccaactagtaacttctgagaggctgccacatttttctgctattctccttgcccggtggtgtcactactgcagtcaggtagtatacatgtaggagtatcctaaaaatcacagccaaacccttctcacttcaggagttttgtctcttagtggtaacaaaatatggtgtcttttattagtgtcatagtggcctctagtggagcattatctaatggctacatgttatccaggttccaagtagaatatttaaagaattcaattgaacaatgagaacatttagacacaggatggggaacatcacacacyggggcctgtcggggggggggggtggggggcggggggagggatagcattaggagatatacctaatgttaatgacaagttaatgggtgcagcacaccaacatgrcacatgtatacatatgtaacaaacctgcaygttgtgcacatgtaccctaraacttaaagtataatttaaaaaaaataaaaataaaagaattccttttgcaatattaattggttccagcgaaagcttatttatttatttattatcatgaaataactttgcaaatgaaaacaattttgaatatattttctttcaggcaggaacaacaccatgatcagagcagttcaaccaggggaaacctatacttataagtggaacatcttagagtttgatgaacccacagaaaatgatgcccagtgcttaacaagaccatactacagtgacgtggacatcatgaragacatcgcctctgggctaataggactacttctaatctgtaagagcagatccctggacaggyraggaatacaggtattttgtccttgaagtaacctttcagaaattctgagaatttcttctggctagaacatgttaggtctcctggctaaataatggggcatttccttcaagagaacagtaattgtcaagtagtcctttttagcaccagtgtgataacatttattcttttttttttttgtcttgtctatttttatcagtaccatcactgccgaaggcaagtctagagtgtgataacatattttgtcttagtttcaaattccaggtctgttggtatyggatgtgttgagcaagttgattagcctttcctaatttcttccttttatcaaatgggtaataaccctcctaaaaatgttacaggtctgtttgggggttcagtgagataccatctggtaaaagtataaagctctttaccagtctttgctatttttagagacctgcaatagggagacagaggagagattctctgaaagcaaccaaatttagagacatagttcctagtgaaattggacccagattatggcccatctctgttgagactaaagtatacagaagaatgtgaacaaagatactgaatttctgagtttgtcttcattgaagaattgtagtctcatattattaaactaaaattcccaattatgctaaactgtaaccaaagaggtcttatctcaaggcatacaaaataaacatatgcctagaaaaagcagaaatgaatttctggacatatggaagatcctgatttattgagctaggaaaggaaacaggtagtagaagcataaggcttttctattgcaaccttctctttcatcctttgcacttattcagagcatattcagtcaatcattcatgttgaaaggtgtgcaattacagagatagacagactttcagctgccatagcgaaatgagatttttcttttgggatttgttttttttttttttttcttttgagacagagtctcactctgtcwcccaggctggagagcagtggcaccattttagatcactgcaacctctgcctcctgggttcaagtgattctcctgcctcagtctcttgagtagctgggattacaggcgcccrccaccacccccatgtaatttttgtattttttagtagagacagggtttcaccatkttgkctaggctggtctygaactcctgacctaaggtgttccacctgcctcagcctcccaaagtgctggtattacaggtgtgagccactstgcccggctcttttgggatattttaatctctgaattttcttatctgttctgtttgcttttgcatattacctttagctctaacaagtgctgtgtacacaatggactctcataaatgcctgaattatatggcttcagtagttccaagaactatgtcactttggtttctgagaactcagtggtgtagataatttgctgcaatgttaatgactgaatacagcacttttttttcttttttttttactcttaagttcaggggtacttatgtgcaggatgtgcaggtttgttacataggtaaacatgtgtcatggaggtctgttgtacttactacttcatcacccaggtattaagcctagtatccaytagttattttttctgatcctctccctctttccaccctccatcctctgataggccccagtatgtattgttcccttctatgtgtccatgtgttctcataatttagctttcacttgtaagtgaaaacatgcagtatgtggttttctgttcttgcgttaacttgcttagaataatggcctccagctccatccatgtccctgcaaaggacataatcttgttctttttgatggtcacatagtattctatggtgtwtatgtaccatattttcttcatccagtctgtcattgatgggcatttgggttgatttcatgtctttgctattgtgaagagtgcgaaaatgaacatacgcatgcatgtgtctttataacagaatgatttatattcctttgggtacataccaagtaatggaattgctgggttcaaaggtatttctgactttaggtctttgaggactcaccatggtatcttccacaatggttgaactaatttacactcccaccaagagtgtataagtgttcctttttctccacaaccttgccaacatctgttagtttttgactttttaataatagccattcttattggtgcgagatggtatctcattgtggttttgatttgcatttctctaatgatcagtgatgttgagcgtttttttcatatgctctttggccacatgtgtgtcttcttttgaaaagtgtctgttcctgtccttggcctactttttaatggggctgtttgtttttttcttgtaaatttaagttccttataaatgctcsatattagacctttgccagatgcatagtttgcaaaaattttctcccattctgaatgttgtctgtttactctcttgatagtttcttttgctgtgcaggagctctttatttcaattaaatcccatttgacaatttttgcttttgttgctattgcttttggcatgttcgtcatgaaagctttgcccatccctatgtcccaaataatattgcctaggttgtcttccagggtttttgtagtttggggttttacgtttaagtgtgttgttgttgttttttgtttgtttgtttctgttatttttgagatggagtctcgttctgttgcccaggctggagtgcagtggyaygatctcagctcactgcaacctctgcctcccatgttcaggtgattctcctgcctcggcccctcggcctcccgagtagctgggattacaggcataagccacgatgcctggctaattttcttttcttttcttttcttttcttttttttttttttttagtagagacgggttttgccatgttgaccagactggtcttcaactcctgacctcaggtgatccacccgccttggcctcccaaagtgctggtattacaggcgtgagccaccgcgccaggcctacatttaagtctttaatccatcttgagttaatttttgtatatgatgtawgaaaggggtccagtttcaattttctgcctacggctagccagttttcccagaaccatttatggaatagagaatcctttccctattgcttgcttttgtcacagatcagatagttgtaggtgcgcagccttatttctgagttctctattctgttccattggtctatgcgtctgttcttgtaccagtactatactgttttktcctccagagggcagcagacatcgaacagcaggctgtgtttgctgtgtttgatgagaacaaaagctggtmccttgaggacaacatcaacaagttttgtgaaaatcctgatgargtgaaacgtgatgaccccaagttttatgaatcaaacatcatgagcagtaagtcagagtactatttttgttcatcagtttttcattcctgtggttgaaatatgactgtgcctagagtcagagacatggattaaaatctactcgctaaggggcacctccaatcctcacttccagtccaaagacttggtgatgaaatccgtgggtgacatcatagcaacatttttaagcaagaggtcaaaggctcacatccttagaaatgcgtttgatcttctattccaagcgtgtgtgtgtgtgtgtgtgtgtgtgtgkacacagacatactctgcgtggtgaggaaaagggtgagrgagtaggactaatggaaggtgttatagtccatgtcaatagtatcctagactgagttcagggtgaatatatggcyaggacagaaasaaggcaagtaatccaaagatggattgacacatcaaagtagagcaaaatgagtatagggacccaagagtcttggaaaggcatgcatgaagacrtttcaagtgatcagtaagatkttcagaacaaaaggaattccctgaatgagggttccggcatttgctgcagttctaaagttcagtggccaaaagcactgccatggcagtctgagagaaatgtcactgagccagctggaagcaaacttctccacaacagccagggtccccctactgatcctcagagtctagagtcatggtaatcaccttctctagtaggtaatcacacatgtgaggatgatttctgcatgttctgttcatatagcttcagatgacygacagctagggattatcagagctgacaggtgccaggtcaaataattcaaacagaaaattactctcagctttctttgcataacttccttttggcagtgaatctatcatagttctagaccagtgctgtccaatagaaactacgtatgagctayatgcgtaatttaaaattttctgatagcaacattaaaaagtaaagagaaataggtgacattaattttagtaatatgttttacttaactcagtatatcctgaatattatcatttcaacatgtaaccaatataaaaattaatgagacttactttattactaagtctttgaaattcaatgtatattttatactcacagcatatctcagtccagtctacccatatttcaagtgctcgataaccacttgtagccagtggctaccatattgaacaatgcagttatagaccatttagaaaaacatctagaatgaggtataaactaataatacatcatgtaaattattaaagtcacttaagtgatttaagtaggtatttaaatatttgttaatgccagtcattatactggtactaaggctaagagtggtaatsgaggtagacatgagcccygcccttgtagaaatcatacctttggttttttactatgcttagtacataagtaaataaaaatattgcctacagcagtgtcccttttaacaataatgaaatgtatgaactggatactcaaatggaaactgtgaatactatgtagattataagacagcaataaaaactataaaatatgctaaatgggctttatttttagggacattacttcttacccaatgactaatatatcaaaaagatgaatttcttatattatgcttttcctccaagtggaattattagaatatctttaaaggcagagaatggagcacaaaatatttactatacatttgaygaatgactaaatcaatgtaaatggaaggctttatctttttcctgagatttctcctttggctaatttaggagaataatctctcatttgaaaattctgagtttgatcttctagtcacatgttagactagataaagcttatcttggataatcactgctttgacacaaccaaattaacatggagacatttatcttaggtataattagacacatgcccttttgttggcatagacttggaattttaacagattttacactttcagctatcaatggctatgtgcctgagagcataactactcttggattctgctttgatgacactgtccagtggcacttcygtagtgtggggacccagaatgaaattttgaccatccacttcactgggcactcattcatctatggaaagaggcatgaggacaccttgacmctcttccccatgcgtggagaatctgtgacggtcacaatggataatgttggtgagtaagagtctggacactcacagaggaagcttgctttgaatttctggtctataaaggtctgctgcaactctccaggctaccagtgctcctctatgtatctccctgaccccctgcaggcttttctttcaatgtttctcatgatttctctttgagaaattaatgacttaaatggatccagttctttagtgtgggttatatttttccttctctgggcaaagtaggaagtaaaaatatacaacagcagaaaaataaggcataactctgaggaagaagcataaatattttggccacaaaagagcatttcttttatcaaaatgccctattcggttttttgcaacagtcatcttcaatcatcaggtacagtgccttaaaggctgcttcagcaacagctttggagtttgtcagactggaatgcaagtcctgatctgccaatcgattgctgtgtaaccttacacaagttacttggccacactgagccacaagtcatttatctggaaaacagtgtaatcacatctcacagagttactttgaccattaaaatagtaatatgygccaagtgcctagcactcagtagacaccaacaatggtaactattggagactcaccaagaaatctttratgttccagcaatgcatgccatttcagagattcaaaattgtcctcgtgaattattacttagaaacatctaaatgtctcttatttgtggggatagagctcatcaccatccctttaattctaagacaagatgtgctgttaggatatttatgatattaaaagtccattttattcttgattcatccctttcttaatatattttaaaatagtgagcaactatctgtgctgaaagaccttttttcccctctaatctccactaagcaacacttttgttttttattctgttaagcgagatgaacgcactggtcatgtgcttagagtcacagcaatgtcaaattgctttagaaaaacaaaagtttactaaatatttcattctcatttttctctccttrtgttattttgacccagtaatcaatagktcacagacaagcagtggtccacagcccatacttgaatattcctgacgaaagtttattagaaattacctgccacaatggattattgtgttttcatgtcttttcccagacttccagatctctcttctgtctgtctctcttctgtaggaacttggatgttaacttccatgaattctagtccaagaagcaaaaagctgaggctgaaattcagggatgttaaatgtatcccagatgatgatgaagactcatatgagatttttgaacctccagaatctacagtcatggctacacggaaaatgcatgatcgtttagaacctgaagatgaagagagtgatgctgactatgattaccagaacagactggctgcagcattaggaatyaggtcattcygaaactcatcattgaaycaggaagaagaagagttcaatcttactgccctagctctggagaatggcactgarttcgtttcttcraacacagatataattgttggttcaaattattcttccccaagtaatattagtaagttcactgtcaataaccttgcagaacctcagaaagccccttctcacyaacaagccaccacagctggttccycactgagacacctcattggcaagamctcagttctcaattcttccacagcagagcattccagcccatattctgaagaccctatagaggatcctctacagccagatgtcacagggatacgtctactttcacttggtgctggagaattcaraagtcaagaacatgctaagcrtaagggacccaaggtagaaagagatcaagcagcaaagcacaggttctcctggatgaaattactagcacataaagttgggagacacctaagccaagacactggttctccttccggaatgaggccctgggaggaccttcctagccaagacactggttctccttccagaatgaggccctggraggaccctcctagtgatctgttactcttaaaacaaagtaactcatctaagattttggttgggagatggcatttggcttctgagaaaggtagctatgaaataatccaagatactgatgaagacacagctgttarcaattggctgatcagcccccagaatgcctcacgtgcttggggagaaagcacccctcttgccaacaagcctggaaagcagagtggccacccaaagtttcctagagttagacataaatctctacaagtaagacaggatggaggaaagagtagactgaagaaaagccagtttctcattaagacacgaaaaaagaaaaaagagaagcacacacaccatgctcctttatctccgaggacctttcaccctctaagaagtgaagcctacaacacattttcagaaagaagacttaagcattcgttggtgcttcataaatccaatgaaacatctcttcccacagacctcaatcagacrttgccctctatggattttggctggatagcctcacttcctgaccataatcagaattcctcaaatgacactggtcaggcaagctgtcctccaggtctttatcagacagtgcccccagaggaacactatcaaacattccccattcaagaccctgatcaaatgcactctacttcagaccccagtcasagatcctcttctccagagctcagtgaaatgcttgagtatgacygaagtcacaagtccttccccacagatataagtcaaatgtccccttcctcagaacatgaagtctggcagacagtcatctctccagacctcagccaggtgacyctctctccagaactcagccagacaaacctctctccagacctcagccacacgactctctctccagaactcattcagagaaacctttccccagccctcggtcagatgcccatttctccagacctcagccatacaaccctttctccagacctcagccatacaaccctttctttagacctcagccagacaaacctctctccagaactcagtcagacaaacctttcyccagccctcggtcagatgcccctttctccagacctcagccatacaaccmtttctctagacttcagccagacaaacctctctccagaactcagccatatgactctctctccagaactcagtcagacaaacctttccccagccctcggtcagatgcccatttctccagacctcagccrtacaaccctttctctagacttcagccagacaaacctctctccagaactcagtcaaacaaacctttccccagccctcggtcagatgcccctttctccagaccccagccatacaacyctttctctagacctcagccagacaaacctctctccagaactcagtcagacaaacctttccccagacctcagtgagatgcccctctttgcagatctcagtcaaattccccttaccccagacctcgaccagatgacactttctccagaccttggtgagacagatctttccccaaactttggtcagatgtccctttccccagacctcagccaggtgactctctctccagacatcagtgacaccacccttctcccggatctcagccagatatcacctcctccagaccttgatcagatattctacccttctgaatctagtcagtcattgcttcttcaagaatttaatgagtcttttccttatccagaccttggtcagatgccatctccttcatctcctactctcaatgatacttttctatcaaaggaatttaatccactggttatagtgggcctcagtaaagatggtacagattacattgagatcattccaaaggaagmggtccagagcagtgaagatgactatgctgaaattgattatgtgccctatgatgacccctacaaaactgatgttaggacaaacatcaactcctccagagatcctgacaacattgcagcatggtacctccgcagcaacaatggaaacagaagaaattattacattgctgctgaagaaatatcctgggattattcagaatttgtacaaaggtttggccagttttctccttttttattctcatttttccattactgctgmaaaaagtagctactacaattcagggggataattgtgggcaaattatactaagaacagtgtggttcccctattgcaagttggcctgttctttttcctttgtcaattccaagattgcttctttaccttagatgacccctggacaatataagaacaatcactgtgagaactctataatattctgtaattaagcatttttctgtgtcctctcctcttactacccatgtttctactgactcttattgctccaggcagagcccaacctatccatagctatatgctaatcaatatgatttaattgaagttagcctcaaatccaaactcaaatatgatgtagaaatctcctttttgcatttacttgtttagatcagaatttctaagagatccaaatcccttttttaaaagaatatttacaattcagttttgcttasgggtagaaagccatgttgaactgggctctttgttctgggatgaagatacagaaagagaagagagaggaggaaaggagcaaggcttagtcaactacaaattctcagggatatagcatgatgactgtgcatcagctgtctagatatgcccacagcttttactaaagctgttacactaatcacttaaaaaaccaaagtgtaattacagtaggcaaacacaatgtatggtgtgacttatgcatatgagttcattaatctgatgcctgacatctccacattagaactctgtttaaaacaccttttcctatgacttcctatwtaaatgttgcactcaataccacatgagaacaactagctacctgagtatttctaagcaaggccccgagggagtgagatgcagggcctgtccagagtgaatagggatggaaccaccttcaaaatcttgtattccattcaaggctcacaacccacttttatggcaktcggagttgctttacccactcccttgtgttctgtgagtttgcatgttatgctcagagtctggaaagatgggattagtaggggaggtagaccagaagaaaggcagaaggagattctctgttgatgactcacagtatatagcaaatattatgggtttgatgggtgagtgtttggcttgtttccacaggcttgggaaatgtgagagtcagtgggagaattcgacatgcttcagtcctagactgagccaatgaactagatggaaataatgtgctttatttatttatttataatttgtaattaaactttttattttggaacaaaaataaaatagattcacatacagtcaagagaaataatacggagagatcctttgggtatcctgagtattctttacccagtttctcccaggggtaacattttgcaaatctataatactatatcacaaccagcacactgatgttgatactgtcaagacacagaatgttcaccatcaccataaaaatccctctcattacccctttatagtcacatctgccttcctcccaccatagcccttccttattccctggcaaccagtagtctgatctccatttctrtaattttgtcatttcaagaatattacataaatggaatcaggcaacatgtaacctttggggactggtattttttcactcagtataattctctggagattcatctggttattgcatgtattccattatatgggtgtaccmcagtttttttgttgttgttgttttatacacatttatggtgtaaacatgatgttttaatatatttataaattgtgaattggctaaatcaagctaattaacctatgcattacctcacatacttttttgtggttagaacacttaaaatgtactcagcaatgttaaaaattcagtgtgttgttattaactacagtcaccatcttatacaacagatcttctaaatttatttcttctaactgaattttatcttttgaccattttctcaatgctccacctctgtatccctttgttaaccactgttctaccttctgcttctatgagctcaatgtttttagtttccacattataagtgagatcctgcagtacttgtctttctgtgcctggcttattttatgtaacataacgacctcctggttcagtcatgttgtcacaaatggcatttcttcgttttcttttttttaaatgctaaatagtatttcattgtttatgtagatcacatttaagaaatccattcatttgtttatagacatttgggttgcttccctatcttggctaatgtggctaatgctgcagtgaacgtgggacagcagatatctcttcaacatactgatttcattttctttgggtatatacccaaaagtgggattgatggatcatgtggtaattctatttttaatttttaaaggaacctcccatactgttttccataatggctgtactaatttacactctcaccaagagtatacaagagttcccttttcttcacatccwtgccaacatttatctcttgtcatttttataatagccatcctaacggtgtgaggtgagccctcattgtgattttaaattgcatttctctgattattagtaatgttgagcatcttttcatatatttgttggtcatttgtatgtcttcttttacgaaatgtctattcaagtcttttgctcattttttaatcaggctatttgggttttttgctgaattgagttccttatatttttaatattaatattcttatcagatatctggttttcaagaatattctcccattccaaaggttgtctcttcactctgttatttcctttgctgtgcataaacttttgagtttgatggcaatcccatttgtctatttctgcttttgttgcctgtactttcgaggtcaaatccaaaaaatctttgtccacaccaatgtcaagaagcttaagaataatggacattagcaaaaaacaaatgtgagaagagtggctacttttagggtacaaaacattcacccatccagtgactttcataagtgtgaccttctaattaatctgaccattgtcacctgatagccccaagctctggcactgtcccattacatggctttgtctgcctttgatcttaaaatttggtgtgttaacatacgattatatttatacattcatttatatgtttgacaaaaatttattaagttcctgctgtgtgtcagataatgtgcttaccactggagagagtactatgagcaaactaggcacaatggctgacctcatggcacttatacccagtgagagacagatattaatagataatctcacaaataaattatatataatctacaatatataytctagagatattataagaatactacaggaatttactatatatactataataatactatagaaatatgagaaattgatatagagacttgacctagtctaaaaggtcataggaagacttacctataaaataatatttgagttaggaattgaaagatatttactggcttttgtttttatccacttatatatttactcatttatccaccaagtatttattaaagaccttctctatgctagatgctatatttagaaagagacaatttcctaaattctgggaacagtctttaatttcttcttttacacaaatagtattattatttcagggaaacagatattgaagactctgatgatattccagaagataccacatataagaaagtagtttttcgaaagtacctcgacagcacttttaccaaacgtgatcctcgaggggagtatgaagagcatctcggaattcttggtcctattatcagagctgaagtggatgatgttatccaagtaagtcttttgagcactgctaagatcttcggaggaatttccacaagcaccagagggttgtaaaggtgcaggtggcaagagagctataggtgatttgtttgttttccaggattaatgaataattacatttcttttcaaagactccttgccaagcaatttggcaatcttcgaactaaaaaaaaaaaagatctcattttttaaatgctgaaaactatataatctgtggaaaatctttctgtaatttctatctaaagctaacctatctaaagttaacacagaaaattaatatattcaagagcaattgaattgggtttcatagcagtggtggtggtggtggcagtagcagtgctagtagtaatagtaatttagaaatatcttcaggtgttttcctaaaaattaaataaaatgaagttaaataaaatgagtaaggaaagtaaagatgtctccatgccctccaaaagtgagcaagtttcttcagtgtcttcctagttctggtaatttctttcaaaatcttgtgtccagacccacgattataacttgcttttataacaaagtttacttccgccatttttgctaaccgctcacrttcaaaaacccagaaagaaccctgattctaaagtaagctattctagattttaaaatataatctactatacctgtgtaagcattcactacattttcagtgaccatttgctctttttaaaaacgtaaacaagtacatagggatataagaatcttaattattctaaattttccatgaagctatgggaggcaatattctcttttatgattaggggatcctttttcaagatgaacgataatttaacacaatatttaaaaaacttattctaagtaactcaggaatcaaaaaccagacactgtatgttctcacttacaaatgggagataaactgcrggtatgcgaaggcagacagattggtataatggacattggagactcaaaagggaacgggggatggatgaaaagctacctattgggtacagggtacactactcaggtgacaggtacactaaaatcctagacttcaccactmtacaattcatccatgtaaccaaaaaccacttgcattcctaaagcaactgaagttttttaaaaaatttaaaaatcaaaattaatgcacgaaagccacaataaacaaaacctcacaattgtgaataaagacaggataagtaacaatgttgcattgagacatactggagccttaggcaaaaggaaaaaaatcaaatactgaatctttgttttagccctggatttcactagataaaaatgacttcatttgtgtatttttaaaataattttaacttttattttagattcagggggcatatgtgcagttttgttatctgggtatattatgtgatgctgttgtttagggtatgattgatcccatcatccaagtagcgtgcatagtacccaatagtttttcatcccttgctcatctccttccttcccccttctagaagtccccagtgtttattgccatctttatgttcatgagtacccaatrtttagctcccacttataagtgagaacatgtggtatttggctttctgtttctgcattaattcacttagcataatagcctccagctggcatccatgttgttgcaaaggacgtgatttcagtctttgttatggctgcgtagtattccatggtgcatatgtaccatattttctttatgtagtccaccactgatgggcacctagattgattccatgtctttgctactgtgaataatgctgtgatgaacatcctagtacatgtgtcttttcagtagaacaatgtattttctgtctttctttcttttttttttttttgagayggagtctcactctgtcgcccaggctggagtacagaggtatgatctcaactcactgcaacctctgcctcccaggttcaagcaattctcctgcctcagcctccygagtarstgggattacagscacccrccrccahgcccrgcyaatttttgtatttytartagagacrrggtttyaccatgttggccrggstggtctcaaactcctgacctcgggcaatctgcctgcctcagcttcccaaagtgctgggattacaggcrtgagccattgcgcccggctgaacaatktattttcttttttggctatatacccagtaatagaattgctaggtcaaattgtagcaggacaagccacagacaaaaacccctcagacaccaagttaaagaaggaagggctttattcagccgggagcttyggcaagactcatgtctccaacaaccgagctccccgagtgagcaattcctgtcccttttaagggctcacaactctaagagggtccacgtgagtgggtcgtgattgattgagcaaggagggggtacgtgactgggggctgcatgcaccagtaattagaacagaacagaacaggacagggattttcacagtgcttttctatacaatgtctgtaatctatagataacataaccgattaggtcacgggtmgatctttaactaccaggtccrkggtgtggcgccgggctgtctgcttgtggatttcatttctgccttttagtttttactwcttctttctttggaggcagaaattgggcataagacaatatgaggggtggtctcctcccttaaaatagtagttctgtttcaaattctttgagaaacccccaaacttctttccacagtggctaatttacattctaagcagcagtgtataagcattcccttttcttcacagcctcaccagcatctattttttgactttgtactaatagccattctgactggtgtgagatggtatttcactgtggtattgatttgcatttctctgatgattagtgatgttgagcatttttttcacatttgttggctatttgtatgtcttcttttgataagtatctgttcatgtcttttgcccactttttaatggggttatttgtatttcgcttgttcaattgtttaactatcttatagtttctggatattagacctttgtcagatacatactttgtgaatattttttctattctgtgtctgttcactctgtagatagcttcttttgctgagcagaagctctttagtttaatttgtcaatttttgcttttgttgaaatgcttttgaggaattagtcataaattctttcccaaggctgatatccagaatggtgtttcctaggtttttcttctaggattcttatagtttgaggtctgacatttaaatctttaatccattttgagttaatttttgtatatgatgaatccagtttcattggattcattggggttcagtttcattcttccacatatgggtagccggctattccagcaccayttattaaatatgagtccttttccccttgttttttgttgttgttgttgctgttgttgttgactttgtcaaagttcaggtggttgtaagtgtgtggctttatttctgggttctttattctgtttcattggcctatgtgtctgtttttgtatcagtaccatgctattttggttattgtaactttatagtatagtttcaagtcaggtactgtgatacctccagatttgttctttttgcttaggattgctttggctattcaggctcttttttgattccatatgaattttagaatagctttgtctaatcctgaggaaaatgattccagtagttgttaaaaaatagtgttgaatctgtagattgctttgggcacaatrgctattttaacaatactgattcttccaatacataagcatagaatgtttttccatttgtttgtgtcatctatgatttctttcatcagtgttttgtaattcttcttatagagatctttcacctctttggttagatgttttcctaggtattttgtatgtgtgtgtggctatgtttaatgggatttcgttcttgatttcgctctcagtttgaacattactgatgtatagaaatgctattttgtacatttgtacattttattttgtataattgattttgtacattaatcttgcatcctgaaactttactgaagtcatttatcagttcctggagccttttcatggagtctttagggttttctaggtacagaatcatattgccaatgaagagagatactttaacttcttttcttctttggttgccttttatttctttctcttgcttgattgctgtgactagaatttccagtactatgttgaataagagtgatgagattgggcatccatgtcttgttccagttctcacggggaaggctttcagcttttgctcattcagtatgatgttggctgtaggtttgtcatagatggctcctattagtttgaagtatgttccttcaatgcctagtttgttgagggtttttatcatgaagggatgttaggttttatcaaaagctttttccacatttattgagatgatgatactgtttttgtttttaatgcggtttatgtggtgaatcacatttattgatttgcatatgtggagccactttgcatcctaggaatgaagcctatgtgattgtgatgaattaatttttaatttgctgctggatttggtttgccaatattttgttgaagatttttgtgtctatgtacatcagagatattggccggtagttttcattattcattgtgtctttgccaggttttgttattagggtgatgctggctttgtagaataaaataaggaacagacaattagggagtctttaatcactagaagttatagaagggctgggaggagcttcatgggtctgactgctggggtgtgaagacttctcatatggcatttaagtcctttaccatctggccccaacctgctccttttctascctcatttctcaccaggttccacctgtccctgtgcatttcacagcccagttccaccgagatccttgctattccccaaactcttcctttactcccctgctcacaggcatccttctgcccttctgagagtctgaaatgtctttctagctcctgttcattctatgatggccaattccatttcctctaagaaacttaccttaattcttccaaccactcctaaatattcaaccaaattgttcctccagggcattgtcatctgaacccacttagactttgtatatagcacctgttgtctccagatttgtagtgtggatgcccatgtgcatgtctgtttcagcagtagcttaaaagcttcttatgaacaagaatcaagcttctttcatcttcacatctccactacctatcactctcatttcattagtagataatgtcagtactttagccttgagcctaagaacaaatatcttttggtatttctggagaaaactacttgggccatatctcacaggatggttatgaaaattaaatgaaataatatacataagttattttgtaccttatatcttagctccgattttataaccagccattttgacttataatgctgacatttttgtggtttagatttttgttaagcttaagtacatttgtggatcattccttttcctaggttcgttttaaaaatttagcatccagaccgtattctctacatgcccatggrctttcctatgaaaaatcatcagagggaaagasttatgaagatgactctcctgaatggtttaaggaagataatgctgttcagccaaatagcagttatacctacgtatggcatgccactgagcgatcagggccagaaagtcctggctctgcctgtcgggcttgggcctrctactcagctgtgaacccagtaggtactttcattgaaagtttttctcattcccctaacctcgtaatctgaagtccaccaaatggaagagtcrgggttatttcttgtcaaatgtctgtcttgcttttcatgaggaatgcataagggtgtggttaacagtctgcatttatcataaccagggactctccatgcagctcttcagatgacagagagagaaacatttattcagtggagaggaggaaagattacttgaatgattggccatgaattagaatgcctacatttacagaagatggcatttatttgaaattttcttgaacaagtattagctatgttctgctctttctttrtgaaaagaactgcaaagtcaagactcctttatctgwcattctgcaatgtatatatacttcaaaacaatatgtcatacacagtatatgcatacaattttatctgtcaattaaaaagagaaacaactcctccatttcaggcatagtggaaagagcacagactcagatttaaatttttaccctgtcaatgcataatcctaggaaattccttgacctctcttagcctggtatcagaagttaaaaatgagataacagtacatagtgcatggtaagcacttggtaaatatttgttcaatgaatgaatttatatttaccakataagatagttgtcaggattaaatgggagattgcaggcaaatcatttaatatagtaatagattctcaataaatagtatcccttatattatcaatttattattatcatcattgttactgggataaagatcaatcagaggaaggaggattatgaatacaacagaattaggtgataaatatccaggcttattaygccattcatttataatcttcatcttcaaattcagagcctatcagaaagtttccttttctatatgatgagtgattatcagaagagcaaggaaattcctgagaaagaggcaatacaatttactctgtttttccaggaaaaagatattcactcaggcttgataggtcccctcstaatctgccaaaaaggaatactacataaggacagcaacatgcctrtggacatgagagaatttgtcttactatttatgacctttgatgaaaagaagagctggtactatgaaaagaagtcccgaagttcttggagactcacatcctcagaaatgaaaaaatcccatgagtttcacggtattttcctyrgactttgatctaatctcctaattaaatcacactgggtcacagtgatttctgcccttagatattcacaagattagacatgagatgcttctgagacacccagagctacaactaaaaccggttccttaacattccagagggctgatgtaatctggcaggtgacactgtgggtgaggcaaaaagagaaagtctgaaagatagcacagagaagctgctgcaaaacaaaccaacagaaaaccacaacaacaaaaagccagtgtgcttcagctggtaacatacattgaaaaggaattaacattgttctgcaatttaaagttaataagcttgtttctggatctctaaaggcacaagtgtttatataaaagaaatgatcacctgtgtgtcttttctaaaataagaatgacgctaacagttttagctctcagcagctaccaggtggcacccaaagcatatgagaacaaaatgagataagaaactaggtacccaggtaataggagaatagtggcaagagagcatttgggtggtcacactgggaaaagtgtgcctatttggaaattcacaaggaaaatttgccctgtaagctagtaactgaaacagaaactgagaagagaaaggtacgagcttgtgttatgaatatgtagataggtgttctcacrcctgatataatttgaaggatgcccaaatgatctcaacccgtccctctccaaaaattcacctgcctggtttctgaaatttcacagcagttcctctaacttaagaaggaggaaacaaagcacttccytcactttggtttcagttaaacgtttggtaacactaaactttatctttacagttttgtgttacatttttaaggtgatcaagtttctcaggaactttttaaaaaatccgcgtattttactgtggggagagtagataaagcctgagaaccctagttatctaatctgagaagtgggcagaggagttgtcataccaataagagaataaacatgacttgctatggttgctggatacaccaaygataaactcctaattttataaactcctagacttcctaatttgcctgaaactttctctgaatttagaaggccttaaggtgacatgctgcatatctccttgctgactctaatccctggagtttactttgtctgcccatatttgtatttatcttttgtagttaaggaaaattaagactgttaatggaaagtatacacgggtaaagcacggaactgtaaaagctgaggaaaagagtgataaactgcttggaaagggagttccccctgccttctgctgtaggctggtgtgaatgatatgagaaggactagtggttctgctttagcctctcactaatgtgacatacaagagggccctttccatggctaggtaggcctgggaatgcagaatcatgaggaacatgggtgttgagtgggttgccccatatttccttaccactcgccctctctgtgtcaacagatttttaattgatttcaactctttgtcctttcagccattaatgggatgatctacagcttgcctggcctgaaaatrtatgagcaagagtgggtgaggttacacctgctgaacataggcggctcccaagacattcacgtggttcactttcacggccagaccttgctggaaaatggcaataaacagcaccagttaggggtctggccccttctgcctggtaaagattgggtaatgggaagaggtccctgctaagaaatacagggaaaaggcaatctgtaactccttctcatttcttccttgtgcatatacttcctaaggggtcagaacacagggttctggcatagagcctaggcaaacccatagacccaaagtatatacggagtacaaaaatgtcacctaatttatgaactatttgcagcaccacacaggctaaatgtgtgacccaactcagttgcaacataacatgcagtttctcccaagccactgtrtgtcatacagatgaggtcttaagcagatgaaaaaatgaatcccacagggctcaggcagctacagctatctctgctgggagggtttccagattcttcagttctgctcctcttctaggccctatcaccctaatatctttgggcaagtgactccaggaatcacattcttaaactgacttatagactgtttgaagaggaaaacatttttaaaaaataataataaaagttaaagaataacaaaggtatttagaacttttcatgtgcaaaataaagataaatgtagatttaaacagtctacaattatacagaagggatgtttctgtgccaatgagttgtttgtaagtgtatctacttgtgcagcagtataaaaacctaggaagtcagttaaaatgcagatgtgaaggcagagggattttgttctcagagactttaaagtagattttgggcagaattccaaggagtctgtatttttaacaagcagccttccttctattttgccttctattaaaagtaatggcaaaaaccgcaattatagtttgcaccaacctaacacatgctgcctgaggagttagtgaaggcagcccctcgacagcactttgggtgacgttgtgtgaatctgcctcagatgcagrcacagaagtccaaatggactggtttgattaagagcagggaaaaaaagagggttcttattggtttttcacatgccagtaactcactaatacatctagagagtattaattgtattatattaatatcatattaattaattaatataataattaatagataatttattgtattaaaatcagagacagaagagattcagtcaaatttactcatcttttcatcaagtattagaagatcagtcatccttcctatcagcctgcagacagactgagaagctaggattggctggtgtctctaaatctgcaaacctaaatacctgcattggagagaggaaaactggagacatttttcagtgtgtttgaggaagataatcatatctattcattttcacccacaatctgggaaacagtcataaattatagtcaacagaatttaaatattaactgccagggggtaatgttaaataccagaatggatagccagaggttttagaaatctcattctttcagtgttttttctgagcaatttatgtaaatctctattcaaatatgtaagctttatggaaaacttgaaaacatggaggaagaaggttttatttttattttcttatataaaaaagagaaaaaagcaaaaatgaaaagagggaaaggaaacatgtatgatatttttgaagcccaatgatgtcattcgaggtcactttgataattaggactgtgaagctgtattgtatgtgagttaatttgtaacattatatttagataagtgaaagtttcttctagtgaggtgtggtggtgatttaaaattttttttagttatctctgtgtatgtgttgttattgttttgtttttatctgttatactttcagtcctacctaaagaaaaatggttaaattctatttgaaagcctcttgtgaagcaggaattttaggattcttagagaactatcaaccacaatatttacttgttaatttttgcaaatgtaatgttgttctttttattttaggttcatttaaaactcttgaaatgaaggcatcaaaacctggctggtggctcctaaacacagaggttggagaaaaccagagagcagggatgcaaacgccatttcttatcatggacagaggtatcacaagagccatgtgatatttggtttggcaggagagtgcctattactagaatattaccaacttttagattggaaatattcaactctaagaactctgatgtgacaaaggcataatttgtagccataattgctttyattccggcccatggtctgattgcattgaaaacacatcagtcagatcaaaagcattcctgtcaattgggaaacctgtgtaaagcatccttcttcatgacttgtgatccatggacaagtgcatataagaaattttccagcttccaagagttgaggagggaaaaggtcacaggaatttaacaatgactgagtcacyaaacttgacatttcagcatttaggaaacacagttttcatctgtccatctgttcatccattctttaagccattactaagcactgttgagtatgaagcactgtgccaacatccaggtagcacagtggctggtatcccttccttgatcaagatataaataaccttgtaactttgaggtcaacttttgagaacatagtctcatcaggactagaactttttttcatatttttatattttgtatttttattttttttgtagagaagaggttgcccaagatcaaactcctggcctcaagtaatcctcccccctyrgcctcccagagtgctaggattacaggcatgagccactgcacctggccatggatggtacctaatgttgtaaaatagcataatttaagataaaagcagragaaaatcagtttaaaaartgattacatttcaggatttcagttgctttcttctaggatgccactatatctattaaagcaccagtcttgttagtgcatttaccattttataatcagatatatttaagtcagggccacacaaggtaggtaaaaatatctaattattgagtcagaaacataatccctaaccatggagttttactttattrtatatattttrtaagcaaaaattattcattttttttctgtttttcatagactgtaggatgccaatgggactaagcactggtatcatatctgattcacagatcaaggcttcagagtttctgggtaagttgtagcaccatggtctgtgaatggtaccccctacagttgtgcagcatgcagcctatgaaaccatacatgacaatcctatctatgaatcagtttttctctttatgcttttctctackacaatgtagtgaagcagctccatttggggtacatatatggtaaaggaaggaacactayggtaggagctaaaggcctgttagtgtgctcttaacactgccacctcttctggtgtataatgatcccaaagagtcttttccaggaaaaaccgatagctgggggtcattgatttctctacataaaaagcccagcctctctgcagggatttggcaaggatcagataccttastcttatgaccacgcgcccatttccaaaactctcctcagtcatcttttctgggtttgaccacacatgtagtatttcagccagattcacagggtcttatcagccaggcattatagtccccattaatatggccctttgcctgtggcaaccattcatctattcagaaaactttgttgaacctccactatatgtgaggaactcctccaaagttttcccacactgcctcaaagcccttcccaagatcaagaggtcatgatcaagaggatgatgaggctcccatatacccttccatgtcttcctgttaggcaggcacattcagcattaggaatataaacacaacagaaaaaatcaaacatgacctgtgtgcaagaaaggggataggaggtggttggcagttgaccaaacacagacctgaagcccagatttcatcatcaaggactggcctagtagctgaggcccatgcctagactcctgactacaacacaggtcctccaaggatctggttttccactggattaaactcacttgagaaattgctgggtttttaaaaaattcagaataaatctttttcttcccttgagtttaggttactgggagcccagattagcaagattaaacaatggtggatcttataatgcttggagtgtagaaaaacttgcagcagaatttgcctctaaaccttggatccaggtttgtcttaatagactgataatatttactgctatcgtaataataaaaatgaaagtgatttagtaattccttgttattgttcttgcaatgttgttaggggaaatagcaagtactaagtgtgaggcactgttctaagtactttatatccttaaaatcaaccctctgaggttggttctaataatatcttgttttatagattaaaaaacaaaaggcacagagatactacctaccttcccaaagtaacacacagctaattagtcattgagttgggattcaaatttaggtactctgtgcccaaatatgaattgcatgtagtcattgtatcagtttgctaagatcttatgtgctagctctttagttctraagaaagctgattgtataatgaatttaggcagtgtgtgacttgttgacaaggacagttctgtttactggctttcctatattgcaggtggacatgcaaaaggaagtcataatcacagggatccagacccaaggtgccaaacactacctgaagtcctgctataccacagagttctatgtagcttacagttccaaccagatcaactggcagatcttcaaagggaacagcacaaggaatgtgatggtttgtgtgcatatttctatctgaatctctagactctagacttggcctagaattattatgactatacctaatgattatgtattttaaaaaatacctttctgggtattagaaatgtgaatggctttctaagggtcatatggagaaaagcagtaatatgataggtctgtgtcttacaaattaaagagagaagcagggttactgaaacttcaaaaccccacaaaactttaaaaaatcattttatcatcaaacaaaatacccagatttctcagactggccaatggtatacggcagagtagaacatctggtcttgcrcctcaaggagctcatgctaaaaattggctaccaagacttttgattttactattgtagtttgttttgttctttatttcagtgtacctgaagtaaatagtagtgttaatgctagtaagcctctgaggcagtgtgattctcagactttttggggggccatgcctgaggaatgacattctccttctggttcttccaggggctcagccataagccctaactcttctcctcctctctattcccttccccaaagaagtctgaatgcaaggagtctgcctgccattattataccaataaccttgagtctgtttctgcttatattttatataaaattatttactgtttattagttacctatttttaataattatttatactatgtctcagaaccattgaaatcctaaattatggttcttactaatcagtattatgagagaaaacacagattgcagttgagtccatagcataaagattttgtcgtctatgttcatgagaggatattggtatatagttttatttttttaattgtctttttctgtttttgataccacagttatactagctttcataaaaytggtaagcatgctcttttctacattctaggagaaaatgtctgcaattggtaataattctttaaatatttggtaggaatcactagtgaaaccatctgggcctgcagatttctttttgggcagtttttaaattacagatcctatgttctaaatagttacagggctattaaaattatctatgtcatattgggtgaattgaaatactttgtatatttcaattaactggtcaattccctctacgttgttaagtttatatgtgtagagttgtttgtatattcccttatcctttttcatgtttgtagtgattttgcctgtttcatctctgatattgtcatctgcccctcctttcttttttgtgtgaatcttgctagagatttgtcgattttaaaaaaatcttcttggccgggcgcagtggctcacgtctgtaatcccagcactttgggaggccgaggtgggcrgatcacgaggtcaagagatcaagaccatcctgaccaacatggtgaaaccccctctctactaaaaatattaaaaaaaattaggcagggtggcgtgcacttgtaatcccagctacttgggaggctgaggcaggagtatcgcttgaatccggaaggcagaggttgcagtgagccgagatcacgccactgcactccagcctggtgacggagtgagactccgtctcaaaaacaaaaaaaaaaaaaaaatcttttcacagaaccagccttgttttattgatttttctctattgtttttctgttttcagtattaccgatacctgctccaatcttctgttttaaaaagttggctttttctgacattgctctgtcaggaaaaggggtagggcacagcctgtttactgccaagtgggggtcaaagtccaggttccccactccattgccacctaagaagggattgttccttggtggctgggtgggaagggaagttccccatttggcmtccactgatactgcaggggcaggagcttcattaggggctggagatgaaagccctaaatccctacatggccttttctgacacaaccccagtgagggtgtagggtgcctctttagcctcaggagcatagaagtctaggctccccattcagcctttgctgttgtgggttggggaggggcctcaggtttttctgtggtgtttggctaaaggasagaagtcagtgtccaccagttttctatcatatctcgctatgctgccctttactggtactttggttagagaaagcagattttatttgggctttttcagtctgtactcattggtgtttccaggttgccggcttcttcatctctaagtctgggatttatgaggcaaaaagaaaattcaagacactgatcaccattttgttccttccgagaaccctagccagtctgtcttctgagctcttttcagggtcttatgtttctctgagctataatgtccaaagtttttagttgtacttagcaggaggaatagggcaaagtacatatatacaatcttcctggaactggaattatccccaagtatattttataaccaaattgatttagtttggaccccatgaaaatgtagtattacaatattaaattagatcaaaattttaatataaagtcacttyatagatcattgttacataactaaactttcctcttttcttctagtattttaatggcaattcagatgcctctacaataaaagagaatcagtttgacccacctattgtggctagatatattaggatctctccaactcgagcctataacagacctacccttcgattggaactgcaaggttgtgaggtaaatggtaaggtacaaagatgcattattttctcactgccactcaaagaatcaagatttgggaggtataggagaatgagtagaatttttagttcttttcagtgacttaggctcctaggaaaacctttgtgaaacagaggttctactcaggtaaactctcagtgtgatctagaccaagartggttctgccaatcagagtgccgacagcatctctgtgaagaaagtgcctggattatatagacacatcacaacyctccaaggaagggctctaatttggaattacctccatcagcccattttcaataagacctacctgagattcaaactaggcctgactcttccaaagtcctcaggtcactcaaacttcaatgtcatgacagtatctggcaacatcactgccatatatrtggtgttcaatgagtgtttttgaaatctgaattggcttcccaacttcctgaaaccacaattcttctttatattttctttcataccctgtgtaggtactcaagtcttttctatgttagctgctatttctcaggggctgtaatgtgacctgtggtataaataaatccaggtaatcataaatggtcataataaaattctactatatatagcaaggatgtttaagagtcttaactgttcttcttggactcttaaagcagtgctttccaatattttttacttcaaagcacacaaagaaaataatatctgcctggcattctgaggtaaaagaatgaagcawtaaatctaaggcttggctgatccaggccccacttggctgctgaagggctggaggtgggaagagggatcaataaataggtgcactagaaacctgccrtgrcacacctgtcaggagttgcagtacttccctttgggtggagagaagccaccatgattcacaatggagaaagtagctgaaacctggaatcagtttcctgttgaagcagataatggcacagtatacccttggatggatatgggtattttgccaatgtccagatagcagtagtctaaaacatctcccaaataaaacacagatcttgtatcggcaggaccactccttgaaacagttccataagtcattgcgtttttttctttccatatggtataaatagatttgttcagatcctaataaactaccctaaaatgtgacattcaattctgctaacttatttaaaacatctattttttatacaagaagcattattttcttcttattcattttcttgatacttaggtaattattagcagtgggtattatttttaggaccctttgtttttttcatggagaaagtaaggcatcacttcaagaaaatttctgcatgatttaccaacaagaacaaagtgtcacagagatgatgggtggtcagccaggttcactcactagctgtgtttcttacagtcacaggtctgccttgctgcctatgatattcaaattacaccttggaaaaattccaaagggtacataactcgaattaccctctaagggttgaaacagaaaatattaaatagtgactgagggtccattgtatcttcttggtagcttttgttagaagaaacagagtatttttatatatagataatttaggattattgtcacctgaaagcaaagaccaaagtttccaagactctcagaaggaggaagtgagtttaaatgtttagaacatggtatttggtatcagattgtctgaactcaattcagtttctgattcttgtggctgtgttaccttagacaagttactgtgttttggctgtactaaaatggagatatttatgagcattatataatacatgtaaagcctgagaacagtatttggcacttggattcaataaatcttcattgttgtggttattgtttttgtcatttgttggtagtaatattatttcttatctcctctgcagtgcatgaagccatgcagggaatattggtgtgtaattaatcamgttacttttcttttgataggatgttccacacccctgggtatggaaaatggaaagatagaaaacaagcaaatcacagcttcttcgtttaagaaatcttggtggggagattactgggaacccttccgtgccyrtctraatgcccagggacgtgtgaatgcctggcaagccaaggtcaagtatactctatgcatggtgttctcttagggctccagaagaaagcaaaggccctcactaccacaaacatggaggatctgggaagcaggagtattttaatctgtttctgcagattaaaatcctaggtccaagagtccaggatgtctgtggacttgatagctttgactataactttgtctcagagagaagtcatttatcatctctgtggtttttggtctagtcttgatttaaaccaataataagcaaattaatttttctgcaaagggatagatggtaaatattttagtctttgtgggccatacattctctgccataactactcaactctgccattgtagcagtaaagtagccataaacaatatgtaaatgaatgagctggctgtgttctaataaaactttgtttacaaaaaacaggcagcgggccaaatttggcccatggatcatagtttgccaactcctcatttagacagcttacattagtgataaaaaaatgatttagatttgcaacatcatctcttattttttctttacaatttagcaatattttttcattttcctaaatgaaatgtcatctaaacttttttgttctcttccccgccctccttattttaagagctttgtgatattccttgaggcaactagaagcatagtaaaatgttgcaaaaccagagttataaaatcagtgatctaagttaaacaaacaccttccagagagttatactgtccctgatattagcccactgagtaattcaggtgatttaatttgggggtaactcttaatatttgactcatttttattaattctttaaatgacctgagatatcagaatggcatgaataacttgatgatcccttcagccaactaaatccaaattccctamtttctatcctcatatctccctcccttaagatacctacactccaatttcctggctttctatagaattccagggcctatccttaaattaggccactagaaaggaaaaaagaattgtggtgctggtggggtaaatagaaaagattggattccacacagtcttgggaactgatatctgtgtcttgaaactcattctggcccaatatggaatcacagaatgttacagtagcaaggagcaaagcatctggtctagatttttccttttaattstaaatacacaggagattaaataattttagcttagtttggtagcagaatcaggactagaatcccattctcccagtaaacaggccatgctccttccaccatttgaagcagcccaaatacctcattttgcaattttgcagagggcaaagctgacacccagagaagttaaaataataaaaatagtgttatattacatttatataatttacatagcaatataaataataattaaagagatgttatccaattctttttcagatgactctttagacttgttcatggtataaccttgtcactccatacttcattttacaatcttttaaaaaaatttgcactctctataatttgctcttagtctttgtsatataacaagggyctcaaagataaaatgctaatttttaatggtgtcatttcaaagttagaattcgggatcagaaatatgtgttttacttaacccccttccattcacatgaaatgtctttatatggtctctttagagaggttgaaaatcaaagctggacatatgcagtgatgcacatagatgctgttctctccataactaaaatgtctctacctcttttatgcctgtgaaaacctctagctggttatactctgcatcactggtacaaccttgatatgaagacwcactaagataccacccagatgtcactagaggatgttatagacttaaaagttttctcatataatcattctaattcagttaatttgcttttaaaatacatatagcatgtgaatttttgtgtatacacatatatacacatacacctatatatacacatacacttatgtatgtgtgggtgatgttgaagaaacatatcaatattatttcctttagaattgaatgaggttatggtagacgataaatctcccaaaggtaaaaatttatcttagatgactctaaaactcagtttagaccttctgatctttctccaaacacatatcaccaaccatgtgattaggcattttgttaggccagagacaggacaataactgtactgtgtatcaagctctacttatggttttatcaggtctctcaaatgttacatttatttgaaatattagaagaaattgaactatttctgmtctttgacattaacagggggaaagagaagttgtgttttgtaaaacaggtgaaatagagagagaatgctatccaattatttcccagataaccctgcagcaatattaccagagtatttaaagaaatttgcttaagaaaataatattcacagataatttagcagtttaattatttttccaaataaagctcatttattcattcatttattcaacaactatttattgaacaccaactgagtgtcttaacattgtggtgagtaccaggaaacaaaatgaaataagcctctacccttaagcagtaaggaatgctaagaaggaaacaattatagtacaatgtgtgaaatacttcaataaaaatttacacacatattgtggcaatgaagaagaaagagggaaagcttctaggagactgtgaatcctaagggataagatagaacaaaatccttttgagctctgtgcttttttgcataacttggtctaaaaaaaaagcaaaggttttaacatcttccttatctatgtgtttttgtcattttcrtaggcaaacaacaataagcagtggctagaaattgatctactcaagatcaagaagataacggcaattataacacagggctgcaagtctctgtcctctgaaatgtatgtaaagagctataccatccactacagtgagcagggagtggaatggaaaccatacaggctgaaatcctccatggtggacaaggtagagtggcatctgggcaaagagaaagcaatctgaagactgtgctataatgagaataacagtattttgcatttgacaaatatgcagtgacatgtaccacctctttaagtcttctaaatcttagttcttmaggtgcctggtctcagacaaactcctggttgtctgttttggtttgttttatttctcactacaccaggttgccctcataggaggataaatatcattgtcataaaaaaaagagtgattttatttctggtgtgtgtaaaccttggggaacttgctgatgatggaagggggaaagttatacactttagttgaggatataaggtacatgccaacaagaataaataaattaaaatgcatggtcacattttaaatgttagcaatagtcaaacatttattggtggccacttcctggcacttactatgcacttacgttgacatacatttttaaatatttacaatgacttctgtgaggtaaaatgttattatccttattttgccaatgaggaaatgaagaatcagagaataagtaacttgttcagtcatacagctaatacagacgggctgaaggcagaaatggttttgcagctgctccacagcaccatgtgagacttgtttatttttcactaatttaagtcagatcactggtgagatgaaatctatctggcatgtgatttcataactgatagaggatcatctctgtgagagtgttctatgtgttctttgatatgctcattttgagctaataggataaaaaattttctgggttgggcatgatggctcatgtctgcaatgccagcactttggaaggctgaggcaagaggattacttgaraggagtttaaggctgcagtgagccatgactgtgccactggactcaagcctgggcaacagaataagaccctgtctaaaaaaamacaaaaacaaaaaaccttagccatttatgttgtcattaaagattttctcttatttggctttcagatttttgaaggaaatactaataccaaaggacatgtgaagaactttttcaaccccccaatcatttccaggtttatccgtgtcattcctaaaacatggaatcaaagtattgcacttcgcctggaactctttggctgtgrtatttactagaattgaacattcaaaaacccctggaagagactctttaagacctcaaaccatttagaatgggcaatgtattttacgctgtgttaaatgttaacagttttccactatttctctttcttttctattagtgaataaaattttatacaagaagcttttataatgtaactccttgctaccagtaagtaagataatggctattacttctgcattaatttgaatacaggtaggaaaatatcaagaaccaacaagaaaagggcttatctttcttaatgattgaaaatgctatgaagtaatatttatgtagttaaaatgcttcattataactcttttaaatcctttacacactagtaaaacagatattactttaaataataattgatagacctggataactttcacaaacacatgattttttaatggtttttcttgagtgaagagaaaaacaatattatcaaatgaaataagtacttaaaatatcctgtctttcccatataacaatgatttttctgactttccatgagtaaaaaaacagccaagcatctttccagtagccccattgaaattgtgaatccgtcctggtctccctaaggactgcacacattgatattcaaggttggtggtcattagatatggaacagaactgaaataaccatggtagaactgaatgtgtaatgttggctttattctagctggtactacatggcacacagtttcaaaacataatttcacctactggaaagctcagacctgtaaaacagagcatgggaactgctggtctaaatgcagttgttcctgctcaaagagacctctggccaaactggcaagcagttaaagttttctttcagggccttcctctctatggcctcaacttcctcctctctcttcttccagcaacttcccctttcatcattcctttccctggggacttggcattcagtgatcctgtagatattgcacaactggggaacctttagacatccttaaaatcacatgagatagacagtcatttggggtgtctgaaataaaccaccccaaaacttagtgttaaaagagcaaccaaaaaaaatttatgtgagattatggatttgttacttagcttgatttaatcatcctgtaatgtgtacatatatcaaaatgttatgtataccataaatatataaaattttatcaacgaaattcataacaatctctcagaccacagagaaatcaaattagaactgaggactaagaaactcactcgaaaccacacaactacatggaaactgaacaacctgctcctgaatgactackgggtaaataatgaaattaaggcagaaataaataagttccttaaaaccaatgagaacaaagagacaacataccagaatctctaggagacagggctttgcttttgctgcattctattcgttgtgaacacaaattacaggccagtctcgattcagtgtagaagggaactgcataaggaccacataccaggaggcataattcactgggagcatctttagaaactaccagagttacctgttgcccataccagtggggtaagccctatgaatgtatatgagagtttcaaacatccacaaaacattggctttctaatattygtattcccactattcctttcttttcatgattcatgtcattgtcccatcaacatttctaagatttccattccgttaagagcaaaagagaatgttggaaggtgggggaaaacatttctttgttttctacagggccagcttcttggatgtgtgtgatctgttcagttgcaaagggtcacatgctcagaaggaccgcatgctaaatttaatgctttgcagttaccctcttgaaatcctttattttttaagaaggaattcgacatttccatttttcaatgagccccacaaattacgcagctagtcctgggcttctctactctgaaattgggcaggatctctcttgatctagaatttactaaggcataataggggcaagaaaatcttatgaaataatggggggtagggaagagatgggaatggagcatgagatccagcttcgttattctctacttgagaaaaataaggccccaaagattaaacaacttgcccaaggatattgcttgttagtgtcagaactgaaaccagaaaccaaatgatcatatccctagacttttagtctgctttctcttccataaaatgaaacttataatgtttctaatccattgctcagacaggtagacatgaatattaattgataatgactattaattgatctggaaaatacttgtttggggatcaataatatgtttgggctattatctaatgctgtgtagaaatattaaaacccctcttattttgaaataaaaaagatacccactttttatttctctctctgaactcacttagatgaaattacaagtttgactacatagtacgtctccagtgacataatccactgtttgttacaactgggtgctttggaaagaagttaaatgactcacggtagaatcatgacttaagagaaaccaacagataaaattctaaacattattagtcattctaattgcaatttggaaaagaatagctgtgaatgtatcaaaaatatgaaaggactagaagaaacatgaaattatttctccagaattctttcaagttattaaaagaaataacaaacttcatgccatttttataatcattttgaataaacaccatattttgagttcagggccattttggcaaacccagggaaaagctcttgccaaatagcttggatgttcccaagagccatgaatatttcaccatttacttctctggacagaccaggaaggaacaatttactaggcagtgaattttggttttacgaaatattggcacatgccccaatgcagtgggcctaacacatacttaaaaatatctgatagctccatgttagcatttttcttgttttatatttcctaatggagaagtattttatggaaaattctgaatgcctaattctcccaagttcatatattctcatagcctagagatagggaaagctgtagacaaagacaaaatgattatgtgtggaataatatttacatggtcaatgcccagataacaaggtttttcatatccaagtacttaaattgttgggagagactacagagctttaagattttattatctctggcttgtatgaactgtccccaccaaaacatatacatgtattttgcatttggtacatgtaaagaaaacttgatattaacctctctacatgtaccatcattttaattttttaaaaagtattaagctcattctatcgacacagcaaaccactatgacaggcattgtaggggagagtatataaaggaaataaaagacacttctctggcttattcaaatacatcatctagttgcatagagaagacaaacataagaagcaaatagacactatgagcctattaagcctaacagattacaccctgagtagtaaagaaaaagacaattagatgagtagccttgtgggatggaatcagactgtgaaaacttttggagatgatttaacctaggtcatctgatattagatgtgtatgaaggcaacctgtgcagaactccaaagaagagaggactgggataaggatcaataaaaaccaggataaataagagctttatgctcaaattcagggcccagttaagctttctctgacatacctactcattttccctaccctctctatatagtctaataatgacttatccacctccctccatctcctgtaccatgcccataaatccagtgtatgtgcaaggtcaaaacaaataagaattacctgggtagaactgatgatgtgagggtggggaaagacacaaaaacagatacaatacatatccctaatctccaaatcgtgaattacagatggtagtgaccagattaaaagtgggtcacctttggaaatattatagaagacgcccatgaggaacaggattctgacttgcttagggtgataggagaatgacactggagtggggagaagacgggtaaaagtatgttgtatgtgagaaattgactaatggagagatgagacaatcattgaggatgtttggacaatgacaagagttcaaagttcttatgcgatggttttatttttaccactggtccacatctaaaccacttctacctcatctgtactttcatgttttacacttagaagaagcttctcaatgtcttaggaatggtgtgcagttaatttcataccccacctgctttttattgacaggaaatttggtaatggctttaccgtcttagttatctccaccttgtattgaagttccttcctgctgattaaaaagactttctgaaagtctggaatgtggcaaccttgtttacagatgtgacaagtaaaaatgtttaaaaagcttttcttttatgaatagactgggagaaatagtgacaaaggctataattctatgattgcaatagtattggtacatagtaagcattctatcagtatttattattagcattataatgaaaatatgatatactatgaatataatggtattaattactaatattaatttctactattctctaatgctttttaatactgctcattacctctttagaaattgtagtaaaatacacataaaagttactctttaagtgtacaattcagcggcattaagtacattctcattgttgtgcagccatcaccaccatccactgctcattactttttattgcagctctattttctacccatacttgatgctcttcccagtaggtggcatgtctggttcaactgtacttagccagagttctgaagacattcacatagaggtcaagctttaattattcaggctaaacaaataattgaacagcttgcatggacttttttcagtgggtttaactgacctaattatgtttttctcagggrtagggactattggcattagtttacatcctgagcccacaggcctagtataggattcagaaattatcaaactatccacaaatttgaagatttaaataaaatcaagtaaaaattttctctccaaaaaaaaaatcaattagttgccaatgaaggagtttaaatgggagaggtaaataaattgtgccagaaaataaactagaaagaacagtcagcatgctaggttatagtagatattgtgaaaactgtacttctctgcaatacacaaagtaggttattaaaaattattggctggtgatgatagtgtggtttcatatttgccagcattatgaataatcttctctgcactcctagcagctagaattttaaataaaaagttatcatatttcttcaggtggcaaaataattgtgaaacacaatgttcttggcagaaaataaaacccaaatgactaaatacaacatatttttaggcatgtgtgaatgaatatatttctctctcatcttgtccccccaagacttaaggctgcttaaaaaaaataaaaaatactactagatgacatatgttagaagtagggaagaaagcaaaaccggaggtagaaacataaacaggaagcagaaaaaagctaacaggaaaatgcatatcataaagctatcgaccttgctatgggtgaacttgggtttaagtgaactttttaaacagccaatgcacaaaaaaaccttatcagttataccatatggtgtccccaaaaaatgtacaaaaggagcacacttttattgagactgaagttaaaaataaacttctcccaaaggtccgcagaaagaggtcactatgtaatgagcagaatgcctctaacaagagcacattatataggctgctttctgtgcagaaggtgctgaggacttcccaccaaagcacagttcagtaaaaacaagtcttcagaggccactgctgtgtggtccatgtgcaggggctctttgctggtctggcttaagccaaaggtagattttacagcctctaaaaatcattttccttcaggcaaaggctcatatcataaatactgtttctctaaggcatgattttgttagctactctgtgacaatgagctcaagattgtgtattctgcaaggtgtaacaactgcatttttacaaaattgttatgttcttgcacaagattctatcataagcaaatggcaatagaaggcaaatgtttcagaacaattaatgcaaaaaaacgtaaatagagaaaattatt

SEQ ID NO: 5697 - DNA, 68123 bp, Homo sapiens
aagtaatacaactcagaagatagttcaggaaccggtggggttcctgcaggccccgagggcagagcctctgagggccaaagagcagcgcactgaaccacagaggattattctcaggcctgaaacatgatggaatttggcctgctctgttttgaacttgcttggaacaartgacccttgtccacttatgtattccttccattttctccatttcagaatgaaactgtttatactatgccattgtatttggggagaggtaactggttttctagtttcatagatgaggaatcaggataaatcataccaagaaactcacatacacctgatttagatgatttagatgatgatatttaggactttttgactcgatggtatttaaatgagatttggaatttagagttaatgccggaataggttcagaaatttgaaatgggttaagaatgggatggatgtattctgcgtgtggaaaagacatgaattttgggggaccagagaatggactataatgtgttgaattgctccccaaaaaggtatgttcaagtcttcatccttcatacctgtgagtgtgagcttatttgaaaatagggtctttgcagatgtaatcaagttaagatgaggtcacattggattacggtaaaccctaaatccaatgactggtgtcctcacaagaagagggcacacagagattcacaggagacccacagggaaagaaggtcatgagaagagggaagcagagactggtgtgatgcggctatgagccaagaaataccaggtgtttctggaagccacccagtggaagtcaggaagaggcaagaaagtattcttccctatggcattgggatgcagcaggtgcctgctgacaccttaatttcagacctttagcctctagaacttcaagaaaatacatttctgttgttttaagccacccagcttgtggtaatttgttatgacagcccaggaaactaatgcaaacctcttatggctctatagraccacgtgattgtacggcactaagataatctaaccctttatatttctgttatcccagttgtctcaattatttgtgtctttatagggctgcctcttatttttgccctaattttctctcccttcccccctttatgtcttacatctgccccgccgtgcttttcttaaaactttgctctgcctcttctatcttcttttcttcctttttcctaatactttttttctcaacagggtctccttccattcctgatgaaaatctattttctggttctcttgcctatacagggtccatcctctggatgggaggaatatactccccatcccactgaagtcagctgtggtcaaatgacttatgttgatcaatgaaatgtaggcagaaatgataagtattacacccaggcagaagcttcacaaaccaagcatattttgctgtatctgtttttcttctgccaagggaattggtccatcagcctacactccagaataaagacatgtaacagaattgcagcagacctgcaataaacatgtggcaagaatagaaaaaaaaaaaaatttgttgttgtaagcatctgatatttggggattacttgttactacagcataacatgttcttcttacactccctaacattcaatgagaaaactttccagatctcccttttatctaatgaataaagatcaaactgcttagcctgatatctaaaatccactagtcctggctgggcaccgtggctcatgcctgtaatcccagcactttgggaggccgaggcagatcacctgaggtcaggagttcaagaccagcctggccaacatggtgaaaaaatacaaaaattagccaggcgtrgtggcacacgcctgtaatcccagctacttgggaggttaaggcaggagaatcgctggaacccaggaggcagaggttacagtgagctgagattgggccactgcaatccagcctgggtgacagagtgagactctgtctcaaaaaataaaaaataaaaaactaaaataaaataaaatccactagttctaacctatctttctccttttagtttcacttattttgcttcaaaatttattactaaaaaaagcaattaattacattacacattatatttaattttgttaaatatataatgtgtagtgtaattttgtgaaatataatgtgtaatgtataaacataatgtgtaatgtgtaacataataatgtccacattatatttaacaaaatattgtgcacattttgctactgtcttactcgttaattgctctctgtgtatcaagcctatgcctaagaccaaatagagggtatgactaaacccatagaagggctggcctgggaaaggatagctagaataaactcctgcaagagtccatagtcagaaaatgacccagagggttaataatcaacacagaactgagagatctgaaattgttcagtgtcaagttatgatggtactgtgggggtaaggaaattccacaggcagagatcagtaactcacctggaattgagacctcaagatgggtcccagaagcaagacccacagagaactaaatatcaaggtattaaaaacataatgggaaaaatattttaagtgtaatggggtgttatgggctgaattatttcccccaaaattcataaattgaagttctaacccccattgtcactatatttagagacagagcctttaaagaggtaaattaaggttaaatgaagacgtaaacgtgaggatctaatccaacagcactggcgtccttataaaaagaggcagagacaccagaagcacacatgcccaggggaaggactgtgtgaggacacagtgagaaagtgaccatccacaagccaaggagagaggcctcaggagaaaccaaccctgctggcaccttgatcttggacttccagcctccagaactgtgagaaaattaatttctgctgtttaagccacccaatttgtggtattttgttacgccagccctaggaaactaatacattgggtaatcaaggaagagggtcctacaggccaggtcctggccaagatcaatacagacactctgtttttactgcagctttttcactcacccatacttacctccttcctggggatctccactattccaaaagaatcatgtgacctctgacaatgagcatatgccttggctcttggactcctaataggcaggaagtacatctttgatatcacccagaggcttctgctatatgtaacaaagaagttctgtatatgcttgaggattaattaacgtgttctctgctccttcccctgaattaggggtttttaacttcatagaatccctgagaggatactgggggggagtttcatagatgggttttaggagcttgcccacagctttcatcagattctcaaagggaatcctaacactaaaaggtaaaaaaaaagaaaaaagaaaatccatttagatgttgacatctgtcacatcctctgaccaacagtgatgttacgtctcttcatgtacagtaacataatgagctttttgtcaaacttttcccaacccatttggacgtctcatacgttttctaaatctgatctgtagctccatctgttaggtgagtattgttgcaggtttattgtcctcagctttctgaactrtaaactattttagaaaaaacagcttcagaaacaatgagagtttgaatatctgccaacaaacatttccaaataaagctatactgaaaagacaccgcraattcaaaggcctttttttattcatttttctctcttgttttgttgtaagaaatacagtgggtctttattaatcatgttataaattaataagacctccaataaaactgaaagtcaaaattctcaagctttgccacctacaaatgaactctctaggtacctatttacatttaagagatgaatccagtttgctttaagtaattactttttaggttaacacagttacataagaaaatttattttgatcattttacagaagcataaaatatcaattttagcagaaaaaaattttagtcgggtaactttttttccagagccctttaaatgaaatttttttctacattctcgttgaattgatgtaatcacctgaaatcaatcttacaaagccatcttaaataaatggggaatgctagttagaataagaagttaatattttgggtccccaagaaaattttctttagccaactaaggccaaatcctcagaaatgcttttcttacttattctgcaatagtctcactgctcccaagccccttgggagacttggaaaaatggtctgtgtcttccacacttctcagagcagatgtgcacagaggatgtgcacaccagggagaagcatggtcaaacactgcccacccctttatccttcctccgaggagattgctcaacccctagaccttggctaaggaaaaacatcctattgtctgaggcaaaaagacatcaagtcctttcatgctgtcctgggaaaggcggtttggaacaagttatcctgattctagagacgtgagtgttcccagctgcaccgtgacttgtttttggctcctaggcaaagtgcccagtttcctctgctcccaaatttctccaactgcaaagtagagataatccttgttacctttttcttgcagtgttctgaaaataaatagggcaaataattctaaagtgttttgagagatttggctgagggcatatttgcctagaaatgtaggtgggggtttttggtttattttggttttattttgtttttgtcagtgtttttgcttttggccagacgttggcatgcatttagaaaatctaaattaaattaaattaaattataattattcatctgatgataatggaacatttacaggatgcaaagcactgtgctaggcaccaggagaatgcagaaagggcacatccccttccttcaaggagtttacagctttctcagaagcaggtatgatatatatatgtgtctatatcacataatagagggattatagataagttacacaagtgtggctgtcagccatggtagctgatttggaatcccatcctgtaagttacagttggataccctagaaaaaacacccttactaagctttggtttcctcttatgtaaatgataatagctaacatttattgagtgtctgctacgtggcaggggtgttctatgcagtttatcatgttaactaacttaaaactcagaacaattgcagagatagatattatcatcatttccatatgtatatccctgtcttatagataaaagcactgatgctttagagaggttatataacttgtcccgggtcatagttaggaagtggtgaagataggatgcaaatccaagctggctggcctcaaattctgccaatccaaccactgtatgacactacccctcaaatgggaacacagtaaaacttaccatgcgtagtgaggatcaactgataataacgcataaaaagctgttagcacagtgtctgacacataataaatgtgtgataaatgtagaagtagcagtagaagagattagacacatacaaacaaccagaatcccgggccaaaaataagtgcacacctccattctttttatgggaaacctccttcttagataccaaccattataaccatggagttacagtggagagctgtgttgaggggagaactgcaacatttctgaatcagcatacaagtgatctataatataaggagcaatcatttttatatatgtccatttccaaatctcattcaaagaaggttaaggtatctgaagtacccttctattaaaattcagactgtatttgctagaacaatttccaattgagcaacgtaaaaatgcatctgctgccatttctcttcttccctcctttaatccctactccccaatttcctttagaaagaaacaacagcatggagtttcttttcaaggtcttaaaataaaaatctccaaaaaagggatgctgcttataaaacctttcagagttgtttgaaaaagaaaaaaaatgcataaagagccaagtgcttatattctggccaagttatgaggctctgagaacaagagcttgaggggaagactgttaaccccatccacgccaccagaattagctctttcccttttggtttgcaagcactgcctgtaaagccctcgcatgagaggccagcctgctagggaaatccaggaatctgcaacaaaaacgatgacagtctgaaatactctctggtgccaacctccaaattctcgtctgtcacttcagacccccactagttgacagagcagcagaatwtcaactccagtagacttgaatrtgcctctgggcaaagaagcagagctaacgaggaaagggatttaaagagtttttcttgggtgtttgtcaaacttttattccctgtctgtgtgcagaggggattcaacttcaatttttctgcagtggctctgggtccagccccttacttaaaggtaagttgtaataaatttacggcattatctaattgcatttgttaagctgatttgcgtgatctgataaagctgtcaaatatttttgcctaaataatacaaagccatttatttaccaaaaaaagttttgtgtgatttacagaaaagatacttcatagagaattttaccatttgtattcatgttttcttgtttcctgcgaaattaaatagcaagtactaataaatgatggtgattttagtgaagaccaagaatagaaatgtggaactgttgatcgcctcagtagcattcagatcttagtgaagcctgaatcctgaaatgtgttttgtagaagtactttattacatatatgaaataaactataaagaaggtagtttttaaaaaaaatttcaaatcaaataatttgtatgttttccatgtttaaattatctaaagttattcaatctcctgagcctaacagcaatgtagaaacggaactttttgcttttccaaaaggtaggaaaatttctccttttatactatattcttgtttgattatttttaagttattgcgattattttccctttcttggttcccttttacagctttayaactaattattttttgcctcctactatcatttgttaagatgctcacacatagacctaaaatttctctaattcttgatratgtcttatttacaaaagcaaaaatgggagargagaattaaagagctaaagagattatggtaactcatattataatgtactaccatttctggctctcttttctaaaataaagcaataatgtaggttgtgcttattcatccttcccaggtattaaaggtcactctgcaagagaaaaaaagaaaagaaaggaaaagaaaagaaaaaaaaacatgcttttaactgcagatcaatactgttgaaacagtacaccaagaggtactgcagaaagagtatctcttttgcactgcctttaatctgcaaagaggttaaatatgtcaccttggcattgtatctgagctctcctctggcccagggcctaagcacattgaatagaaatgttcactcagtccaagtcagcagaaatcttttttttttttattctcccctttctcgtagacaccagcttttttcagttcacagcttactcagtcaaacctgatggttgtgactattgttaactatgattttttttttattcaaaacaccctctttggaaagatttaagttaatatttctgttcatttaataagatctagcaaagcagagcagtttatttcatctacttatcgtccaatcaactagtgccactttccacattttggagaagaatattcacatgttatttatgaaccttgcctttttctttcagagaatttttcacacagccattgagcaattagagtgctggcatttccttcctaggtcttttgagatttaatccccartagctyctcatggcacagattcacatatcaactaagtaaaaataatagtgatgacagaaataaaatgaatagtgatgcatctggacaacttgaaaacattatttatttcatttcctcttgactgttctttttactcagttgacttaaacactgctattttacttaagtttagcaccatatccagaactggttgggaacatttttctaccgagaagggcataaacaacttgttagaagatctgaagtgcacatagtcctcacttatccctctagaatgatcttcagtggagaaggagacccccataaataaatccagtagaacttcccagtaggcctggcttcctgagagatgtccaaccaggccagggtctgtttcttacggggctcacagggcatcttctgccaaaggctgagttagcgatgatagcattacctagggctagcctggcttttgtcttagtcatcaaaagatggatagaactttgaaaaacagagtgcatggtcttgatgattgttccaaaggtggggaggcaatctaataaagtgaataaggccatgacctgtggtttatatctgaccatatggaccctgtttatataagaccgtggtttatatccaagctttaccacaaaatagctctgtgactttgggcaaacaacttcatctctttgtgcctcagtctcttcattcatggaaatgggattataaaatcagtagctacctcagagatttgttgtaagaaktaagtgaagaaaagagccatgtttggtacattaaagcaatcaatcaatcgtagataatatgaaagtactggactaactatatgtccctattgaaactccgtagaacgggaactgactctagatattttctcagggtttcttccttgtacttatacgttttgctctataataaaatatgaatgccaggtgtatgcctctgaggcagcacagcagagtggacagagcatgggcttcagagtccaatgcatctgggctagaatcctgactctgcttcttacaatcagtgtaagctttggcagttacttcccacctgcatgactcagtttactcatctgtttagcaaaatggggataataatacacacaaatgaggtcgttgtaggaatgaaatgtgatgtttattaaatgccaagtatagcacctggcagagaagtaaacacataggaaagttgactggttgctcataaggaatctcgtatatcagtgaggcctctgttacatacttgcaatgatttctctggtagtaacaatggagatcaagaaggaaatattctttgaattgccttttttatccaaagaaatgtaaaagtaaatcggacactactattttcccctggtggggggcctcaacacgaggtatttattactatgagacttcactgctgcatcagttagtagcttcttaatggccaagtcaaaggaaaccaaagaaagtgttctatgccagcttgccattacacagagtgagaagaaatgctgctttgctgtcaattctgttttattggcccacttggacaagagggaaagcccccaacatttcttctttcttatctcttctaaaggcaagaatagggcttttgacttgctccaggggatattttttcctctctaactgaaattcaagtgaaagagtcttttttttgtttttttgtctttgtttggtgtttttgtaaacctctcccctatgttcctagcattgaaatgtaagctgctttttctggctgcatgtagcaggagcaggctgtcgtcatagcaatgaaagggtgtagagagactcctgcttcatgacctgctctgggaaataactcttagtctgctttaaaatccttctttagaaatgaagtctccagtcctggcttgtttccttcctattacacaaccaacttatgtacacccattgcagtagctaaatgtttcctttaaagatttagtgaataggtattttaaaaatcaacaagagagctgctaaaacagtggctagtttactgtggcatacaggggaaaaacaactgggaaggcaaagaaagagaaatagaaatggcctcacatgatacacatactgcagcaaaccctgcaataawtccatttttcaagttcccactgcttcctcccatcttcacgatgtgctatggtgtagtggttatagaggggaattctggggcagactgcctggacttgaatcctggcactcataccttctagttgttttaatctaatccattctgtgcctctgtcttctcatctgtgaaatagatataataacagtcataaaattgtcatgggaattgaatgagattgagcatgtaaggcatttattacagtatctaacccatggtaaaggttggctgctaagctcaggagcctcagtttcccccacttgtgaaatgtggataacagctaattcataagatcattgtattttttttttttttgagacagagtcttgctctattgcccaggctagagtgcagtgacatgacctcagctcactgcaacctccaccwcctgagttcaagtgattcttgtgcctcagcctcctgagtagctgggactacaggcatgtactaccatgcctggctgatttttgttgttttagtagagatggggttttgtcatgttggccaggctggtctcaaactccaggcctcaagtgatctgcttgcctcaggctcccaaggtgctgggattacaggtgtgagccaccatgccaagatgatcattgtatgattaactaaaataatgaatgtacatgctcaataagtagtagttattacaattctttttcatggttttgttattgaaacagcaaggttccagtctaggtcctgctgctcacttcrtagaaagccaatcactgagacaacaagtattgccaatgaagaaggctttaatcaggtgctgcagctgaggagatgggagcacagtctcaaatccatctcactaactgactwaaactaggggtttacatagcaagggaaaaatgtaacaatgtgtaagaaaataagaactaggtaggggtaaggaaacaatcatggtgaataagcggtcaggcatctgctgcagtgatctggtgagtttccattcttttmtacttttttagaagcctgaaggtcctgtcctgaggaaggaacttagataaaacaaatataagtttcacactttaagaccaggagggtcaacttctatgtttttcaaaaagatctgtctgtgggactattgggtaagtttcagtttgatctaactctgacatgaatggcctttttgaacttagaattcccagtgagtcaaatataatgaatagaggcctcagaattatcattgcataaatgtgaaccatttgatttctacagggggaaaaaaaagaattgtgactttttacatttataaagactcatctcatcttgattaacaccagggtaaaaagtattaaaacatcttatctttcattaactttttattacgtttctgtttcagttcctccagtgttttctaggtcatgcaattatgaaaataagttagcatktttatcttacatctcaaacaactaatgtattcagtgttctatcccatgcaaaattccagaaatgcagcaaggagcaaaactagagaggggctgagctcttgtggtgcttactatgtagttatgaaaatggtcattaatcaaaccatcacaataatgaaaactgcataggaccaaacataaggtgcccccaaatacaatgccatcttcatctttctagtgagaacatcctcaaccaaagtgtttrgccaaacagcatgtacaaatgggtaatatattgtaatgtacacttgggatatttaatctatggttcacatacatatttaatatgttaytttaatttaaatattttatacttattaacatgactttttcctttctcacatwtcatgaaacaattttgttaaaactcttcatacgcatctttaacaccaatgtgtatgttcactggatccacgctgtaattatctaatacagagcacatcatcaatccttctgcaagttgctaaacatctgctgatgctgcaaatttaatccccaggcattagtcctcactcgtggtcatgttctccacactttcattactgactagattgtttttccagtgctttttaaagggcgtatttaaaaaccacttgaaactgtaagtgtggctttctaaaactatgtgattccaacttgcaataatgaagtcatacctcaggaataatgactaaacctgctttaaatatctttatctattttttcatccattttgtcaaggtgaccttcctaagaataaaaataagcattgcttgagattttttttttttttgagacagagtctcattctgtcacccaggctggagtgcagtggtgtgaccttgggtccctgcaacctctacctcctgggctggagcaattcttctgcctcagcctcctgagtggctaggattacaggtgtgcaccaccacgcctggctaattttttgtacttttagtagagacagggttttgccatgttggctaggctggtcttgaactcctgacctcaggtgatcacccacctcggcctcccagagtgctgggattacaggcatgagccactgtgcccagctcttgagatgatttctaattgtttttttgaatagtactttgctgctcaaaatgaagaaactttggaagcacttgaatataagtcaaatccctcttttttacggcaggatttggtggcgtgagaaaaaacacattttatttgaacacatgccatatataatgatacactgaaataagtgttatgaaggcaaaacacctttgttccaagagagtatataaggatcctgacctccactcaggatcaataatggctttccttgatctgaagtctgaatagaggttaactctgtgtgtgtgcgtgtgtgtgtgtgtgtgtgtgtgtgtgtgtgtgtgtgtgtktttggtggtggtggctgggaggagcgggtgctggagagagaattctgacagcgtgaacacttgtgcaaagaccctggagcaagagggatcgtggcctatttgaggcactgagaggcagccagctcccgagagcaagggcagagcagtggaagatgtaaatctccataatactcccttccctgagcactaaatgtatgtgccctttgcttgattcaggtttaatgtatacttttaacgtctggatggatttctggttagtctcaaagccccaacaggcatgaccatgtctatccctagctcagactcttatggtggtaggttcaattaggaaggatgatgggcagttgaaggtcagatgcccagaaaagtcttaagtcattgactctgagtatatcatatacactcacagggctgggacaccttgatgtcagatggtgactcagcagagarctcaaaatagaagaacgtctttttcacccttcagatgactttagggccaaaccatagagctctccccagagactcattaatactttaaaagctctaaagcatcagtgttaacactggatcaggtaacagcacgtatatgttagccaaaatatgactaagagatttgctctctgataacaaggcctttgactattatgtaaaaacaaggtgaacaggaacgttctgagtctgtttataaagtacctataataattgttttgtttactacatttcccagaaaggaaatttttccatagttgtaataattgctaaaaatagcagtctacaggcttcctctgatataaacaaattcaacmgaagatacctggccttatttggatgcatggatgtacatactccaggaaatgataggccaagagtaataagaaaaagaaagtaacaagacaaacctctcctttttctagtacacatggtatgtctttcttagttcattaaactttagacaaagtgataaacagatcaagttgtcatcatctgccttgaaacccaaaaatattgaaacaagttccctaggcccagaagggaaggaagaggacttgtaaattttgctgaggctgccacagaaggagctaaccactggagggttcagactggagggttcagaaaccaggggaatgctaggcaacacaaggaaaattcaattagaaagacttgaagcaataactaccagcactaaaatttccagggagtcactgatgtggccaatatgaaagaggaatcctgttcctcctttcagaggtatggatgactgcgtttacagtctggttcagtgttcagacagcttattaatgcttaagagaaaaggaaagagaaggaagatagaaagaagaagtacarcaaggcaagaagtgcccaggggagcaggtrtgctaagttgatttaagtggcatggcaatatacagaacttcaaaaataaaatttatcttttaaaatttaaatgtaaattaatgttctaaaaaactataggaactgaaaataaatcaaatacaaatatctacttcgacctaatcttactgtaatttaagtttctaggaaatatcatagaaactgaagtggaaccaattacagaaaaagaatgcaaaataaaccatagtaccgaaaataaaaacatattctggtcgtttgtgtaggttccctaataaatctagacggagaatgatgtttttgtgttttagtgtatgccaaactttagacaccctcctcttttctaggagatacaaatttcaggagcgatatttagctattacacacatagcttttcatcagagatgggggtagctgacacacacatggcccattctgcccatacctttcaggtcaatctctgatggcttggctgggctgtttccagctagcagaaaggatattcaggccccttttccttgcttttccagggacagagcttgtagagtgctgagaaatccaattacaacttcctttcatggtgaaatccaattacaacctctcccatggtgaaagccaatctttttgatacaaaaggaaactaaacaaaagggcttcaggcaggggatatgcttgtgctctgccttctcactttgacaattatgcaggaaggttgcaatgaccttggcttgccttgcttaggaacaaaagtcataatcttctaccccctactcccacaaaaaggaaaaacgttttcatatctgattccaggagtttggggagtttcctcaaggatccattagtcaggcaaagcaaattttgagccaacacttgctccctcccacacacttttttttccggcaagatgacttttcttattgaacttggaatgccatgttaaatgataaataaattagtgaattatttaggccaatatcctcccataatctgttcccaacaacttttttttttttttttttttgagacagtgtctggctctgtcacccaggctagagtacagtgtgcagtggtgcaatctcggctcactgcaacctccgcctacccagctcaagtgattctcctgcctcagcctcctgagtagctgggactacaggcacctgtcaccacgcctggctagtttttgtatttttagtagagatgaggtttcaccatgttggctgggctggtcttgaacttctggcctcaagtgatccacccacctcggcctcccaaagtgctgggattacaggtgtgagccaccgtgcctggcctgtttctgmtacctttgtgatatccaatgctgtgtgtcaccctttcagccaacctgtttgcttgaggttagtgagactgtagtactgcttggagaggggtcatcctaaattcctaaaacctggttgagataaacggaaacagttctcaaaacagtaatttatgaaaatagatattttatgagtacttgacacaagtctataattgctgagatatttaawaataaaattactaaccacattctattcaaatctctgtcacttctgtataatcactgtactccactgaatgtgtgtaaaatatgtatttgcagcttatagggaaaaaaatttgcaaattttcagaagaatcatgcagtcaactaataggttcttagttgaagattagtggagtggggagtggtaaatggttatctttttcaaaacttaggacaaactttacactaggttcaaataaaagtgctatggctacagagttaatgaacccaccattcaaagtggccctaaatagctctgaaagcaaagcatttttacattatttgattcaacttgagttatctaattgcctatataatatgatagggacccaggccggacacaatggctcatgcctgtaatcccagcactttgggaggctgagtcaggtggatcacttgaggtcaggagttcaagaccagcctgaccaacatggtgaaaacccgtctctactaaaaaatataaaaattagccgggcgtggttgtgtgcacctgtagtctcagctactcaggaggttgaggcagaagaattgcttgaacccgggaggcggaggttgcagtgagtagagatcagccactgtactccagcctgggcaacagagcaagactccatctcagaaaaaaaaaaaaagatagggacttgataggaaggtaccctgagatatacaaaaatcagaagaattgacctttatgataggtaaataaaacatgtaaatggtttcatgacgtgtttggtcagatgttcatgctgtcttagctcattgaaatcatttttaactttcaagccattagttcagtggatcctcccaaccttttactggggaccaaacaattttgagctaattctctctaaatcaagggagtattctattagaattcagaagaaacaaagcacaaattcttaaccctaagtgtcttctttttctctctttttcttccctgttgcccaactccagctaatgggttttaaggactttataatgagaagcaggttaatgtcttactagaaaaacttttcaataatttcctaaaatatggggagaagaaaatagtggaagatgttgttataaaatagaaaaatgcttggttgaaaccttggtactcgtattgatcttgtactcattagctttttggataggcataggcggggaagagaagtatcagcatcatctcactgataaaaacagctgatgtcttcttacagtctgaaaatgaagccattgatttcaaaagcaaatgttttattatactttgaaaaacactctggattggatcattcaaggttatgatagcctgagataactgcagcctcaaactcccgggctcaagcaatcctcctgcctcagcctcctcagtagctgggactacaggcacgagccattaagcctggcttgaggggaaaagtcttttcccatggtgggaggagaagaattaacagctgtggaccagctgtgggcaagctgtgtcttttccttgcttgaaggcatcttyttaacattttctctctgaaggcataaataagcttccaggttttcaccctattttcaaagaacttttcaaactctagccttaaaatccattagggtttattacatctgcttctttcagaaaaggtagataataagtaactttgcaccactgaggtaagcaagcaattgtttcccatattaaatgtgttggccctcaccaaggtacatgagaagcttggaccacgatctgaatcctaaagggacttctgctgggactgaatgyttgcattagcggttcacacaagaactaaatgctcatcaaagtacaccattattccccagaaggtcccaacaccatgagaatgaggctacttggaactgttctttggtattatttgttgtttttcttaatcctagaagagaactaccccccaataaataattcttggtccattcacagagctgaaagcacttgaaattcctctcccaactagcagaatttaacaactgacttactctgttagcaaaagagaggcaatttccactgaatccaaaggagttttatattatactggtagagtttaactaataagggaaattcaaataagagcagtcagaggataaagccaagaactaggcattcaggggaaagaaattacaggggtagtagagaaacaaataaattaaggggtagggagaagagttaaaggcagaaaaagcagaggattaatctatctgataattacaggggctaggytttaaaaggtgtattgtcttactattaacaacatgaagccaatcattcagatattattaagttactgcaacgtcacaaacgccaggactttaggtgagccatcctaagagcagattcagggtttgtgaagccaagagtttatacatatgtttggaaccttcttttttaaaaatataaaagtcaaaatcaagtctagaactttgtatggaggctgcacaagtgaggggccttgaaactcaagcttcctagttttatggcacgtctatcctggccatattcaaatgtctataccccaaatacarcaaaaagttcagaaaaataaataaatgtaaatatgagaaaatcctgtgttctctttctctgagaaagagaaaatagtarcacagataccatagtaggacttgagcaaagaaaaataaatatggccaaaataatgtctcccactataacacaggrcagggtgtggtggaccctttctgaaggattggcaaatgtctgagaaaaagaacaggcaactgyctccctggatggatccatcccatctggagctctggaatgagacacagtgagattagtgagtggtatgataagacgagaaactctgaaaggcatgattaagakatggtgaaaggtggctattgcacaagcttgggtaagataagcctgggggatcctctaaatataattaaagtaatccctcaattacacattatagaaaaggaggaatggactagtttcgcctgagcaagaaagaaacagacctttaagaatgtgtctgaaaagctgtgcctccgggtgccctttggcttccatgctcctcactgctgaccaggcacagtggcaaagagggatggtcaggaagcactcactgaatggtagttctgtgaaatggaggtgagggtcacagatgggagtgcatggrtggtacacaggtgaagtgcttagcataraacctggcatatagtaaaatctcaggaatgtatatgccattgaatgagctactattaaatggtctaagacaaaaatgtactttttcaataaaataatactttgatgaccataagtgattctactactgagtacatttgagtgctattccacacaaaaatatttaatgtttacagccaattatatatggcttcttacaaactcagtgactcaaagcaactgtttcataatgtctcgagatctggtgggtcagaaatttgggcaggcctctcagaggtactcagctaggagatgagctgatctggagtggcacaggatctctccactcacgtgtcctgcgcatttgcaaggacagatgcaaagctgggattggtagaactgttgaagtgtcttctgtgacatgacagactcagaaaatggctcaaggctcccaaaatgagttttccaggagattaggtaaaagttccaaggtttcttatgacctagcctcagaagtcccagaacatcatttctatctcaatcaattggccaagtaagtcactaaacccagtccagattcaagggaaggagaattagactccacctctcaacaggagaaatagcaaagaatttatagcaatctctaccataatatttatacctattaaataagaaatgtaagaaattgtctcaaggcagttactcatgtgagttagaatagagttgacatttgtgggtgtttggctcttaatgggagacctatttctgccatgacaaatgattcctctggagatttgttttaatggtacatgggtcagccaatagaaaaactctaggcatttgaaattcaaatgctggatgttctctataaaatgctgtctagctatcatcttttaaaattccagctgaggttctcctgaaagtttggtaatgagacaccctgttcctaacagaaggaaagggctctccttccagttacctatcatccctcatctttaacctctctaaatccataaaaagaaacagtgggatgaagaaaagaaagaaataacctaaggactctagtaaagggatgaattaaagtgtctgaattattcattattggggttattaagccattttctgccttatgcatgtttcaaagatatgataacatctttcatttcatttttacagttggtgaaattaccaaataactataggatcacatttgaatctcaaaacaactccagaagatagataagaaaatgtaatattacctttcctgttttgtagatgaagaaaccagtgacttgatcaaagtctcttagctggtaaaaggcagttcaagtctggaacttagatcttccagttccgtaccaactgtcctttaaactatgcagctgcctttgaataagctcacgcatttgagcaaaataatattgatttagtttcacatcaatactgcatatttaagtctttgagaataataattctgtgaattccaaaatttgtctcatttttgcatttttcatctggagttttattttctatttctgcaaaaataatctgtattttgtagtcagtgcacaccaaactcgaatgtctcaaaataaatgactttttactcatccaagaataaatggtattcatcatacttagcaaggacatcatggttttgatttttcaaagtactttgcaagcatcagctaattaagcctccctgagtcttcagtatgacagttgttttcaaaatatctctcatttcccaggaaagttctccattctgtcttatttatacaatcagcacatttgctcagttcttaaaataagaagctaaaggccatgaaattatttttgatcaatatgtggcaaatacaattagctcagtgagacaaaaatgyccagtgactagtctaaaggacaacgtggaacayaatggaagaacacaaggcgttttaaagtctagatactggattgtcccacaaggtccttcaaaaataaaacacaggcatcttctttataattgaaacttgaaggggtttcctgcttggatcattctaaatgacatgaccatactctgcgtttaaattttgttttcaattacaggatggaaaaaaactcttaaaaaatagttccatctttggactcagtaaaaatcagggaccattcagtaaatgttggctctcaaaaagcctgcacaagtggccatctgaggttatatgacaatccctagacttgttctatgccttaaaatatcttccatacagctacgccaggattctcagcattcgatagctctttttgggttaagaacaatgtgaacatacctcttacctgagaatagaaatacattaattcaggaataatcttttttcttttttttgagatggagtctcactctattgctggagtgcagtggctcaatcttggctcactgcaacctccacctcctgggttcaagaaattctcctgcctcagcctcccaagtagctgggattacaggctcatgccaccacgcccagctagtttttgtgttttcagtagagacggggtttcaccatgttggacaggctggtctcgaactcctgacctcaagtgatctgcctgcctcagcctcccaaagtggtgggattacaggcatgagccacaatgcccagccctaattcaggaatattcctatttcctcggtatggtttagatgcatgcaaaaaacaaagatttaaaagtatagaatataggataggtgagtttgtgtttaatgagtgaactaaaagtaaatatgttctggaactagctcctgggaagcttgaaatcccctaggggaggaagatacggaaaaggggaggagaaacactaaggttcttttcccttatatcacacttaatacaagacatatgtagttaatacaagatataaatgactctaatgatattactgatgacaggcagcaggcagaacaatgaaaataataatcatttgcatgtgtaaggtacttcagagtttgcaaagagcttcctcacctcaccttgcaaggagctacctttgacatyggaaggaactggtattcccatcctatatatgaagtttggagagagaaagtaatttgttcaaggtagtatttagtacttggcaaagccagggcccaaagccagaacttctggcttctagtctgtagcctgttcactagtctgtttggggagaatattggatactgagtccaaagctcagcgtttctaattcttgcccacctcttaagccttgtacatttggccaaataatttagactcttcaaatttctgtttctttacatttaaaaattctgtccctcctttcttcattgaatcaaatgagacagtatataagaaaacactttataaactgtgaaatgctaaataaatacaaggaatgtataactaaatccatcttaataagttaatattccttggaaccctgcctcaagacatccttacagttaaactttcctcccttttgtgttaaagaataaagagttcctccttctctttggagttaaacctttcacatgtgctttaatagtagaccagtaaatatgtatccaggatttaccaagatggtattgtctcacttaatcttcatactattttatagacaatgagctgaagcccccaaaagctacacaatttgcttatttacgcaaattaagtattacagcctatgacatcctgtttcagaacttatgcctttaattgttatgaaatattgtcttgctaatggttttggcaactggtctgttttgccttattttggttttcggttgctgtaaaacagtatgctctcacattaaatggcttaaaatcacatccytgtatttgctcataattctccaatctggattgggctccactgcatgattcttctgctgattttgtctggagttaattcatctggcttcagtgagctaggaacacatctggggctgaatcatccaggagggtctgttatcctgcaaggttccagccacatggtctctcatcattcaatagtctgggtcaagcttttgtacagcatggctgatagcttccaccaagaggaaaaactccaatgtgcaaaggtttaccaagtttctgctggcatcatgcttgctaatgtcacattggtcaaagcaaatcacaaggttaaggcccacatcatagggaaatgaagcccagaagttgtggtttactgggggtcatcattgtttaccattatctcctctcttaccctttatcttcaatttttccttatttacctgtcttttcccttcagcacagaagggaaatctggggccgggcatggtggctcatgcctgtaatcccagtacttccagggggctgaggcaggtggatcacctgaggtcaggagtttgagaccagcctgaccaacatggtgaaacccccatctctactaaaaatacaaaaaaattagctgggtttggtggcgcatgcctataatcccagctactcaggaggctgaggcacgagaattgcttgaaccctggaggtggaggttgcagtgagcctagatcacgccactgcactccagcctggaaaacagagtgagactctgtctcaaaaaaaaaaaaaaagagaaagaaagaggaaaggaaaggaaaggaatctgaatgatcacattcaaatacaaatataaatttcctgtaactgcatattccctttaagctaccacgttactctcctttgcacagccaatcatttttagagtggtctacactcactgccctcacttcatcactgcctgttcattctccaatcactgcaggctggcatccaccgacaccacagcaacaaaactgctctccctgagatcctcaataacctctgcacttccagaggcaatggataatttcctgaccttgtttgctttgaactctctgtgacatttaacacttcccttttctcatgtgactcttctttctctcactgtttgtatctttagctcttcccatcctctgatggtgcctaatgatcttcactccccagggttctggctccagctctctgctcaactggttgaataactgctcatgctacagcatgcaagctacatctgtaaccccaaactccatgcttacctccagacctatctacccaagtatctactagatatctctactcaaattcaacaagcccaaaactaatccaccgtctgtcttctaaaaccaaaccttcctcctataatccttcaccttggtaattaataccaccatttactaagttgttcatatgagaaatgtgactcaagacttttccttctcatattcctacaatatctaattcgtcattaagttttatctgttctttttttaattatttcttagaactatccagttgtgttttggtaaatgagcaacccattctctgagagagggagaggtgggtgacacttgatggttttcatggtgtgactgatcctcccaccacaactgattttgatgcaggatattttcttgaccccttcacggaactcgcggcaggggtgccttgtttactcagcccgccctgctcaatcccttgcaggagggagtgcgcaagcgaatgactgcaggaacctgagcgagcgaaggcaggaactggccactttggcaccagcaggagcaaactccatgtgggcccctcaccagcgtccaggtgtgggcaccagccacgccaagccccagagggcgtgtaaccatactcttagctccaccgtccgcagacagcagtgtgttatcagctcagtgagccctttgcctcatcacgtagggcaactgccttccgccagcaagggcaaagggccagtgcgaccgcctttttggatacctgcacgtagtgtgtccgagttcttgtccagtgcccaagaggaatgaggtcacacagatgaattgaaggatggcgaatgtggagaattttttttttcagtgacgaaagcggctctcagtggagaggtgagctggaaagggaatgggaagggaagatccctctcctctgaagtcaagccacctctctcctatgtccaggcgcttcttctcgacatcaggctgcttcttccctctgctggctgagttctggggtctttatgggcacaggatggggacggggcaggccgtaggtagttttggaaaaggcaatattcaattggtaaaaagacagtattcagaaakaaccaatcgggagagaatggaagttctcactttgggctgtgggtttcaggcttttcggcttgaaggtgggattttgccagcgacccgcccctgtatgcctacagtttctctgcctcctgttgctatcaattttaagctaccaacatgacgccactgaacagaatcgggaagagacatgcggaacacatattatatagtatttccaccaacagatataatagatgtaaataacctcaaaagagtagataatagtaaaataattatgaagtgatgagtttctactattttctttgcttttaacataattaaattatacatgtatgtaatttaatttttaattgatgactttaacaaccaactcaaaaaagtcttgaaatgtaacaaacagctctcacaaaccagtacaggttggatctatccctcttttctccactcctaagaccacagcccaaatgtaaggctctgaccacctcaccttgatgttacaattgtctctcacaggtcatgctactggtctgtcctccacacagctgtcacacatacaaatctggttatatcatcacccctgtccacacatgtgtgyacacacacagacatacacacatgcgtgcacacacagacacttacaataattctttgggtccctatagctctatggctggaatttttaattccttgtttaatgcactatgacttttacaatatggctatctgcttacttttgagccttatctaccccagcccacttcccctattgacagcctagagacccaaatattaacatcctagagactcgatgcttctgcaacttcacccatgctgctgcctgccaccctctagagtacatctagctgtgtgagaacatccttcatacagctaactactgtttattagttttcaaacctcagatcaagaattaccttctctggaggtcatctctatacagtagttaagaacactgtagttaagaacacagacagacctgatatcaaacagaagtgttaaatatctgctgtgccacttcctagctgtgtaaccctgaacaagttacttaatctttatgcccgagtttccttactagtgaaatgattacaataatgtgcttacctgatagaactgttcagaaggtttaaagaatatgtgtgtgcaaagctcttagaatagtgcctagaacttaagtactttggatgtagtaaagttagctattatcaactacctaatttaaaaatgcctcctatctctctttccattgcattatgtacataatcatcacattacactatatgattttatataaatatattatatatttatagatacattattagtatatacatatatagatacgtgtatataatacatatatagatacatgtatataagtatatagattayatatgtacacatatagtatacatttagccctcaacctgtgggatctgacactatctccaggtgcacatacatagtatatacacatatgtatactatatatatatatatatacttatatacatgtatctatatatgtatatatttatctatatacgtatctacattacatacatatatgtatctatacacacacacacacacacacacacacacacacmcatatgtttcatccacggttcctgtctcataattcccatagacctttttataatgttataatgttggtgcattttaggcctcataagcggacctcagaataacaggatttctctctctctaatcttctatttttttacctgctactttttctccccaaggcaggactctaatcttccyctgcctttacctaccttgtgtgattgtaggtcataagacccccatttcagaaggggttctgccccatattctggaggaaggaatgttgcatggagaggccaagaagaggcccagcacagtgatccatgtctgtaatctcagcacttttggaggccaagatgggacaatcgtttgagcccaggagttcaagaccatcctgggcaacataggaagatcctgtctctacagaaaaaaaaaaaattaattacccaagtgtggtggcaatcacctgtaacctcaactacttgggaggttgaggtgggagcatgcttgggcccaggaggtcaaaatcacgccactgcactccagcctcacagtcagagtgagacccacctcaaaggaaaaaaaaaagaggccaaaaagaatctgaacagatgggccttaccgggtttccccactcagcctttgagtactaaagcataccctttttgtctaaacacatttctatgtggttgtcaatggtgcctatcctttcatgaagtctccataaaaggcccaaggggacgaggtttgaagaaattacaagataactgaacctatggaggttcctagagggtgtgttccggggagggcttggcagctctgtgccccttcccccatacctcaccctttgcatctcttcacttgtatctttttgtaatatcctttattataaaccagtaaatctaagtaggtgtttccctgagttctgtgatgcactctagcaaattaatcgaaccccaagagggagtcatggaagcccaacttgaaaccagtcagccagaagttctggaggcctgatcttgtgactggtatctgggaaagggaagatgtcttgtgagactgagccctcaacctatgggatctgacgctatctccaggtacacagtgtcagaattcatttggaggacactcagctggtgcctgctgcagagttgattgcttgcatgttgatgacaaaaaatctcccacatttggtcacagaagtcttctgtgttgattgtagcgtggtgtgagaccacaggaaaagcagttagagattttccacacccagaaactcttaagagagaaactatgtgtccttgtgcttaggcagtgtctagtaagtactcaatgaatgaatttaaaaaaaatggattagtgatgcaagttctggccaactggacattctttccttttgattcattcagctacatttagatttagggaaatgaagggaacttgtgagatcatgtgagatcatgcggacagattaaaagggaaatattttctcaaatttaattagttatgcatgttgctgcaacaaacaaaaagaaatgagccttatgatgcaaaacacgtttgataattcttactccccttttaagttgtaccatttgtaagaaaatagggtagcattccatgtgcctaattccactgttatgtgtgatgaatgtcggaaayactcctggcattaaaaggagcctaaatgtgtggccagaatggactttaatgttccactggacaatttttctgacctcacagcaaaacttaaattacattattttctgagaatctaagttgtttattcaagaatcacaacttaacttatcaggaagatgagagaaaaaagaattaaaatttattgagcatctcctaggtatcaggcatttttaccagtaccatttcttctaactctcacaaaactgaattagatgttttattagtcaaggttctccagagaaacagaacmaataggagataggtaggtaggtaggtaggtagatagatagatagatagatagatagatagatagatagatgatagatagatagagatatagataatgaggacttagtttacattaatggagccagtcccaagatctgcagtcagcaaattggaaagccaagagagccaattgtatagttcccgttcaagtctgaagacctgagaaccaatgatgttgagttctagtccaagtctgaaggcctaagaattggagggctgatggtgttaagtcccaatccaacagcagaatatcaatgtcccaactcaaacagataggcagagagagagagggaattctcccttcccctgcctttttgttctattcaggtccccagtggattgaattatgcccactcacattgggtagagcaatctgctttattctgtctacsaattcaaatgttaatttcttcagaacacaccctcagagacacacccaggaataatgtctaagtagatatctgggcatcccatggtctagtcaagttgacatataaaattaaccatcacagatgttatccccatttttagatggggaatctgaggcttagagggctaagtaacttgccaaagatcatatagatggcaaatgttgctccagagttcaaatgcatgtctctctaatctgaaagcaccagtctgcttccgctaaaccaatggttctcaatcagggcgattttgccccccatggaacatttggcaatgtctggagacatttttgtttgtccctagctggtgggggatgggggctcgctactgacatctaatgggcagaggacaggaatgctgctaagcatcctacaaggcacaggacagccccccacaacaaagaatcatcaagccaaaatgttaacagtgccaagataaagaaacccttcactaaaccatactattttgtatttctatagttttcaaaaccagtagaatagtaataacatactgatctaaaatataaggctaggcacagtggctcatccctgtaatcccagtactttaggaggctgaggtaggaggaatgcttgaagccagaagtttgagaccagcctgggcaacatggaaagaccccatctctacaaaaaaaaaaaaaaacaattagctgagcataatagtttgcacctatatccccagctacttgagagtctgaggcaggaggatcacctgagcccaggaactggaggctgcagtgagctatgattgcaattacactccagcctgagcaacagagcaagaccctgtctcaaaaataaaaataaataaataaaataaaatataagtgactatagttccataactctaataaatatttgtggaataaatgaataaataagtaaacattgaatttaaaatgtagaggaaagaaactgcgtttttcaatgattctttacaattagcattcactargaggatagaatgttttaaattatcatcgctaatagagtccacatatttactttaagcatgaattacyatatataaaatattttattttaatacaataaaaatcatggaatatattttagtgggtttagtagtttaaggggaaaagatagcagcaatttaggrttcatacaattaatggaattattttcaattttagaatcctaaaatattagggttagaggatcatctaggtctcactcttcattgttcatcacttgagaaaactgtatctaagaaagggcaagtgactttcccaaggtctcctggcagtcagggacactgctagagccagaatccagctctcctgacagtttaatgcttttcttgttttaaggtgtttttcaatgtattagagttttggggcagcggggggaggttgctccatgtttttacttaaatacatttttctttcatggaaaattgaattcctatgctttttgccttgtttaggccataagatgttttattgaaagaaactttcaatatcaagtaatccaaccaaccttctaagataagccttttccttcaacacaaagaagtgcattttgccaagtacgtaccatcttactccttaaaatgtttggaactttttgtttaaaaactcaaactcaaagtgaaatctcaatttgtcacaatggtggtttttttgtttgttttgggatttttttagtttttgtcccccttccttacacctttgtgtaagaggtaaaatggagaatttgcaaaataactagaaaaaagctggagtgggagccaggaaatctagcttcaatcccagctccccttctacagagctcagtgatctccagcatgtcacactgtaggctttctaggcctgttcttcatctgccacatcctggggttgttgtaaagatcaaataaggtaatatcccatttgtaaatttatttggtaaacccaaagcactatggcaatagaaatgtcaagtatattttatatgccattacccgttctaaataaagtaaacacccattccattgttaatattctaaatttctccttgttatatgtagtcattttcagaaggatcacttagaagaattatacttgagtctccaagtacatgtccttttcattaaaactgggaattgattagtccagactagtaaggttataaatgatttaagtttctccccacacccctgattcaaccctcccacccccaccccaccacacacacacacacacacacacacacacacacacacacacacacacacacaataccaaatcactttctatgtgcagctttactctctattcttccaactgactgttccctggtccaggtggcccaccctggaccacctggatttgaatagtgagataggtaaaaatgtgttcttgttcccaatatgatgaggaagtctatgctatagccctgttttcttcaataaaaacttcatttgctgctagtttgagaggccgaggcaggtggaccagttgaggccaggagttcgagaccagcctgggcaacatggcgaaacccctgtctctactaaaaatacaaaaattagccaggcatggtggcacatgtctgttattccagctacttgggaggctgaggcatgagaatcacttgagcctaggaggcagaggttatagtgaaccaagattgcgccattgcactccagcctgggcaacagagcaagactctgtattaaaaaaaaaaaaaggaaaaaaaaaaacttyatttgctgagttagaaccaaagacccacaaagacccacaggaattcctatgtgtcacactaaaaatgatgatgataatgacagaggaaaatatgaagaaaatatgaaatggaagtcatctgttgtgaaatggagatgaaacatatacatatgttgccactccctgctaaaattccagaataatgataggaaaagaatagtaataatatagactcacagtgactgagataaaagaagaggagacaaagaagacaagtgtcaacacatctttagaagatggaagactgacttagaacagggaaagcttaaacctaagagtctgcagagaaggatgccatagacaaagaaggaagccattcacactgaagaacccatgcaagtttccagaattggaggcaccaggtgatttggaaggcagggtgaggatagaggctgaaatctggagtattggttgaaagcctatcagattaactcttagattcaagatccttcctcctgcctgcacagccaggggacttccatgtttcaacacaaacaggaaaaagcttattctctggctctgcactcagaataaacacaatgtcaggtgggaggtggagccatacagaaacctagggactaagtgaaaaatcagtgtgtgcactgagagaactccagtctcttcaytgatttcacagaatgctagcaaccaggtttatatttgcttctcaaggtaagaggtatgaatttctcctctagagaaaagaaaatctccctgtaatatctgtcaatgacatttggggtgccccatcaagactgtcaggttactgctccttggaagccctccaatgctccatggaactattctttggaagccctccaagccctgtccataaagttctaattggctttctagtgactcactgcraagtattaatggacagccaaatacatcagacattagagaaaagctttcaacaggaaaaacaaagatcaaaacaaactaactggggaaaaaaggaacaagaaggaaacagaaactgcagggtgcagaggaaattttcaaaatatttgattaatatcctcaaggagacaagaacatatgtcacactaataaagaacaggacaatattaaaaagaagccttcgggaaataaaaaattaacagtatataagcatattctcactcatatggaagcgaaaaagttgatctcatagaagtaagaagtagaacagaggatacttgaggctgggaagggtgaggagaagaaaggaatagggagctatttgttaaaggacrtaaaactatagctaataggaagaataagttctagtgctctataccactgtaggatattatatatttcaaatagctagaaagaagacactgttcccaatacaaagaaataataactgtttgaggtgatggatatgcaaattatccttatctgatcactatacattatatgtagtgaagcatcactatgtaccccatgaatatgtataattgttatttgtcaatttaaaaataaaattaaaaaagaaaatgaagtataarggtataattttttttaatcaataaracaggccaggcacagtggctcatccctgtaatcctagcactttagggggctgaggcrggcagatcactttgagctcaggagtttgataccagcctgggtatcatggcgaaaccctatctcyaggaaaaaaaaaaaaatcaataggagagatgtaaggtaaaagtgagaaagtttcccagaatgatagacacactgttgaagagaagagcaaaaatgattagcaaatcggagaatcaaccccagaattctgatatttaactaatataaattctagaaagaaaagacaaaaaatagaagggcaaaaatcattaaggaactaacacataaaatgctccccagaactgaaatatataaatttccaaattcaaagggmctaatgagttcctaaactaaatgtaaaagtatccaaactaaggcagagatggtaatatttcagaagactagggccaaatgtaaaaacataaaagcatccataaagaagaaaaaaatactatgttcataaaaacattggggaaaaactcacatcagagttcttactagcaacactggaaattataagaaaatagaccaatgttttaaaaaaaattctgagaaaaaaatactccaatctagaattctatatctattcaaactatgtatcaagtaaagggtaaaatacagatatttttctaatatgcaataccttaaaaattctgtctcctgtgtgtggtttctcaagaaacttatggagtatgtgcttcatcaaaatgagggagaaaactaagaaagaaaaatatatgggacttaggaagcaagaaatcaaacagaagaaaaaagacaaaggggattaccagggcgtggtgaccccaggtatggaccccaggagaaaagctgcccagcagccggrgatacaccagtccaaargaagcaagaactccgaggctctgggagtgccacttccaaggggcgaaatggacacgagggatttccttacggggttgttgatgtagctctgttgttgttattgttgttaccatattaagaggaaattttaaattttgttggaaaattcaggaagaataagtgatgggtgcacaaaaaagtacgtaaaaagctttaaaaggaaggcaatttttaaatcaaaaccaaagcaaaatatcgttcaagaaaataaatgtcagtgtggttcaacacatgaaatgactacttggttcagctgtgaagaatatttacattgtcatgaatgttaaataaaaatttaaacaagaattatgataaaattattttaggaagagaaaggaggaagagaagtgtgtgcgtgcgcgcgtatgtgcgtgcgcgcgtacgtgtgtgtgaagtgatagttgttgcaatattaaatccctagagtaatatttaatatattttaaaatatccatttaagcacattgtttagaaatattggaataagtagcagaagaaactgctcagtttctttataaacctcaaagtcttacttaaaactctgtgaatgtgtttatgtttgcaaaaaataatttaaaggagtcatctagtatttctgggcgatccataaaacctctattaaatactaaaagctgcagccctaatcccagttacaggtcagactaccagacttagggatatcctgcaaaaaaatgtaggctgcccactactttcaagaaccacaataatataactggtgtgtgggaaaagccttagacccagagttcatctggagacaacttacttaacctctctgagcctcacttgtctcgtttctaaacttaaagagttcgttcggaactaactaaactcaaatgaaaggcaaataccaaaagtgagacagatcaagcacaaacgccagcatcccttacagaggacagtctcaactcagatgcagccaactgctgtcatgaagacctgttgttgctaagaggtcagatggttcaagagaaactggaaatttggattttgacatgaaacctctggaatttaaaatactrgtttaaaatgcacagtgcctaccaaaccaaacctatctgcaggccacccctaactcacagattgccagtaaagacctctaaatcagatgaacattaataccctctaggtctattactctgtggcagtgcagtgctgcatgactaaaaatcttcactgaatgaatgtgtttctttaccactaaacaggcagcgtgtttttactcaaccttgacatatgacttttttttttcattatgaatactcatgaatcttaagacctgagatctgcacagagtctttactcgaagaagtactgtcataaacagagataggttctgccgaacatggccggaccgaaaaatcagggagcaattttcacaggtacacaatcgagtaagaactgccatcaatctgtcttttcagacatattaatccacaaagatagaaatcacttttatatgccaaggacaatatcaagctcagtatttgctaagactatctttcagtttttcatgaggaaacttttccctgccactgataattatcttcttggttcacagatctggaaagcatgaagactgggctttttttcctatgtctcttgggaactgcagctgcaatcccggtaaatttcctttcttctgttattacatctctttctcctgacatttaatgcagaaatcctccatttaaaagaaaatgttcttatataatggtttgaaattctctttttattttaattatattctttattgcccaagtaacaaacaaataactggaaaactcaagataaggtacttaaaaaaaaattttagaactatcaggttctacaggacacaataaatatgcagcagaaagtttgggctatcagtttattagccatagaatcagcccaaatacacaagagacaggaagaaataaattctcccagggaagctcatcacattgttattataaacccaagattttaggccaggtgcggtggctcacgcctgtaatcccagcacttcrggaggctgagatgggcggatcacctgaggtcaggagctcaagaccagcctggccaacatggcaaaaccccgtctctactaaaaaatacaaaaattagccgggcatggtggcgggcacctgtaatcccagctactcgggaggctgaggcaaggagaatcaattgaacccaggaggcagagattgcagtgagctgagatcactccactgcactccagcctgggcaacagagtgagactccgtctgaaaaaaaaaaaatacttagggtgcatatccacggtctccagcagcattttcttcaagatcaaatagatgctggctgagaaattttgagagtctataatgaaaacagaaaccaatggtttaggcaggaaacgatatggtaatcataaatcagctcctaattcacccttgggaggctgtccaagcaagtatgctgaaagtaggcagggctagaatattctcttcttcatggtcagatatattggccccatttgcacagcaataaagcagctgtacacaaatcagatcatttgaaaccgtgtcagtggcctcaaaacaaactgaaagttaaaaaacaaatgaaaccatagcatgaatgaccactggagatgttctgcaaatgattcatgtaatccttcattaaaccaaaggattcgtgccatattttttttctttttcaccaaatggaggaatcagcctcctttaaagagacaaaacaatttctcaatcgtccctttcctcccttcttctctaggtctaaaattctgtccttgctttttggataagttgttagctagcttctggttgacaaatgtgtcagcaaaaacaaactccatggcacccagaccaagctgttcttggaagacagagtttatacccaccatcaggaatcatgcttaagtagtatggagctactctagctgaaattatacattacaccctgaaatcacaaaagcgggacaagttaatgttcaacactgaaaggagttcccacaaaaccgttgttttctcctgaaaatgtgctttgtccttgtggctgttgctgttatgtaaataaacattaaaaagtgtctttgggccacgcacagtggctcctacctataatcccagcactttgggaggtcaaggccagaggatcgcttgagcccaagagttcaagaccggcctgggtaacatagtgaggccacgtctctacaaaaaaataaataaaaaattagccagctgccatggcatgtgcctgtagtcccagctacttgggaggcacaggagggaggatcccttaagccagggtagttgaggctgcagtgagccaagatcgcacacagcactccagcctgggtgacagagcaagactgcctcaaaaaacaaaaaaagtgtttgaaccaaatgtttgaatgacacacttgcatttagacacattccagatgtttcctttctgggacaatttgatatcatgtaaacctagccaaactgctagaaagctaagtatcttctcatagaaatgacctattaaaaatttgtataattttccctgcctgcctgaattctccagatgaaaatggattctgtgtagttgggagattccaaatagatttccagagttaaataaatagaaatatgcccatagtgataaaacataatttcaattgcagaatatttctgaaagtaaaagagctgccattttttgtgtgcatttcttcctgcttgggcagtaggcggatggagggggagagagagtgaccagttctccactaataagcctaaaatctcccccatccattgccttctatgatgccccctgctggcagcttaccaaagtggccaccattctttctccttttcccccttctttaaggcttctttataaactttttcaaattcattacccatcttaggtgaaaaggagataagaagcaaaggagcaaaccaaacctaatatgaatcctgtactttggccagaagccgtggctcacatctgtaatcccagcactttgggaggccaaggtgggcagatcacttgaggccaggagtttgagaccagcctggccaacatggtgaaatcctgtctctactagaaaaataaataaatacaaaaattagcagggcatggtggcaggcacctgcaatcccagctactcaggaggctgaggcatgagaattgcttgaacccagcaggtggaggttacagtgagccaagatcaccactgtatttcagcctgggcaacagagtgagactctgtctcaaaaaaaagtttaaaaataaaaaataaatcctgtactccatgactattacacagtcagcactacaggacctgctaatggaataaaaataagttaatccaaatagaatctcagtttcatacttacacctggataggccatctgagtgtccagagtatctctctaataaagatccatggtgaatatctgcctcagatactgggcagtttatattattgacacagtgtgacattagtactagaaatagtaattttcagttgggcaactccttaaaatttataacatattttttatacataatcttattttgatatttctgctcacttgatatttcttgccaccttgagagatggcagggtagaaattaatgaccttggccggtcatggtggctcacacctgtaatcccagcactttgggaggccaagacaggaagattgcttgagttcagaagttcgaggccagactgggcaacatggtgaaactccatctctacaaaaaatacaaaaattacccaggcatggtggtgcctatagtcccagttactggggaggctgaagtggaagggtggcttgagcctgggaggcagaggttgcagtgagccgagacttcatcactgaactccaccctgggcaagaggctggagttaattaattaaaaattaatataatgaattaattttattaatgttttttaattaataaaaaatattaacgacctgtcaaaccacagatagaaagtaaatagcagaggcaagacttgaatggaggcctcttacctccaagttcagttgttcaacttccccatcatgcatcactgcccagctctttatccaagtctccaatcttgctagaaataggaccatccctctaatagaaattaatactccagacatgcccttttctacttaggcttagtgccctgtctcacacagtctgaattaattctaattttttttgtttttgagatggagtttcactcttgttgaccaggctggagtgcaatggcacaatctcagctcactgcaacctccgcctccagggttcaagtgattctcctgcctcagcctcccgagtagctgcgattacaggcacccaccaccacacccagctaattttttgtatttttagtagagacggggtttcaccatgttgtccaggctagtcttgaactcctgcccttgacctcaggtgatccacccacctcggcatcccaaagacctgggattacaggcgtgagccaccatgcccagccccattaagatttcctgaccaacgttaaggccaatggcgttaagaaatcaaataaatattgataaaaagtttataaatttttctgctaattatcggtgggtacttaaattaggcaaatgtacaatactatatcctatggttaattttatttgacttcaactttctgctaaacaacactttccaaaattgtaaagtacaaatgctttgcaaaagtttaaaaaacacagaaaataatttcaaaactcaaagttaccattatttaaatgcattttgttttattttcacccagtctctgcataaataactttttcttaaacacaattgagattctgcttccacttaacattctgttctaggcatctgcttatatcctcaaaaactctagagaatatttttaaattgttggtataaatgaagtatattsctactaataatgatgacaacaagagtaactagcaaatttgtaaattagcatccagacatgaataacaaaaaccagtttttaattttttcagacaaatgcaagattattatctgatcattccaaaccaactgctgaaacggtagcaccygacaacactgcaatccccagtttaagggctgaagmtgragaaaatgaaaaagaaacagcagtatccacagaagacgattcccaccataaggtaaaagtaacatcatttatattaatacaattttttaattctccaaaggtcttagtttcaaagcatggtaaaagagattatgttatttatgtctcagtttaatttttttaaaacatgatgatcacctcaactgcctccaatcactagaagaatgatgaggattaatgagttttactacttgggctgagctgctgtatacttgtttcattttataaaatccaaattcagtttaaacctgtggctacagaktgtgaggaatattataaacatgtttacatgatagtgtgtgaagaaraagaataatgaatattaaatgttaccttaggcataaatatggttacattatcatttgtttgaagaatgaacttttttttcttttaaggctgaaaaatcatcagtactaaagtcaaaagaggaaagccatgaacagtcagcagaacagggcaagagttctagccaagagctgggattgaaggatcaagaggacagtgatggtsacttaagtgtgaatttggagtatgcaccaactgaaggtacattggacataaaagaagatatgagtgagcctcaggagaaaaaactctcagagaacactgattttttggctcctggtgttagttccttcacagattctaaccaacaagaaagtatcacaaagagagaggaaaaccaagaacaacctagaaattattcacatcatcagttgaacaggagcagtaaacatagccaaggcctaagggatcaaggaaaccaagagcaggatccaaatatttccaatggagaagaggaagaagaaaaagagccaggtgaagttggtacccacaatgataaccaagaaagaaagacagaattgcccagggagcatgctaacagcaagcaggaggaagacaatacccaatctgatgatattttggaagagtctgatcaaccaactcaagwaagcaagatgcaggaggatgaatttgatcagggtaaccaagaacaagaagataactccaatgcagaaatggaagaggaaaatgcatcgaacgtcaataagcacattcaagaaactgaatggcagagtcaagagggtaaaactggcctagaagctatcagcaaccacaaagagacagaagaaaagactgtttctgaggctctgctcatggaacctactgatgatggtaataccacgcccagaaatcatggagttgatgatgatggcgatgatgatggcgatgatggcggcactgatggccccaggcacagtgcaagtgatgactacttcatcccaagccaggcctttctggaggccgagagagctcaatccattgcctatcacctcaaaattgaggagcaaagagaaaaagtacatgaaaatgaaaatataggtaccactgagcctggagagcaccaagaggtaaaattattttaaatggtccttgtccaataaagccagcattatcaataaacagtcatgacctttctctgtgctctcacagtgtcctgtatggatgtctactagtacattactaaaatatattacagttatttctttttaggtctatctctatcattaggctgagaatgcctgttttatttgagttcccgtagatgcagatcttggatttgagtgttgtttatttaagaagcacagggaacaaagaggagtgcagaagtaacacaagaaggaaaggaagctaataaaaggaacatcattcaagccatgtaaagacattttctcagaagtattccatttggcgactgaaggagctagggtacttcttttggctgaggattgctagaggggtattaatttcccagcatttccagcctgtcccttgagtgagccaggtcaatttccatgatttttcaggcacggaaatgcagatattggccattgaaagtccctggaactagctggaatgataaattatgacagatctgaaggataggagatactggcaactgctgctctaatgccttgaaagcagatgccatattgttttcgagttgaatcaccagtgtccaacaaaatgtctctgacataacaaaagagccaacaatgtttgttgaattagttataaagattaaggtcctactttattaagcaaacacataccaaaatgataatctggaaactacagcaggatcggggcagggaggaagcatatttggagctttcattcaaaatcctggcagccacaaagtcctgtgccagcaggacttggcacagattttggtacacaaggtcaatggtaacctcagttactgagaactctgctgccactctaacgtaggagttttcttataccttaaaagcctggtatgaaagctttaccaacaaattcagagagatttccaatgtaactctggcttaactacaaaatcacaagataatactacatttctagtgttttctcaaatccaaagaggagactccaagtcttattgagtaatccccagagataacgcactaaatctcactgataaagatagaaatgggtcctgttctccaagggttactgtctacctccacagttgtgactgatttccctttcttttttcttttttttttttttttgagacggagtctcactccttcacccaggttggagtgcagtggcgcaatctcggctcactgcaacctctgcctcccaggttcaagcaattctcctgtctcagccactcaagtaggtgggactataggcgcctgccaccatgcccagctaatttttgtatttttagtagagacagggtttcaccttgttggtcaggctggtctcgaattcctgacctcaggtgatccacccacctcagcctcccaaagtgctgggattacaggctccatttcttcttttttttctgttttgttttgtttttagagatggagtcttgctctgtctcctaggctggagtgtagtgatgcaatcacagcttactgcaacctcaacctcctgggctctagcagtcctcccaccttagcttcctgagtaaccgggaccacaggcatgcaccatcatgcccagctaatttttttttttttgggggggggggtgggtagagatggagtttccctatgttgcccaggttggtcttaaactcctgggctcaagtgatcctcccaccttggcctcccaaagtgctgggattacacatgtgagccaccacacccagcctggtttccctttctgagatttgaaatgatttgagcatgaaaaatactcgtgaaagtatgcacagtggaaatataaattaagtaatggctctcctcttagtagattttaacttttgctcttgttattctaaaggccaagaaagcagagaactcatcaaatgaggaggaarcgtcaagtgaaggcaacatgagggtgcatgctgtgggtgagtatgcatgaagcaagctgtttgtgactatatcaaggaagaaatggaatctgccactttgggcttgtccctccatcctttgtgaatgctgcacagaattttttctctccccagtcctccccaaggaaatgctcccataaattgttgacattttcttgtgcatacttgatatacaacaatgggtaaatgtgtttgcaaactggaagccctgttgagatattagtgaaagggctagagttcttccttaaatccttttgcttctgaaaagacttaattctatcttatttattctcaaatctgtaacttgctgatgaatttatatcccatacttgataaaggaccttattcctccccctatcacaaacattttgaatttcagccttatttcacttctgaccagcttgcacaacgttgcactaaggacttcagactatgaccatctcaggcatagaagagctgtctgttctttgcacatctccaatccaaactgctgcaagaggaaatctagattatcatgtaaaataatcagtaaaattatcatgtaaaatagaaggttccatctgacattaacacatcaattaaagaggattccaatgtcttcccacttccaaatttgcaaatttcaaggacttcaaaatttccccttcattagtgaaaatgaaactagttgagtgaatttgtatttacatactcaatttaactttgtccatgcttcctgcccaatcttttctgttagattcttgcatgagcttccagtgtaaaagaggccacatctgtaaggcagaccaacagggaaaacctcactgtgtctgccaggatccagtgacttgtcctccaacaaaaccccttgatcaagtaagtattcygcaaaatagtctttaagtggctccaaaaggttagtgactgaaataaaaatatttgccattgaaatttttgcttaaaaaaggtagatacctaggttatcatttggttatttgggatatttggaacatctgcagttttcattctactgagcttatctagagctaaattgtcatcaccgttggtacagtttagttgatttttttgatgccaaatggaacaattacgattttaatagtctcacctacctgaccacatctttggcacagcgctgttatcagcatatgagctttaaggagcagagtgtcttccagtgagcatttggctctatcagctttttcttctacttatcttccataggtttgtggcactgacaatcagacctatgctagttcctgtcatctattcgctactaaatgcagactggaggggaccaaaaaggggcatcaactccagctggattattttggagcctgcaaatgtaagattatgtccctcctgtcaaccatcatctctgagagggcttggggtgaatctggacatgcctgaattatctatatgcaaacagggaaaagctgatgtagttctgaacacaaaaattatcaactggagaaacttaaaaaataagaactctcaggccttaaccgtaggagattctgatttaactgaactaggttggaatcctgacattgttttttttatttgtttttgaagtaacctagacaattctaatgtgcagccagggctcagaaccactatgataatgctatccacttaatcacagagttgaatcactggaattttgctacattatttgccctcttcccaatttaagttaagcctttgccaagaagtctctgacaacacatttttccagaagtgttttaaggctgtcttccttccccaggatattctcaattgtgtttggctccccttaccactaagtgattctccacattagcagtgctcactaatgtttccgggtctcctccccttccagacacaggagaggatgaaacatgtcagcctcctggacgttaggtatgaccatatatcttgctttgtccagggaaatgtgaaaaaagtcatctatgtgagttctgggcagaagcattcaagagctggggtatggttctccatcctctgctcctttgccaccacaaactctctttgagatagtggcctcaaaaaatggcaacgtcattggtggctggcaagatggccaaataaggaccactctggtttgcagctcccagtgagatcaacgcagaaagagggtgatttctgcatttccagctgaggtacccagctcattgggactggttagacagtgggtgcagctcacagagggggagccaaagtagggtggggtgttgcctcacccagtaactgcaagggatcgggaaactctctcccctagcgaagggaagctgtgagggactgtgctgcgaaagacagtgcattctggcccagatactacgcttttcccacagtcttcgcaatccacagaccaggagattccttcgggtgcctacaccaccaggaccctgggtttcaagcacaaaactgggccaccatttgggcagacaccgagctagctacaggagtttttttccatatcccagtggcacctggaatgccagcaagacagaactgttcacttccctggaaatgtggctgaagccagtgagccaaatggtctagctcagtggatcccacccccacagagcccagcaagctaagatccactggcttgaaattcttgctgccagcacagcagtctgaagttgacctgggatgcttgagtttggtgggggggaggggcatccaccattactgaggcttgagttggcggttttcccttcacagtgtaaacaaagctgctaggaagttcggactgggtggagcccacggcagcaccagaaagccactgtagctagactgcctctctagattcttcctctctgggaaaggcatctctgaaagtaaggcagcagccccagtcaggggtttatagataaagctcccatctccttgggacagagcacctgggggaaggggcrgctgtgggcagagcagacttaaatgttcctgcctgccagctctgaagagagcagcagatctcccagcacagcactcaagctctgctaaggaacagactgcctcctcaagtgggtccctgacccccatgcctcctgactgggagaaacctcccagcaggggtcgacagacatctcatacaggagagctctggctggcatctagcaggtacccctctgggacgaagcttccagaggaaggaacaggcagcaatgtttgctgttctgaagcctctgctggtgacacccaggcaaacaaggtctagaatggaccttgagtgaactccagcagacctgcagcagaggggcctcttagaaggaaaactaatgaacagaaaggaatagcatcaacatcaacaaaaaagatatccacacaaaaaccccatccaaaggccactaacatcaaagaccaaaggcagaaaatccatgaagatgaggaaaaaccaacacaaaaagcctgaaaattccaaaaatgggaatgcctcttctcctccaaaggatcacaactccttgccagcaagggaacaaaagtggatggagaatgagtttgaggaagtgacagaagtaggcttcagaacatgggtaataacaaactcttctgagttaaaggaacatgttataacccaatacaaggaagctaagaaccttgaaaaaaggttagaggaattgctaaccagaataaccagtttagagaagaacataaatgacctgatggagctgaaaaacacagcacgagaacttcgtgaagcatacacaagtatcaatatccaaatcgattaagtggaagaaaggatatcagagattgaagatcaacttaatgaaataaagcatgaagacaagattagagaaaaaagaatgaaaaggaataaacaaagcctccaagaaatgtgagactctgtgaaaagaccaaacctacatctgattggtgtacctggaagtaatgaggagaatggaaccaagttggaaaacactcttcaggatattatccaggagaacttcctcaacctagcaagacagaccaacactgaaattcagcaaatacggagaacaccacaaagataatcctcacgaagagcaactccaagacacataattgtcagattcaccaaggttgaaatgaaggaaaaaatgttaagggcagccagacagaaaggtcggaatacccacaaagggaagcccatcagactaacagtgggactctctgcagaaaccctacaagcaagaaaagagtgggggccaatattcaacatgcttaaagaaaagaattttcaaactagaatttcataaccagtcaaactaagcttcataagtgaaggagaaataaaatattttacagataagcaaatgctgagagattttttcaccaccaggcctgctttacaagagcttctgaaggaagcactaaatgtggaaaggaaaaaccagtaccagtcactgcaaaaacataccaaattgtaaagaccatcgacactatgaagaaactgcatcaactaataggcaaaataaccagctagcatcataatgacaggatcaaattcacacataacaatattaattttaaatgtaaacgggctaaatgccccaattaaaagacacagactggcaaattggataaaaagtcaagacccatcagcatactgtattcaggagacccagctcacatgcaaaaacatacataggctcaaaataaagggatggaggactatttaccaagaattggaaagccaaaaaaaaaaaaaaaaaaaaaaaaaaaaaaaaaaaaaagcaggaattgcaatactagcctcagataaaacaggctttaaaccaacaaagatcaaaaaacacaaagaagggcatcacataatggtaaagagataaatgcaacaagaagagctaactatcctaaacatatatgcacccaatataggagcacccagatatataaagcaagttcttagagacctacaaagagacttagactcccacacaataatagtgggagactttaaaaccccactgtcaaaattagacagatcaccaagacagaaattaacaagtatattcaggacttgaactcagctctggaccaagcagacctaatagacatctacagaactctccaccccaaattgacagaatatacattcttctcagcaccacattgtacttattctaaaattcaccaaataattgaaagtaaaaactcctcagcagatgtgaaagaatggaaatcataacagtctctcagaccacactgcaatcaaattagaactcaggattaagaaactcactcaaaactgcacaaatacatggaaactgaacaacctgctcctgaatgactactgggtaaataacgaaattaaggcagaaataaggaagttctttgaaaccaatgagaatgaagacaaaatgggccagaatctctgggacacagctaaaacactgtttagagggaaatatataccaccaaatgcccataagagaaagcaggaaagatctaaaattgacaccctagcaccacaattaaaagaactagagaagcaagagcaaacacattcaaaagctagcagaagacaagaaataactaagatcagagcataactgaaggagatagagacacgaaaaacccttcaaaaaatcaatgaacctaggagctggtttttttaaaagattaacaaaatagatagacagctagccagactaatagagaaggaaagagagaagaatcaaatagatacaataaaaaatgataaaggggatatcaccactgatcccacagaaatacaaactaccatcagagaatactataaacacctctatacaaataaactagaaaatctagaagaaatagataaattcctggacacatataccctcccaagactaaatcaggaagaagttgaatccctgaatagaccaataacaagttctgaaattgaggcagtaattaatagcctaccaaccaaaaaaagctggggaccagacagattcacagctgaattctaccagaggtacaaagaggagctggtactattccttcagaaagtattccaaacaatagaaaaagagggactcctccctagctcattttatgaggccagcatcatcctgataccaaaacctgaaggatatacaaaaaaaaaaaaaaattcaggccaatatcactgatgaacatggatgcgaaaatcctcaataaaatactggcaaaccaaatccaggagcacatcaaaaagcttatctaccacaatcaagtcaccttcatccctgggatgcaaggatggttcaacatacgcaaatcaatgcgtgtaagccatcacataaacagaactaatgacaaaaaccacatgattatctcaatagatgcagaaaaggtcttcaacaaaattcagtatcccttcatgctaaaaactctcaataaactaggtattgatggaacatatctcaaaataataacagctatttatgacaaacccatagcaaatatcatactgaatgggcagaagctggaaacattccctttgaaaaccagcacaagacaaggatgccctctctcaccactcctattcaacatagtattggaagttctggccagggcagtcaggcaagagaaagaaataaagcgtattcaaataggaagacaggaagtcaaattgtccctgtttgcagatgacatgattgcatatttagaaaaccccatcatctcagtccaaaatctccttaagctgataagcaacttcagcaaagtctcaggatacaaaatcaatgtacgaaaatcacaagcattcctatataccaataacagacaagcagagagccaaatcataagtgaatgcccatttgcaattgctacaaagagaataaaatacctaggaatacaacttacaatggatgtgaaggacctcttcaaggagaactacaaaccattgctgaaggaaataagagaggacacaaacaaatgctcatggataggaagaatcaatatcgtgaaaatggttgtactgcccaaagtaatttatagattcaatcctatccccatcaagctaccactgactttcttcacagaattagaaaaaaactactttaaagttgggaaccaaaaaagagcccatatatccaagacaatcctaagcaaaaacaacaaagctggaggcatcacgctaactaacttcaaactatactacaaggctacagtaactaaaacagcattgtactggtatcaaaacagatatatagaccaatggaacagagcagatggctcagaaataatgccacacatatacagccatctgatatttgacaaacctgacaaaaataagcaatggggaaaggattccttatttaataaatggtgctgggaaaactggctagccatatgcagaaaactgaaactggatcccttccttacacttcatacaaaaattaactcaagatggattaaagacttaaacataagacctaaaaccataaaaaccctagaagaaaacttaggcaataccattcaggacataggcatgggcaaaggcttcatgactaaaacaccaaaagcaatggcaacaaaagccaaaattgattaatgggatctaattaaactaaagagcttctgcacagcaaaagaaactatcatcagagtaaacaggcaacctacagaatgggagaaaatttttgcaatctgtcaatctaactaagggcttatacccagaatctacaaggaacagatacaaatttacaagaaaaaaacaaccccatcaaaaagtgggtgaaggatatgaacagacacttctcaaaaagaagacatttatgcagccaaaaaacatatgaaaaaaagctcataatcactcgtcattagagaaatgcaaatcaaaaccacaatgagataccatctctcaccagttagaatggcgatcattaaaaagtcaggaaacaacagatactggagaggatgtgaagaaataggaacgctttcatattgttggtgggagtaaattagttcaatcattgtggaagacagtgtggcaattcctcaaggatctagaactayaaataccatttgatacagcaatcccattactgggtatatacccaaagggttacaaatcattctactataaagatgcattcacacatatgtttattacagcactgttcacaatagtaaagacttggaaccaaccaaaatgcccatcagtgatagactggataaagaaaatatgacacatatacaccatggaatactatgcagccataaaaaaggataagttcatgtcctttgcagagacatggatgaagctggaaaccatcattctcagcaaactaacacaggaacagaaaaccaaacactgcatgttctcactcataagtgggagttgaacagtgaaaacacatggacacagggaggggaacatcatataccagggcctgtcaggggctgggggactaggagagggatagcattaggagaaatacctaatgtagatgatgggttgatgggtgcagcaaaccactatggcatgtgtatacctatgtaacaaacctgcacattctgcacatgtatctcagaacttaaagtataattaaaaaaaaaaaaaacggcagtgatcctgagctctggggagactgcaatgagcagagccctcctgccaacttgtattggacttgtagcaggattgcaaaattgacttctgtttctttaagccactgagatttagcattatttcttactgtagtatcagctaatagctacctttttctctattcaatagcacttgtgccctccacctacaaatttcaactctgattctacagcagtgattctggggcctagctgcacatccaaatagatcttggagctttaaaaacatcctgatgcccagacttcacgccagaccaatcacatcagaatttacttgattggaagctggcatttggtatgttttttaaaaccccaggcaattttgttgtgctgctgccagggctgaggaccactgtcataataatggggacctgagaaagctctgtcagttgccagaagtcgttaagcttcctattatgaggacttgccataggacacaaataagcccaaagattacagtacattttctgcttgtaacagctattcctacttgtacggactttgaagtgattcagtttcctctacggatgagagactggctcaagaatatcctcatgcagctttatgaagccaactctgaacacgctggttatctaaatgagaagcagagaaataaagtaagttatccacaggttagcttcttcaatgtctgtctacagggcatgaggaagaaagacgtggtgggggggctacctacctctgcatactggcaaaagcccactatgcttccccatgcccggttagcccatgtggcttaacagaataatagatgtcaccattcacgccacaaggtttcagacaccaccaaaccgccccattcttcccaatggtcagtggcctgaattagggctcttcaattcctacctagagcaagctctggttgagcaaagttaatataaatttagcattgatctagtcagtccaaacatcttatttaaatctaagcatttgttttgttctcataggccagacatagatgtatgatataaagtaaatccattactcaaaatatcagtaatmtattaagattaaaaagcacagaacattgattccaaaagcttccagagaaaattcattcaccagatagttattgagtgtatcctgggtgccagaaattgacctaaatactggagatacagcaacgaaaagaaaatctctgccttcatgagtttacattctgggtgaagagacagactctaaacaaataagtatatatgtgtgtgygtatgtaatgtttgtatatgcatatatttgtacatacatatatatgcatatatgcaattatatatagtaaaatgagcatttatgtaaatataaccaaatcagcaaatatatgtataagtatgtcagttgggattaaacatggtgtgaagacaaataaaacaagaaggagggtgtgcattaactgtgtcagatgctgtttataggttatgagttgaagactgagaattggccagggatttagcatgtcaaagtcatagctgaccttgataggaactgttcctggggtgggagcatgtttcaggagggaagctccagtggacagagttcaacagagactaggaggaatggatgcagcaagtatagacaatcctttcaaggagttttgctatgaagagataaagagaaatggggtggcagctggagtggaaagtgagtacaagagtcccacctagcagtgggagatggtagaggatgtttgcacgcttctggaaataacccagtcaagaaggaaatgttagtggggagcagagaatgcgcacaactgccagagggcgttcttcgatacatgtcccacccagaggagagggattggacttaggttaggagcacaggaaggtcgcagggagcaaagttgtggttctgggagcaggtggaggtcctgtttgcttccaattactcagtgaaataagaggcaacatcacaagctgagagtttcacaggcactgctcaagaataatttctagcccccgtcttgaataccttgtcacagagagccttgagggtattagctatgaaacagggaaatttcaatggggctggccaagcaataacacaccagggtgaaagcaagactgagtgggcactggatggatgacctagaagactaagagtggactctgtcatcgggggaaggagcagcacttttcactaactaatcaccttagtcaattcagcccttttcattaaaacctcatagtttaaaaaaaaaaaaaaaaagcagcgaacattacttggttaaaagaaagaggcaaaacatacttaaaatatttaaaagtttaaaaaagaatttaaatttcttctaaaaaccagaggtttcttacatcaggtgctattctgtgtagacatgagaaaggcctgtagtattgattggaaggaatttcatttagttgcacatgatgtcctgagcttgttttcccctatcgtgttactgtcactcttcaagtaaagtttatagcaagtgacaagtccattacatttgtctgattctctgacagtcttctgccttcctaatcccaggtcaagaaaatttacctggatgaaaagaggcttttggctggggaccatcccattgaycttctcttaagggactttaagaaaaactaccacatgtatgtgtatcctgtgcactggcagtttagtgaacttgaccaacaccctatggataggtaagaactctttacctttccatttctagatttatctctctgataaaatatctacatatctatgcaaaaggaaaatctaaacagatttaggacatttcccagttccattttagaatactgaaatgcctggttaggagtctaaacacaaagctgctgtgtatgatgtactctagaacttaaggtataataataataataaaaaagtctgaaacttgatagagcttatgttgataaagtttatgttttataattttatcttttaattccatttctcaatgaactttttgaagtccccttatcacaattatcaaagctatgtaatattcattaaaaaaaaaaagctgctgtgaagatagcagaatatggctacaccacagctcccaagtttacatgttaaggtccagcttcccacagatactcctccaactttctcattcttgatcgtaaattcccaagattggcccaatgtgggtcaagtgactacatctaaaacaatcaggtatggccagtagatgagaaccaggttgtaccaacatgactgctgggtacacccctatagatttagggtggsggaaggacagttcctgtgaagacagaaamcttgtgaatcaacatcccaaaagctgtcaaccttacccacaaatactttatttcgttggcagtttttatctgtattctatttatatcacatatacarcaaccttatgggagaaaaatgtccttggtgagcctgagagttaaatcttcatgcacaagctactcaattaataggatgccatgtatttcattgcagagtcttgacacattctgaacttgctcctctgcgagcatctctggtgcccatggaacactgcataacccgtttctttgaggagtgtgaccccaacaaggataagcacatcaccctgaaggagtggggccactgctttggaattaaagaaggtaaattcatcaccagccaaagaagagggatgtcttcttcctcagacaagccctaagccctgcatgcttcatagagaggtcctgccacatgttcgaattggaagctagaaaaaaaaaggtggcagcttcccagataggactcccttggtgcacatgctgtcattgcgaagtcacttcttactacctttatggcactgttttcaaagggtagcaagggtgaacatgcattgaggtctcaacagtcagctaagcctagaaagacgtgtgaatccagaattgggccaaatctcagcaggctttgtgtccttccttatttcatatcctaccttaacctgggccttgggccaaacttttcaaaattacacataaagaataaaaaagcaagcccatttctgacaatgggagatgtcagaacatctcagaatccattaccaacacactaaagactggattttacatcacaattagtgcygggataatcctttaacccaaaactcacccatggcttcaccctcaatgaatgggagctgtgggagggtagatcagagtattctttctttaytcctgcagtggaggaaattaaatttagatgcttgttttgctgggttatgtcttaatatgtttccttttctttccttaagttaggcttgaattttatgagcaagtatgttttcaataattaagatatgaaaggctgggcacggtggctcatgcctgtaatcccagcactttgggaagccgaggtgggtggatcacgtgaggtcaggagttagagactagcctggccaacatggtgaaaccccgcctctaccaaaaatacaaaaattaggcgggcttggtggcacacgcctgtaatcccagctactcgggaggctgaggcaggagaattgcttgaacccgggaggcagagtttgcagtaagccaagatcccaacactgcactccagcctgggtgatagagtgagactcggtctcaaaaaaaaaaaaaaaatgaaagatgttcaaacaatgagcattcaaatctactcgcaattctcaccacacacacacacacaaaaatgatagtatgtgaggtaatgcattcgttaatcagatcaatttaaccattccacaaggtatatatattttaaaaggtcatgttttacatgataaatacataccatttttatttgtcaattaaaataaataaataagaaaaataccactcacagaacataaattaacagtgaacatcaaatctctgaaacagagatttcattcatgtttacaatatacccttgggataaacatgcagctaagccgttaaagaaagtcagttcatcaaatgtcagaagttcccaaaaagaaataacttgtgcatacttcatttttaaaatatcccccatgcatatgtagaatgccttgaaattagagaggaagaggtgaaagtatgaggatttacttattaataaataggtaagcagagagggtcagtccttttccttgcaatatcattctgtgaaataaacattctgtgaaaggatgtatatttttgtaagtacctagttctgtgtattagttgtctatgctgcatagtgaatcaccccacaacttaacaggttaaattctttctcacggtttccaagggtcaggaatctcacagtaactaacctggatggctctggattaggatctctcattaggttgtggtcaaggggtcatgcagtgcggcagttatctgatggcttgactgcagctaagggtctacttctaagcccactcccatggctctttgcaggagccttcagtatcccatcgtgtaggcctctggtctacagggctgcccacagcatgrtatctggattcctccagagcgagtgaccaggcagaaagagagaaaaagccaagactgaggccccaatgtcttttataacctaacctcagaagttatatatcatgatttctgcctcattctattggtcacactgaccaatcctgctacagcaggaggaggagaaggagaccacagggggttggatgtcaattgtctttctaacatctatgatacaagcagagtacttataaaaattcaaatatatccttctgtcctgccctgcccaccattatctagaggggaaaactcagctgggataggatgtatttatggatgcctgtttatatgacatgtgattttaaaggactgataaaaaggcaaatttaaacagaggccattttacttaagaaaaccagttgcatctcattcttccttttgcaaagcttctggcagctcttcagtgtgtaagctcacccaggctccgctgggcggttgtctgggaggagcaggaagggcttaaaatccagtcatttacaaagctgctaatgatcttgtttgtgcactgtggtttggccatcattgccttattttgaagaaaggaaaaaattatcacataataaaccaataaagcagatattaaatattcagtcagaacacgtaaacaacttactgctttggaatgtagctaaagaaaaacaaatttatttgtaagtatacccttctttccttcaaggctgagaaatctacaggagaagataaagtttagccaatgttttcctgaattttaactgcctgtgatagacgtgctcatatattcctcacatagctgttattaactagctgtgtgaattagggcatgttgcttagcctcagtgagtctcattttccttatctgtaaaaatggggttcaggtaacaggtgcaggaatcctcatttattttgtgcccatgcataccatgcattgacacatacccatgctaatcgtcagaaaaccctccaagtgagactaacagggtaaacaactcagatgacgcaagttcccctaagccatttaaagacattatcctaagagtactggggggccaccaaagtgtttcaaacaagccagtgatttccctgggtttgtatttaagatggattctcctggttacattgtggtggggccaaagaattgttgagagaatactgtggtaaacccaggcaagagctgatgagaacttgaactaggggagtgaccaaaggggaaaaaaagagagaagtaaacatattcaagatatattttaagatataagcatactcaaatatatagcatgtggaaataagacaatatttgataggaaatatgtgggagycgagagcagacaggtgagagactgaaaagagaagtgcaatgcctaggtccctggctcagagcaggcagggtaaatagaggtaaatagaggcatcttccactgagaaaacacaagaacagaagtggatttggagtaaatgacaaattccattttagatacgttgaattgtaaagtattaggttgcctcctaagtgttagtttcatgcaaaagtaattatggtttggccattatctctaccactccatcaaaactaccattatccctaccatgcccaccactgatgggcacctacattgattttatatctttgctattgtgaatagtgctgcaacgagcatatgagtgcatgtgtctttttagtaaaatgatttttttataaatatacccagtatgggattgctgggttgaatagtagatctgttttaagttctttgagaaatcttcaaactgctttccacagtggctcaactaatttacattaccagtgtctaagcattctttttctctgcagcttcaccagcatgttgtttttagactttttaattacagccattctgactggtgtgaaatggcatcttattgtgagatggttttgatttaaattttcctgatgattagtaaygtggaactttatatatatttgttggccgcttatatatcaagacagggttttggaactgaaatgcatatttgaggattataagcatacagagaataattgacaccagggaagggaattaattctcccaaggaaaacgcattgagttacatgaaaaggggtctaggattgaacactgcactgagaaacaacaacatctagatgatggataggggaggaagaaagaattcagtaaggagaatgaagtttctcctgaaatgaaggaagaaaaccaggatagtgccatgcaaaggaggtgtttcaaagaggaggaagagattaacagtgccaaatgcgactgagatgtcaaagaagttgaaagaaataaggatatcctgggtagccttggttagagtagttctggtggaatggtagacatggaagtcacattctatgggttgagaagaaaagggagattagaaagggtaaggagtggatgtttgagtgcaggaaagacctagaaaagctacagagcattttctaaaaaaggggagcattttttagaataaaagagatttgagcactcctttcatttactcattcatttgctcaagaaatctttacaggccrggcgcggtggctcacgcctgtaatcccagcactttgggaggctgaggcrggcggatcacgagttcaagagatcgagaccatcttggctaacacggtgaaaccccgtctctactaaaaatacaaaaaattagccgggcgyggtggcgggcgcctgtagtcccagccactcgggaggctgaggcaggagaatggcgtgaacccgggaggcggagcttgcagtgagccgagactgcgccacttcagtctggcctgggtgaaagagcgagactccgtctcaaaaaaaaaaaaaaaaagagagagagagaaatctttacagatggtctacataaatgcaggcactgttctagaggctaaatatgaaacatatttaaatgctaatggaagggtctagtaaaaaaggaaaggtggaagaaggatgtaagaaaaaaagaggaaagtaaaaggagaatcttgtgaaggtcagaagagatcttgagcataggtagaggaattagccttaacgtcaagaaaaaggacaatctcttatctgagcaacagaaagaagacaaaggctatgggtgcaaatataagtaaacgtataactaatgaagctattatctccattttacatatgaagccagtactcaaaawaaaaaaatcaaagtccataatctttcccattctctgggctagataaagattattagcaggaaaattacctagtgcccacacagagtagtataatagtttgttagggtgggccatgttggtaaggagtgatcttatatttgctagaggatgctgtcttcttccacaggtatggcracaatttctttcacaagctactcaattaaaaactggaataacctagcactacacttctatttatttccattatttttcagctcaccttctagattagtatactgggcacttcttggctggacctcccgttaacctgctcttcctctatcagtggttctcaaccctgcagccaaattacctgcagagttttctaaacgtctacatgccattagtccacccctagggattctgattctagagtccagaggtgaggcctaaaaatacatatttgtaaaagttcatgagtgatgttgctgtcctaccaaagttgaggatcaccattatactgccttattagatggtttctctaatcccccaactctaatattgtttgtgctactactctggctactttctaaaagtgtcattttgcttcttgtttttttatagaggacatagatgaaaatctcttgttttgaacgaagattwtaaagaactcaactttccagcatcctcctctgttctaaccacttcagaaatatatgcagctgtgatacttgtagatttatatttagcaaaatgttagcatgtatgacaagacaatgagagtaattgcttgacaacaacctatgcaccaggtatttaacattaactttggaaacaaaaatgtacaattaagtaaagtcaacatatgcaaaatactgtacattgtgaacagaagtttaattcatagtaatttcactctctgcattgacttatgagataattaatgattaaactattaatgataaaaataatgcatttgtattgttcataatatcatgtgcacttcaagaaaatggaatgctactcttttgtggtttacgtgtattattttcaatatcttaataccctaataaagagtccataaaaatccaaatgcttatgcaagtgtatttccagttattatttagacaatcaaatgtaaaagatcaacccaagactcacacttcatgtcaaattataattgtgcttcctaaaccctactaccttaagtgtgtgtgtgtgtgtgtgtggttgagaaaaaagtgtgagacatctcttacaggaaacaaatactcagtggcaagataagaggtgctcattaatgtccttcatcattatgtaagtttaaacagaaaaaaactaatatcaagtgcttttttaccaaatttgatataaaatgtagaacaagctgggtgcagaggctcacacctgtaatctcaacactttgggaagccaagtcgggaggattccttgagctcaagatttcaagaccagcctaggcaacatggagagaccctgtctctatgaaaacttaaaaaaatagccaggggtggtggcatgtacctgtgatcccagctacttggtggacttaggtaggagaattactcgagcccagcaggtcgaggctgcagtgagctattgtgccactgcactccagcctgggtgacagggcaaggccctgtctcaaaaaataaataaatgaaaataaaatgtgaaagattatgcactgcttgatccaattaattctaactttttgtgcagttgagcatgtgtgctggggaagagggcggccctgcaaaaatttcacataatcattgcctcacaataaagaaaatgtaatggtaaaacaggtagagggccataaagcgtcttgatgtccaatgtagaaagagattaaatattattaatgtaaattgatagcgaaaaacctgtcataagcaaaaatttgtctttttatttgcgctcttctttggtaactattacagtaaaagctagatcacaaaaatatgacattataatatagttttccaagttctgaagtaaggcaataaaaggacatgtcactcactttatttgactatttgaaagaaaatggttttttacatatttttctagctgaaatgaaagatatcaatacaattatcttttactattttttcaaataatcaaaaatgtgttgttgttgttgttgttgttacaaaccttatctgtgatagtcactgagagaacatgcccctaggaattttatctgaaagatatttacagaatagtttatttttttatcagaataatcttctctgagtatttcaaaatttcattcgttatctctttcatagctcaataaattacttattctttttttttttttttttgagatggagtcttgctctgtcacccaggctggagtgcagtggcacaatctcagctcactgcaacctctgcctcctgggttcaagcgattctcctgcctcaacctcctcagtagctgggattacaggcgtgcgccaccacgcccagctaatttttgtatttttagtagagacgaggtttcaccatgttggtcaggctggtctcgaactcctgacctcgtgatccgcccacctcggcctcccaaagtgctgggattacaggcgtgagccaccacacctggccaattaccttaactagaaccatatcatactatgtcctttctaaaaaattaagttcaatttgattaatcaaaatcgaattaagtattatttgtaactttttccaactacagaaataattttaggaactattccaaatttcagaacgtttttatatgaagctgaaaaggtcttagctaattacaaactaggttgctggtaacagtgaagttgtattcagaggtattaattaggcctaaattatcttttaccctcagacaactttcaaaaatattttagaatagtgaaaagtgattttaacaccaaggtaaggaaaccacctcaatatctactaaaaaattttgtttgaaaataatattcattttgaaaygaaaaatatttaataagagaaaatctcaaaccttaaatttctgtatcatttaaggctcttacatgtacagctagctcatctattatagaggcacgttaatattcttggtggtcacaatttttaattgtgggttgtttgtgataaagacatactctaatcccaacctaagagatkaagttattttctcagtaatcagtctgtaagtctacctctgtgtaattgagatattttggaagttggagctcctggtgtgaaagcaattattcagtttagctttgaattttgtgactcatattgcccataaccataaaggcattagtaacatggcttaaatactagatgggcatagagattctaggtgatcacactgctccttgaatttgttgctccaagggccactgaagcaaaggtaattgaagagatatatagtataatttggactgattctaatgcactagataaaagaatgtaacatattcttgtattgggtaatttaatgatttctaataggtccacttctaataagaagaaagaaattagtgtttgaatccagaaagaagaaaaatacaaagaaaaaacatgaaaaaggaaaagggaaataagttgcctaaattcaggcaaagtagcactaagattgaaatcagagttgggttttagatatatataacagatgaagtgtgatttatagatataacttgcctcaaatgctggagataagtcttaataataacatgataaagttgtttttctttcaaaatccaattccagaatacagtgatttggtttgaaactcacaaggtaagttaatttgaattaagtrcgatttttaaaacataaaaatgtctcctttcagaaccaatggaccaataaaaggccagttgatttcctttattgaatctgaatttactcatattgtgctgattttctaccaacccattacatcttacaaaatttttcccatacaatttccttcccgagaactataactggcaataacagcaaccagactatatgaaggcctggtaagtctcacagaggtacaagcttcaggtggatttatttgtgtattacataaaaactttcctctcattttagccagtagtgatcaattactaataataagcatgatgtaacactggtgtttaaagatttgtgagtagaattgagcacagtggctcacacctgtaatcccagcactttggaaggctgtggtgggaaggttgattgaggccagaagttcaagaccatccttgcaacaggggggcaacatagcaagaccccatctctaagaaaatttttttaaaattagccaagtgtggtggtgcacacctgtagtcctagctccttgggagactgaggcagaaggatcacttgagcccagcagttcgagggtacaggaggctatgattgtgccactgcactccagcctgagtgacagagcaagaccctgtctcaaaaaaaaaaaaaaaaaaaaaaaggatttgtgtgtagagatcacaaacgcaacttcagggaccaaacatgtacagtgtataggccgaactgtaactttataagaaagtagaaagtaatgggctatgttgggagctaaacagtgcatgtcttgtctaaggaattcaaagcttttaaaaacactcttgtaggcttacaaaacctatgtttggaggcaggatttatcttgaccactatttcaacacctctaaataggaataggacttacatagaaaaaaactcgaaatgatctcctaccccttcaattccaggctcgacctttagaatgaaatttctcatcttggctggccttttgagcactgccactgctctgcccatccccgtgagtacaccctcctcagctgctgactcaatttcagatttagagtcatcgcatttctcggctagaaagcaggtcttatcttttcatttcacaaaagaggaaagcggaacccaggaaagtcatagaactaggagttcaccactctttgtcagtccaagactctgcccagtacaaatctcagctccatatgccatgtgctagctgtgtgactttgaactaacccatggtttccttgtctataaaatgagtcctaggaacacctcagagttgcacggagatgatttttttaatgcatctaaggcagagaagggtcctatttgaaagataggatgttctcaataaactcagtgatatagaacaaatattctgcagtgacccaggtctaaattaagcagtttgaattgagtttcatttgtaatgcccttgccccaaaccatctcatgttttcttaaaaggctgttacatggaaatgctctgacaccaaaggactatctacctcattgtagatttgattttaaagaaggaaatatttaagataacttacattgattactaaattatgaatataaaaacaacttatgcctgaattatatttgagtgatcatacagacacacctttaaagtccaatttttgaaaaccagatttggataaaaagctacattcatctatagtgcccttgataacaaacctaatttgtttctttagaccacaatcctttttgccaaagctggcaagtatcgtggtctaaaattccaaacaatttgtattgcctgtttctttaggctgatgggaatgctgcagtatacatatttcattaattctaatatgtactttttgatatttcagcagctctgaaattgagctgtgtcttaaaaacacaatttgataaagtgtcacggcagcttaacagcagcgcttttcttttttggtaatttatgaaataatggtgcttttgacaatgatagcatctaagaatatatgaaatactgtaatcccagaacatcattaacttcacctatatagacattttgtcatcaactgactatatacaaatgagatccactgagtctaatctgggtttactagtctgaatatgagggcaccaagtaggcaagaaactctctcccctgcacactttgtatcaaaggagcttttgaagaagtgagggagctttcaaaatttgtgtttggggtgcagaacttaagtgtacatttccacactcccttcactttgagtttataactactgagaactaaatcaagaacaccattcaaagatttacaaaaggaaatattcatgtaatatggaattaatcttaagaaatgtaaataaaagcattctttggatataaatttaaaagcaaaaagccttggtcttccaaatcattgcacaaaattaattaaacttttccctattagatatccaactgctttttatttcagaagtgaagttacattactgatgggtataatgctccatagtggcttattacttattctcctttagaacaaaacctctctttagtggataatgtatttccatatgctgctttaccttgttgctgttattgttttgcaagctcgaacaatatgctgaaagttccagtgaacaggtgaacttctaattgtatttttaaataatgcattcatcattttaaaagtttgccattgtctgaaatgactgacatcatgtttctttttacagagatttatcttttacccaccacaagtaccaccatttttccctcaggtcctctttcccctacctccgcaaccgcccctggtaagcatgggtttggggaatctgaaatagctaaaaggatttatttgttggatggtggttatgaaactttccaaattttgatactgaaatatgaggctttaggcagtccccaggaatcagctattcaaacttctctcccatatagcttatagtggaacgtgacaaggggctagcaaatttccctccaaatcttcagtgccctctcgcagtgtttctctgcacttactattaaaaaggtgtttgtgctgaattactttgaccgttacgagcttactctttatgaagagaatacttctttctataatatccattcttttgctttttcaaattcaccttgttgctttctttctctaagaagattttttttccccagctttmtataactttttcccaagttcaagcaaaatagttattttgcttttctgtttggactctctccaggctctcctaatatctggattcttaaaacattttttcaar

SEQ ID NO: 5698 - DNA, 16914 bp, Homo sapiens
aatttaagactgaaagtttaacatgcttattttgttaccagccttctgtgagcccaagggctatttgctttatattgatcctatttggatccttctgcgaagcttaaaatggccatgagacacgggttaggtcatggtgaaaatggtaagaagccactttagtttcttcctgccaaccttccttcttgaatcagacactttaatttcaattgctatgagatcacatagtggaaacatgtattcccagagggtgatacagtgcaatactatccttaacaggcaaatccaaggcatagccagtcccaagttgatcactagtgcaaatcataaaatacctaagtaacttttaggtgactttctcataaacaccagaatgacatgggttttcttaacaaaatatcactggtttgagacctaggatgcttctaaaacattgttattgctcccagatttcctttctcagagaattaggagagaaacaaaggtttgttgaggacctgttatctataagttgtttcaggtgggtgctttatgtaatttgttcataaaatatacatatcaggtattattattgtcttcattttattgatgagaaaactgaggctcagagagattgagtaagtaatgtgacgaagattctgcagagtaatgtatgtttagtcagcactgaaacccaagtcaatgggtcttgtttctaaaacacatgttcttttcactctaccatacgtttatttcagtgaccagatacatgtagttttctgacctagaaataaagattggattcattatccataggcttctgagttcacaaatcaccacagccagtcaactacctgagagactgttgagtcctcagctttaaacaaagttttctacttccctccaagttgaaagtgtaatagagacataaaaaacccttcaaaaaatcaatgaattctggagctggttttttgaaaagatcaacaaaattgatggaccactagcaagactaataaagaagaaaagagagaagaatcaaatggatgcaataaaaaatgataaaggggataccaccaccaatcccacagaaatacaaactaccatcagagaatactataaacacctctacgcaaataaactagaaaatctagaagaaatggataaattcctcggcacatgcatcctcccaagactaaaccaggaagaagttgaatctctgaatagaccagtaacaggctcctaaattgaggcaataattaatagcttaccaaccaaaaaaagtccaggaccagatggattcacagccaaattctaccagaggtacaaggaggagctggtaccattccttctgaaactattccaaacaatagaaaaagagggaatcctccctaactcatttcatgaggccagcatcatcctgataccaaagcctgtcagagacacaacaaaaaaagagattttagaccaatatccctgatgaacatcgatgcaaaaatcctcaataaaatactggcaaaccaactccagcagcacatcaaaaagtttatccaccatgatcaagtgggcttcatccctgggatgcaaggctggttcaacatacacaaatcaataaatgtaatccagcatataaacagaaccaacaacaaaaaccacatgattatctcaatagatgcagaaaaggcctttgacaaaattcaacaaccttcatgctaaaaactctcaatatattaggtattgatgggacgtatctcaaaataataagagctatctatgataaacccacagccaatatcatactgaatgggcaaaaactggaagcattccctttgaaaactggcacaagacagggatgccctctctcaccactcctattcaacatagtgttggaagttctggccagggcaatcaggcaggagaaggaaataaaggacattcaattaggaaaagaggaagccaaattgtccctgtttgcagatgacatgattgtatatctagaaaaccccattgtctcagcccaaaatctccttaagctgataggcaacttcagcaaagtctcaggatacaaaatcaatgtgcaaaaatcacaaacattcttatacaccaataacagacaaacagagagccaaatcatgagtgaagtcccattcacaattgcttcaaagagaataaaatacccagaaatccaacttacatgggatatgaaggacgtcttcaaggagaactacaaaccactgctcaatgaaataaaagaggatacaaacaaatggaagaacattccatgctcatgggtaggaagaatcaatatcgtgaaaatggccatcctcccaaagtaatttatagattcaatgccatccccatcaagctaccaatgactttcttcacagaattggaaaaaactacttgaaagttcatatggaaccaaaaaagcccacattgccaagtcaatcctaagccaaaagaacaaagctggaggcatcacgctacctgacttcaaactatactacaaggctacagtaaccaaaacagcatagtactggtaccaaaatagagatatagaccaatggaacagaacagagccctcagaaataatgctgcttatctacaacgatctgatctttgacaaacctgacaaaaacaagaaatggagaaaggattccctgtttaataaatggtgctgggaaaactggctagccatatgtagaaagctgaaactggatcccttccttacaccttatacaaaaattaattcaagatagattaaagacttaaatgttagacctaaaaccacaaaaaccctagaagaaaacctaggcaataccattcaggacataggcatgggcaagtacttcatgactaaaaacaccaaaagcaatggcaacaaaagccaaaattgacaaatgagatctaattaaactaaagagcttctgcacagcaaaagaaactaccatcagggtgaacaggcaacctacagaatgggcgaaaatttttgcaatctactcatctgacaaagggctaatatccagaatctacaatgaactcaaacaaatttacaggaaaaaaataaacaaccacatcaacaagtgggcgaaggatatgaacagacacttctcaaaagaagacatttatgcagccaaaagacacatgaaaaaatgctcatcatcactggccatcagagaaatgcaaatcaaaaccacaatgagataccatctcacaccagttagaatggcaatcattaaaaagtcaggaaacaacaggtgctggagaggatgtggagaaataggaacacttttacactgttgaggggactgtaaactagttcaacccttgtggaagtcagtgtggcgattcctcagggatctagaactagaaataccatttgacccagccatcccattactgggtatataaccaaaggattataaaacatgctgctataaagacacatgcacacatatgtttataggggcactattcacaatagcaaagacttggaaccaacccaaatgtccaacaatgatagactggattaagaaaatgtggcacatatacaccatggaatactatgcagccataaaaaatgatgagttcatgtcctttgtagggacatggatgaagctggaagccatcattctcagcaaactatcgcaaggacaaaaaaccaaagaccgcatgttctcacttataggtgggaattgaacaatgagaacacttagacacaggaaggggaacatcacacaccggggcctgttatggggtggggggagggggtagggatagcattaggaggtatacctaatgttaaatgacgagttaatgggtgcagcacaccaacatggcacatgtgtacatatgtaacaaacctgcacgttgtgcacatgtgccctaaaacttaaagtgtaataaaaaaagaaagaaagtgtattaggttgatagctcccaagtgatacagttttaattctttgaaaaaagattaaaaaatcacaatgtacctaattttgaaagtaaagctaaattatgaatgtaaaggacttcccattatgacctttgtccccaactcatgagtgtgtatatgtgttttctttccttttttgacatttaaaaaattatttattttttagagatgggatctctctgttgcccaggctggagtgtactggcatgatcacaactcattgcaatctccaactcctgggatcaagagatcttcccgccttagcctcccaagtagctgggactacaggcatgtgccattacacctggctaatttattttattataattgttacagccaggctctccctatgttgcttaggctggcctcaaactgctggtttcgaactcctggcctgaagtgattctcctgcctcagcctctctaatagctgggattacaggcaagaaccactgcaccaggcaactctttttcttttttgtttttttttgttttttgtttttttgtttttttgtttttttgttttttgagacggagtctcgctctgtcgcccaggctggagtgcagtggcacgatctcggctcactgcaagctccgcctcccgggttcacgccattctcctgcctcagcctcccgagcagctgggactacaggcgcccaccaccacgcccggctaattttttttgcatttttagtagagacggggtttcaccgtgttagccaggatggtctcgatctcctgacctcgtgatccgcccgcctcggcctcccaaagtgctgggattacaggcgcgagccaccgcgcccggcctctttttcttttttaatgaaataatagagctagtagaaaatagtttgctttttaaagtgcttacttaataaaataaaaagtgggcaactcgaaataaaaaatcaaacaatatctaacatgtttaaaagatttttaaaaatcaaaatataaaataatatcaaaatttaaaaactgggattctgttccccaaagttctgttcaaatctgttagatttatcttcccttgaccctaagtaatatcttgggcaagccctagagcttctttcctgacccttagttaataagatgttatctggtcacattcagtcacaataatagactcattttagtaataaacatcttaagactagtaattaaaactctttacttcacaccaagtttcctccccaagcttggcctgttcctggctggcagcctgaagtagggaaaggagagatatggtgaccttttctttgtacctttctagctaccctctataccctgaccccacatacataattgagctgtggcttctgactctactgggtttggggatgagaggcattgagagtaaaatgaaggagtggttttaattaatggcacagctaaaactggattttgttctctctgcacatggcagatgtttaaagctcattctttcttttatgcaagtttttacaccatccagcctcatttgtacctcttgaatttttgctcagtggcctatcaccattcaggatcaagacaaaaatcaatgagcacttattgtgtgtcatgcaccctacaaagtgccaggatatttatccaaactcctggcaatgctaaacacaatgcaaaaagacatattagaaaacgaatcttattaactttaacttttcaactgtatttcatcataaagtcttactttacaagataattgctgttgtgaaaaagggaaaggtcatggtctcatttcccagatgttatttgatatatgctataaattatattacctccaacatagtctgcactttgaacttagaaaaacaatcttcagacggcatgcattctaattcttgaaataagtatgcccacaaactgtaatttaagacagaataggtatgcttctcatgttttaattcagttgaatttcagaagatctcaggaatgtacagaacgagaattaagaattaataagaataagaattaattaattgcttgacatagagtagttaggtgatttcctgaactttaagcttccacatcacartatgaagttggttyaagataagaaatataataaattctcgcccaaggacagacctgaatctctagctgcctagaggctgactcaactgaaatcatggcgtttgacagcacttggaaggtagaccggagtgaaaactatgacaagttcatggaaaaaatgggtaaagactttatttctttgtggctcattctttgctttcttacaaacatttttctttctaactcctaaatctctaggagattacagatagcttacagatagctcctgatgtggtagagaggatccagaagatgttcagaggagggaaaccatattytcccttcttacattaggaagaatccactatctcactaatggaagaaaagattctttgagtgctgttctctgaaacacaccaaaaagatccagaaatgtttccttcmctctttaactgaaaaatgactttttttgttgtttacagtaagaaaatggcagcgtgtaatgataacttccagatctgaaaatgttaaattctaggagatggaaaaacaaagaccatataagaaagtaatggaaaaggttctcttaaaatttatagcgctgaataagttagatttaattctgatttcttctaacttaaaaaagttttggaataatcttgagaagctgtgtagttttctccagggcgtttaatttaactgatttataatttgataccaatactctggcagcccatatactatacaagataggcaaacaaatttgtgtcattcccctaaaagaaaaatctgcatcaattatagcttacagtttaggaactctaagtttaaatttataaaagttgtagattcttatagtgattttggcttaatatttgctaattttctcatttttgtgtcagaaagaaatgccacaagaagcaaatagaactataaagttcaaaatgttaaagccactaagaaaaacaaaggggcatttaagaaaaaagaatactgtatatgtggaattaaagatgtgcttccttataaatatatgaatatacattttaatccttcatttratatttctagaatttgatttacttaacactgaaatgaacagtttgttaatcttattaaggttgctcagctctaagattctataattctgtactctacttaatttttctcaagttatggaaaaacaactttaatcagttctcttgatcggattgaacctgaacttctrtagaagcaatctgaatgttcttgtgcaaaggcaatgctaccgagttttcttcccaccctcaaaataaacaaacaaaacataacttggaaaaataaacacttcctatgggatttgactttattttctccattgtcttaccttttacaggtgttaatatagtgaaaaggaagcttgcagctcatgacaatttgaagctgacaattacacaagaaggaaataaattcacagtcaaagaatcaagcrcttttcgaaacattgaagttgtttttgaacttggtgtcacctttaattacaayctagcagacggaactgaactcagggtaagaatttttttttttatgagcaatgcattcttgatttttctacccaatattaaaatgatttctgctctatttcattggatggtttaattaatgcagktctccttcactaactgaagaagccaatgaagtttgtctacattatatattrcacaaattggcaggrtatttaaatatgyttttatttttatacgcatctgtgaagaatctgaattgaacagtaagaattagaaaactatcttttgaatgactgaatatagacctattcataaagaaatttaaaactgtgtttttaaacagtacagcaaaagaagcctttagagttaatatgtaacttaactgtaatgtttaacatgttgaaataataaaagaaatgaatagatgaacaaatgagtgagttaccaaatggaaagatttgatgtattgtaggtcattgggagtgtaccttttcatgtttaagataacacattttaggaagtcatcattttcaacaaattttttaaaaactttttttagcctcaacatttttctatttaaattacatgtttgtaatgacaatttaactactgaatgttttatcrtaagttatgtctttcyttaattagtaccacaatcacacaaattaaaacaagcacagagttrttaacatctccrtgaaactaattttaaccatgactatatttctggacacgtaacatgaaagattcagaaagaagtgctgctcatctgccttaaaattcagcgtatggaaattattgaagagaacaagcataatggttatcaacacatactctgtagcccaatggcctaggttcaatcctcactctgtgactttaggtgaatcactgtgccattttacagtctcctcttctgcaaagtagagatartagtatcagtttcatagggtcaccatgaagattaaatgaaaaagtgtgtctacagaactcagaacagtgcctgacatgtgtaagaccctaataaatgccattattattattattattattattattattattatgtaggggacctggagccttgagggaaataaacttattggaaaattcaaacggacagacaatggaaacgaactgaatactgtccgagaaattataggtgatgaactagtccaggtgagttgtcaaatttatagctattttcaaaaggcaaaaattactacaaaacaataatttttgtcactgctgagccagatcttcagtaaactgactacttcttttctcataaatcttactgattttaaaaatattgtatagctattttctgatgcctatttactaaagacaacttatatatgtcaaataatcaatgcctattttaactgaaaatataaatgactacaaaccaacatgtgttttaaaatggctgtatcccatatctgtataaatcttgctatcaagtacaagaaaaaattgtataaactcatactcatataatatatatgaatatataatataaaaatagtataaactcatatagtataaaactataatactactttttcttaacttagatgtaaaccttaaagataaattcttctgtttgttaacacctttcagacttatgtrtatgaaggagtagaagccaaaaggatctttaaaaaggattgagcattattcttggcrcacagtccaaaatacaaattggacagaagatctatattgtaccagaactrtttatttcaccccatcaagtataaggttactgattgattggtccttttataaacattggtatatttccattcatgccaaagcaaaagaagtaaaagctaattaggatttaatttgttttatattctctaagatatatatttactaaaagaatttgtgacattttaaaaaacaaaaataaatattgcgtccatgttgctttatatgtagccttgccttttaaaagaaaaagtatgtgaatatgaattgacagactgttttcgtagagagagggtcttactctttcactcaggctggaatgtagtggagagatcatagctcactgtaacctcaaactcctggactcatgcaatcttcctgcctcaggcttctgagtagctaggactatgggtacattccacagtgcccagctaatttttgttttgttttctttttattttttttagagatggggtcttgctatattgcccaggctggtcttgaacccctggcctcaagcaatcctcctgcctcagcctctcaagttgttttttttctttacatttgataaactaaaagcataggctgcatatgagtctttaacatcttgaactggttgtgaataattttctggcactggttgtaagtaatatctattattataaaaataatatatgctcaaccagaaaacttagaaataagaaacacaaatgtaaaataagtatttccataactcataatccagagataattgccattctgattttgatagatatcctctcagctctcttccctgggggcagatatttcccaatacataccactttgaataggatgataggaaataaatgatgtactacattaaattaaattattgtattacatttttgtacacatcagtcattcccacgcttggctgaaaatcaggatcatctgagaaacttaaacaatttctgcattcttaatctccactgttattctattatatcagaatcgctaatagaaccaagaattctagaaaatttcctggtgattctgatgcagcctgtccactaacttgtctttgagaacaatggagatatcagttatcaatgttatttttaaccacccccttcttttttgttgttgtgggttttttcacataaacacatacattgccaattttccagggctcaaaaagtttccttttattcatattttcacatgacgtaaaattttatgtgcttcacataattgtattttagcagggtacatattaggggatggagagggggtacaatttttaagcatttgcagctgcaactctatagacttttgacaaattctttttcacactgatgtagataacagcttaacatttacatagttcttackacttgccacacactgttctaagtggtatatacatatgacatatatattaaaatgtaggaagaaaaatgtttgagtacctgatgaaaatgaatagagagtatgtaatctttgaaagstgaatactgygtgttctcacttataagtgggagctaaataatgtatacacatggacacaccagagtgtagaataatagacactggagacttggaagagttggagggttggcagggggcgatgataatttacttaatgggtacaatgtacattattcagggggtgatggttacagcccagactttaccactatgcaatatatcaatgtaacaaaactatacttgtactccttaaatttatataaaaataccttaaatctatgttcattttataatttcataaaaatcttcacataggaaatagtaattatttagattttcacatgcttctcttcataaaagctcaatgtatttttatccctctaatcttatgtgtctaccatatatgaatcaggaaaaggcaggtattaatctcaatacaaaaactgagagagacaaaggcacaaagaagtttattaycttgtctaatattgtacaaagtccatgatgaacagaagaattaaatgtaggtcttgactttcagcctagatcattatgatctatgctattactcagcctgttataaacaaaaatatattaagaaaaaaaatgtccttaattcctcagtggcacccaagaatagcactctaaatgagtcaggtcagactgtaaaataatggtgttgagtgattagacacttatctatttctagtctcattgcaggctgacttttttcaccatttatatcctttctagaattaaatttccactatttattagtattggagaacagcctattatttgttaagtgacttccatttcaacaaccgtttttygggaaaaccaaccttgtcattacaccaccctgcttggccaaaagagggtccctgacccaagagcagccaatctaccacaatttggccagatcatgagctctgtgtagaaggaaaaatgacaactaactgaacctgcaagaacctctttctagggagtttgaatttgagaagtacacagttagtagttgatagcaaggaaaaaggcttaaagaggacaaatagagcagacaataagtagaagtcatgagtacctgaaactatgaacaagcagtaaccatagggtagatagcagaatgtcggggcagtcagaagcagttggagtagtagaagctgaaatatttacacatgcaatatggtatctgggatttgcttcaaattgctttctccccaatctagggttggggaggaagattgatacaagttggcaattcttgcagctgttgcaaagtgcctgacacataataacatatgataggttcactgaataggaacacaggaattcattatattcatctctgtacttctgtatgtatttgagattttccataacaagaagttaaaaatatagtacttacatacacatataactccagaatccaaccacttcccatcacttccactgctatcaccttagtatgagccaccattatctttttcctggattactgttacaactctctaaaaagcccaagaacttctaccttccctactccacccctttagtctctttttctacacagcagccagaaggatcctttaaaaatctaaatctgatcacatcgcttatctgctcaaactgctgcaatggcttccattttcactcagaggaaaaagccaatgttcttacaatgacctgtaagaccctatatgatcagatgccctgttacctctccaacacgtggtcctgtttttcatgaaatatctgggggaagagtgtttcaagcagaggaaacaccctggagcaaagacaccaaggcagtagcaaacctggtaaatttgaagaacatagcctggaaagagtccccaaatcacccagagctgaccaaaaacaagaccaatgttcaggaaacacaggctgactcagctttcctaaaatttaggaatgatgtggtgaaaaagaatgggttttagaatcacagacttgcccaaattcttgtctgcccatttactgactaaaattcaagttctgattctctatttttctcatttgaaaaatggggaaaatgtaatgattttctgagcttgttgcaattgaggtattatgtataaaacatcgagtgtaatgcctggcatatacctggtactcaaatgtaacataaacatgtacccttctcctctagagaaaatggggcaaagtatatcctgagtagatgggaaaactattttcttaaaatacctctcatggagtctgcgtgagagagtgagccttggcctggtagatgagaatacttagttccagtccagtctgtgacataactagctggggactttgggagagtctcttcatctctttggaatgtagtttaatcatctttaaaatgagaggattgaactagatctccaaattttctttcagtgctaagattctatgatgtctgaatgacatttagtgattccttcctttcttaagcagcctttttggtgtgggtcacaggggacaggacattagaacaatggaaggtaggatgggaagagggaaatatttayattataaagtatggctggtttcatgggtgtatggcttgtgcaggctcagagggccctgtgcttggtttaatgctcttttcttactgtcctaaaattctcaatactttttgaacaacttctgcattttcattttacacagggccctgaaaattatgtggcttgtcctatttctatggattgactattaataagtacaaaagatattttcctatgagcaactagagagaatggtagcaagacatctctaggcacctaaagaagggtgaatggatggatggaaaagatagttgcctgggataaaatggaagtgagataaggttatgtggtgatggggaagggaaaaaggaggtagatggtcacttcatcattaagaagtgcttctttaccttttgctacttgctttctctaaactatagtataagaatgccatctgctggccaaggatacagactctttcggaggtttccaatgcagtgtctttgccgcatttcagtgtctagggagtgttccagaaaggtctgatataccgtagtctacactttaaaatgttaattattaaatgcttcttcagttccaaactccacactaaacaaagctaatacaaagactcctcttgaaccgatccactaaaactgctttcatttattgaacaaaaaataattttaaaaaagcactatgtgccagacagcaagtatttaatgatgaacactattggtagagatatttaggtgattaagaatttcctcaaatggatacaaactctcaggctcatcttgggtctgaatcgaaataccaagaatagcatcatcatcttcagcattggatggtcatctagagtagggttatactctcactcagtgggtgctaatatgcagggtggtgtatattgccttcaggcccgatgaccaaccttcaagctattgtctggaacagattttactggagaattgactggaaaagaagagtatgcaagacagtggcagaagatgaaagtttgaagcaaatggtggaaatcaatagtcatggataaagcatagtgttccagagggcttctctcatccatatatatcctcattgaagattccattagaatgatggattgcgagaagtcctccctgccatgtaatcaagatttccaggaatgaaagagggagcttaaacaattagtagttaggactgctgtgaaatgaaggagtagtagaactctgaaggaggacaggcaaggaagtgctccctaaatgtcagcccagtttcaaagccacatctctcagattacaggtagtgtaactgttcttatcaaatgattctggcacactcactatattcactggagaaaacacctgaaagtcaaagaacagtactcttcctaaacttgaaaacaaaatgtcttttaggtaaaggagtatatgctcaatgccttcactgggttttaatttagaaacttttaaacaagattttttttaaaaaaaggatactgaagggcatcattgtgacacagaacttcctctctttaacatatacttggaacagagaaacctcagtaaagatggaggttatttcacaatcccagtccagactgagtgtttgtcctgcatgttcccatggcacaaagtgttcaactccagcaataccattactctatattcaatctgcttgcctgcctcctctagtttgtgagctatatgagggcaaggatagggtcttatatctataccccacactgtatccctctaacacatagcaaatattaatgattgtaatttggggcatgctgggcagccccagcctcagaaagccagctttccccattctttcttaaacccagaagatctactgagggaataagtccttgttgttctttacaaacagataaacttattctgaaccagatcaccctagccatatctgattaggtcaaaaatggccacctgacccaagggcagtcaatttctatacttgagagcagccaatgataggagaactctgtccaagaccaataattctcattaattaaaaccaggtagggtctctgttgagaatttgacttcaatacacagagaaagtcattagctagtaatgatgggcaaaagttaagatacagatggaaaagcaaacaacagatgccatgaggtaaaagcagtcatgatgagttctagtaaacaaaaaccggatagaagaaaagaggggtgagataacatttttagatgtggaagtaatgaattcttgcttctggtggataaaaagataacttgttcagtataggctcctcgtattctgagtagccaagaatacatattcctttaaccaaatatgaaccaagcacctaccatgtgctaaatatgacatgagttttagtggtgaacaagacaaatctattttgttcccatggaactttgaatctgcttagcttagaatctagacatagaagacatattgaataagtaaaaattattgtgataagtattataaaggagtaacggtaggctttcatagaaatatatgcgatcttgaattatactttccattgaactatttttcataagatgcttaattgtacagactttcttgaattattaaagggcctaactcacacatcagactcctgtcatccttattttcatacaaattggctcctacacacaagggggatatcataaaatctaaataaatgctttatttataaaacatagcactaactcagatacagttaaatgcaactccttctaccactacaagttaacatttattaatacatggtgtttccaatgtgccaggtatttttcaaagtgctttataataccaattcatgttcatcatcacaacaaagtctatataataagaacaattattattagtctcattttacacatgagaaaactgaggcagagagaggttatataacttgcccaaggtcaacagccataagtcgctgaaccaggatttggacccaagcagttgtcctagagtccaaattcaattttacttgatgtggttatgtaggtaaattttcattcgaaatatcgtccatcaaaatatatattaagcatgtcttatatgcaggcactatgtgccaggtgctgatctaggtgttacagctacaacaaagaaraagacagacaaaaatccctgtcatcatggaagggatacagataataaacaagagaatgaagtaaaatatatagtacattagatgatataagcgctattgagaaaaataaaaccagaaagagggatgtggagtgtcagaggtgagatcatgggtgcagttttaaatagggagtaagatagcactgaataggtaacatttgagcaacacttgaagggagtgagagaatgagccattctaagtatgttttagtcagaggcctggatttggatccttgagccagtgacagtcttaaagagccttggaattacactgagtgtttctgggctctgtaatatagtgagcctagggctggatacagtagctcacacctgcaatcccagctactcaggaggttgaggcaggaggatcccttgagcccaggaggtcaaggctgcagtgagccatgatcacgccactgcactccaggctggaagagactgtgtctcaaaaaaataaataaagagcctaattagcatagcctatgggggctcaaagttgctagctaaggaagaacagagtaatgtaacaaaataagcaatatgaaacaaacaatagactccttctatgttttgaattggaatttctgaagga

SEQ ID NO: 5699 - DNA, 23469 bp, Homo sapiens
ccccacccccacaagttctagcaccttcctggctcagctacactaatcctcatgacccctgacctagccacaaagccacatttggcttacggcggtggggttcctagcaggggaaaggtcatcagggaagtggctccccttcgcccttgcgcccagcggccacagtgcccagacctgggtgtggggagaacaggggctcaggaaatccaacatccctcccctctgctagggtgaggtgaccttgggcgagtctctgagccctcagggcctgggtttcccatctttaaagggctggttggtgtctctccctgggagcttagggaccctggcctcaagggagaggccgggaagcctgcctctaagtgacagtgaactcaagaccagtggactaggacccttcccgggcagagtcctgggctgaagcaayggtgaatacacgcggacactcctcactggacacttgggcagctccctgtgtggcctcgagataatcctgcctcagtttctcttggacycgctgctcacctgctggacagcaggctgggagggctccgagctccccccgctgaaggctccggtcagggcgctgcccatgacgtgtcccacagccgagcccacggctacccctgcggccgtggtcgccatctgagccatgagccccggctggcccgaaggggcgggggctggggcggctgccgagggcggtgggtgcgcgggcgggtgggcagagggcgcggcggggcggctgcgggggtgggaggaagcagggttaatcctggccagaccccaggctggagggctgcagctcctggaaacgacccccggagagatggacgacccacgtctccacacgtgggtgctgcacccccacccctccccccgccaagatggcgcagcagcagccaaggtcactctgcggacgcccttaggggagtgcccacacttccctaaccccctccccacagggcccttgtccccctcacacctggctggccgggaggccgcgctgcggcttccccgaggcatggtggcggcggtgggacccgggcgaccttagagacggcggcagcggtgctgtcgcggggacaaatgccgcagcgcttgtcacagccggcgcaaaaaaggcggggccccgggcggggcctcaggaacacgcccccagcgggaggcggcactgcccccaaccctatcccccttctcccgtcctccggacatctcccttccagcagctccgggtctcggctggaaatgggaccctgctccctccctgcgcctggcaggctgtgcgggttctggggacaggggccagtgtcgcaaagcgccgagggcttaaggagggcgacagtgccttctgttaggaccaccgcagagggcagggagcggagttgggggttgttgcgagccctggaggggagaggagacggggaggcgacgggatggggccagctgggaaggggacgcgaggctccaggctggactccgctctctgccccctcccggactcggctgtctgtcccctccctccagacagggtctgctgaccaccgcgtggcctgggagtctccggtggcctagggaagtgaagcgcggccctggggaaggcctggagcaacccatccccagaactcccacgagggggcgtcccaacccgtcttcgactgttggccaaaatgcgctgccaatgctggcagccttacgcagtgcccgcgggggatatgaggccccccgcgcggccctgaaccccaccggattccccgggccggcccgaccgcccccacctagtccctggccccgcgagtgcaacccccgacactaacggcctttacgcgacatccgagcagcgtgtctatcccaaaggcctaggagcatttgcccggctcggtcaaatctagcgcaagtttgaagcctgcggcctcgcaattttagcagcttcgttccaggccaggtgagctggagcgcggatttagaatgctttcctgctcttcgagaacttgaggttttaattttaatttttactttttttttttttgacacggagccttgctctgtcgcccaggttggagtgcagtggcgatctcggctcactgcaacctccacctcccggattcaagcaattctcctgcctcagcctcctgagtagctgggactacaggctcgtgccaccacacctggctaatttttgtatttttagtagagacggggtttcaccatgttggccaaactggtctccaactcctgagctcatgatcctcctacctcagcctcccaaagtgctgggattacaagcatgagccatcgcgcccggctgagcttgaggtttttatggtcttttctgggtgactttgcagtggtcatattattactcctaggtgggggaaggtagggactgtccctcatcactgctgtgcctgcagaggactcctgacaccgggattgtcggcagggtgcaaccaagagcaaaagcacccagaagtgggggtgtgggtcaccaagtaagagaggaggcccctccataaggaaggagcaggtcaaggggcaaggggagtggtggctggggcgtttggccctgcctggcatgctcaattctgtgtgtgcacagctgtccccagccatgcatgctctccatggaagtcaggtgcagccctgtgttctctcacactgcagtcctttcagccagcctgtgaacagggcccttccccgccctgtcttcagtttctcctctctgaaggggggtgaccacccaccttgagggtggcctcccagtgaggtgagcacaccaagggtgggccattctttcctggcagactcaccaggcctggtccagccgctactcccttgttcatgcagtccatgccacctggttcctgtttgccacaccaaacaaactgaacacttctcatggtggtccccgggcctaaactgcagagagttgttacttcagctcccatggctgatggactgcaggttccacaaagcatggccttgcacctcggaggcacccaagaccacttaagtgggttacacaaatgaaaatgaggctgaaaggatgacactgaagcaggcattgaaatgccaactttttttttttttttttttgaaacggagtcttgctctgtcgctcaggctggagtgcagtggtatgatctccactcactgcaacttctgcctcctgggttcaagcgattctcttgcctcagcctcccgagtatctgggaccacaggcacatgccaccatgccccgctaattgtttgttttttgttgtttttttgtttttgtttttgtttttttaaacagagtctcactctgttgccaggctggagtgcggtggtgtgatctcagcttactgcaacctccacctcccgggttcaagtgattctcctgcttcagcttcccaagtagctgggactacaggcacgtgccaccatgcccagctaatttttttttgtatttttagtagagacagggtttcaccatgttggccaggatggtctcttgtgatccgcctgcctcagcctcccaaagtgctgggattacaggcatgagccaccacgcctggcctgaaatgcctactttttaaaaatgagtcactttagcggggaatagtggctcatgtctatatcccagaactttgtgagtcccaggcaggcagattgcttgagtccaggagttcgagaccagcctggccaacatggtgaaaccctgtctctacaaaaaatacaaaaattagcagggcatagtgatgcacaccggtagtcccagctacttgggaggctgaggcaggaggatcgtttgagcctggaaggcggaggttgcagtgagccaagatcacaccattgagcaagaccctgtctcaaaataataaaggtaaataaaagtgagtgactttaaagaaaagattgcctttcaggcgcggtggctcacgcctgtaatcccagcactttgggaggccgaggcgggtggatcacctgaggtcaggagttcaagaccagcctggccaacacggtgaaaccccatctctactaaaaatataaaaaattagctgggcatggtggcgggcgcctgtagtcccagctactcgggagactgaggcaggagaatggcatgaacctgggaggcggagcttgcagtgagccgagatcgcgtcactgcactccagcctgggcgacagagagagactccgtctcaaaaaaaaaaaaaagaaaagaaaagattacgaacagtgtaggttgtaaaaattactgctgtcttacttctcctcgccctctaggagtctctgtggagtcttcttgaataagctgtgaaacatttccccacccgcttccctttcttggcccaggcttcctgaccacagcctcacctttgagcagctcagagccctgcctgccaggatgcgagccactgcctggatcgtggctctgcagggccacccatgatggaacaggtcgcctggtgaggtggtgaggcccttcatcatttcagggggtgtacagcagtactgggtaaccctgaaaatcagggatgagactgaaggatcccttccagaatgtggacacaacccctcctttgagtctcacctcctttccttcttttttttgagatggagtctcgctctgtcacccaggctggagtgcaatggaacaatctcggctcactgcaacctccgcctcccgggttcaagtgattctcctgcttcagcctcctgagtagctgggcttacaggtgtgtgccaccacacctggctaatttttgtatttttagtagagacagggtttcaccatgttggtcaggctgctctccaactcctgacctcgtgatccacctgcctcggcctcccaaagtgctgggattacaggcatgagccactgcgcccggcctctcgcctcctttctttcaagtctgaggtggctagcctggaggggtccccaggggcttgttgggcactgacgaggggacaccctgggggcccagtactccactcagacacctcccacagccttctgacagcatccttcccacagctgaccagctagaggacctcctgacccctccacttgtctgctggtgtggaaaagcctggaccctccctcttggagcctcagtttccctatctgtaaacttcggtctatcccaagctgaagaactggccagtccctgccatatgcctcactttcccctgggacacattttaatatccctttcctggccaggtgcaatggcttccccatgtaatcccagcactttgggaggccaaggtgggcagatcacttgaggtcaggagttcgagaccagcctggccaacatggtgaaaccccatctctactaaaaatacaaaaattagccaggcatggtggcgcacgtctgtggtcccagctacttgggaggctgaggtagcagaatcgtttgaacctgggaggcggaggttgcagtgagtggagatcacaccactgcactcctgcctgggagacagagtgagactgtgtctcaaaaaataataataataaaaaataaaataatatccctttcctcacaggggctattgtgtcatcttctagaaggatccgttgaggctctgaggggtgggggaacttgcttgtgggtaggaccacctgtcagaggtcagaggtcaggccaccaaggagacccagtgggatgcgccttccaaaggtgggggtacggatgggacccatgaaacctgactcctctcagactctagccaagtctaagactttggacggccaccacccagaggagaaactgagacccagagcggcacgggttggccagggtcacccagcaccagatagggactttgccagccccggggcaggaccctgtctccggccctcgaccccgctgggccgtaccctccccgttcacctcccccacccgggccgcggctgctaggagagttcagaacaaaaggcggcggggggcggggccgaggcgggccgggggtggggcggaagctataaggggcggcggcccggagcggcccagcaagcccagcagccccggggcggatggctccggccgcctggctccgcagcgcggccgcgcgcgccctcctgcccccgatgctgctgctgctgctccagccgccgccgctgctggcccgggctctgccgccggtgagtgcccgccactcgccggccgctcctcgctgagggggcgccgggcacgcgggctgggcccagcggcggatccggaccgaagggggcgccccgggtggcctccagcgcccggtacccgaaacgctttctggttccctctaggcgtgatagacagcgagcttgcagtccctgggggtgtgaaggggagccggcgccggcatcgttcgggctggtgggacgggactccacgctggactcacgcttgctcccagcgtggggacctgcctctcgcgctccagccgcgggtgctggagtgtgcgttgaaggaagcagcagagggagtggtaacagggccccctattcatcgtagggacaaagccgagcagatcccaggcaggtgtcagcctgcaggtgtgtggccgcagttagtacacctccaggtgtgcggtgggatgaaggataaagggagaagggagggcagcgctgtgctgcgggaaatggggtctaagcctggagatgtcccccgcgggcacctgccggcagcagttttgggaggcttggagccaggagaacatgagtatgaaatagtatgagtgcagtgtgtgtgtgactgagaggtggctgtcagaaagaagcggggagagaaaggaaagggagaaaatgtgtgctcaggagaggagaagaaagcccaggtaagagaggacagcagagtgaggagaggagggactgtcatggagtgtgtgtgacagcttgcatgtgtcccaaaagctgccccttccctggggcgcttccaggcaccagtcacagggcctggggccagagcctgggccactccactccacagcggaggcatccagacagctcgggcagggaagggagcaggagggtgtgacaggcaggagtctcaggactggcctggtgaggaggcaggcctggccaggctgggaccctctgtccagccactctggctctgctcagggcagccttgtcctgtgctggctatgggagcagaaagggatgggatgggtggggtagagtgaatggggggcatctcagtctggagtcttgcctccttcccagcccctcttggttcctaggacttgggacagagtcaggaatcactgtgggtagacattgaaccacaggtctggaaattggagagatctgggtttgaaccatgtgaccctgggtgaatcctgccatgcctcagaatctcacccactccatctctaatgggagtgcaggtgggagggggcaatggtgcctactgctgtgtccactgttgagcaatgaggtgatgccaggctcactagaaacactgtcacctgtagctgccactttgacgcttgtgcatggtcagtgctggagctgggggccagcttggggtggggtctgagctggactgtggtctgtcactctgcaaacacgcagggagcatktggggtcacctctgatgtgtttatcccccggctgccttcagcaaggctgggagagctctgtaaatatttatccagcccagttcccagctttcagggttgatggaagccctgcagtccgatggatgggacgaagctaccgtccctcctggagccagcagcagaggggtgagaataggaagattaggtggaagcttgagggagaagatatccctgcttgccacctggctgtgygagttgggcaggttgcttgacctctctgagcctgcatggtgatgctcccgtcttcctccatagcctaacaagtgccctcctcgaagtcttgcctcccaccgacatcagaaggcatagctatgattaattatacccactagaccaactgcaaactgaggcccagaaaggggcacaatgagcccagcctttcgcagtgtttcctggcaccctggggtcctcccttatctcccctctatctggtgcctcccattttctggattgcaagttgaccccagggcggggttgactccgagtctctaagctctgccaggacactgggtcagctgagaaattccttgaatgtgtctgcagctgaggtttggtgtctggcagaagagggtggggctgagtgagctaagaacccaccacagggcaggccaagggaggctactggccaagacagagggaatgcactggaagcagaaatgcttcttgggaaagtgggttttggagaaaagccaagagctggggagacagggggaagccctggaggtgggaggcatgagccccaggtctaggtccagctcttgcatgacttgctgtgtgaccccgggcaaagtccttgagctctctgggctctgtctcatcctctgggaaatgggggagctgcttcttcctcaagctccccaggggtgtagatgaggccagtggtggcctgtgtctaccacytcacctcactgaatcctgagagtcctgggaaggccaagcccacctgtctcacaagtagcaagctgcttcatgccgtgccttgtagttagggcatctggccccaggccagaaaggacttggaaagatgaagtgtgggaggacagtgaggcagaatgtgtgtcctatcccagccatggggaaactgaggccaagagctcatgggctctaaaaaaataatgggctctaaaaacaacctcactagctagaggcctcatttctagcatctcctgctcactcagtttctaagaatttaatgaacaagacagggacagggagaagagaccttgatatgtgggagaccctgcacaaggcgcttctcttttctaggcctgaaagctcccttctagctgcracttctgttttaccatttaaagcctgaagattttgttgggtagctagaggggcggtgggtgatgggaactgtagggactggcaagggcagattcccaagcgtgggaggggagggcctacagggacaaggaacagggccaggtaagaggtgcttttctgtgccagaggctacagcaggcattacagaaggatgtcatgtagccctttgctgtggcatcatwcccatttgacagataggaaagttgaggctaagagaggaaggtgacttgtctagagtctccatgtcatagaactaggccttctgaacctcagtggctggctctttttgtgacactaagactgtcatgatccaggggtttgggcatggactgggtgcctcatgagggaaggacaggaagggacagtggaaggggtgggggcatgcccgtggctctccctccatgactgtctgcaccaggactcactagagggcagaggagagaagagatttctgaccatgggcataggcagggctggcaggctgggctctgggttgtttggagctcccaggggagagcacagctctgccctttccagggagggtcttcatacccctgccaggctggggaaaggaatctgtttctcctgtaagtcaagggggcagtgtggcgaggaggaggaggcaggcccctctggcagcccacatcctccatgggagaacttggatatgtagcatctccacctgcctggtggatattggaagcccaacgaacctgcctgcaaaatgcccgggaaatagcaggcgctgaataatttgcacctcaccaaggtgaggccagcctgggtccctccttcaggggaagggtaactcaacccctgcagagcagagcagaggtagcagggagctgggtgggctgtgagcacagacagtccgctgcctgccagctgttgtctgatcaagctgcttaactcctctggggcccatttcctcatcctggaaatgagggtgatgatggtggagttggtgagaggttccatcaggggctaagagcaagtctgtggagctgttgccaaggtcctagcctgcaaccagtgctaagtacttttttttttttttttgagatggagtctcgctctgtcacccaggctggagtgctgtggcacgatctcggctcactgcaagctctgcctcccaggttcacgccattctcctgcctcagcctcccgaatagctgggactacaggagcccgccaccacgcctggctaattttttgtatttttagtagagacggggtttcaccgtgttagccaggatggtctcgatctcctgacctcatgatccgcctgcctcggcctcccaaagtgctgggattacaggcgtgagccaccaggcccggccaaccagtgctaagtacttattaacaataagcccaggccgggcgcggtggctcacgcctgtaatcccagtactttgggaggccgaggcaggtggatcatgaggtcaggagttcaagaccagcctggccaagatggataaacctcatctctactaaaaatacaaaaattagccaggcgtgaggctgggtgcggtggcgcatgcttgtaatcccagcactttgggaggccgaggcaggcggatcacaaggtcaggagatcgagaccatcctggtaacatggtgaaatcccgtttctactaaaaatacaaaaaaattagccgggcatggcagcaagtgcctgcagtcccagctactcaggaggctgagtcaggagcatggcatgaacccggaaggcggtggttgtagtgagcccagatcacaccactgcactccagcctgggcgatagagcgagactctctctcaaaaaaaaaaaaaaaaaaaattaaccaggcgtggtggcaggcacctgtaaccccagctactcgggaggctgaggcagagaattgcttgaacccgggaggtggaggttgtagtgagccgagatcgcgccactgcactccagcctgggcaacagagtgagactccatctcaaaaaaacaaaacaaaaaaccaataagcccagaatcggccagaacccacaacccagtgagactgcgctgtgccaggtaaccatgcaataagcaagctcggaaatggggggaagctgcttcagggcctcacgccctaagtagttccatagcctccgtgttcagaaggccccccttcatggtggggtgttcttgatgcctcagctctgggatcaggagcagggagcgttgggacgctgatcagatccctggggtgtatggagcctgggagagctgccaaaggctgagggtgaggtggggcctgagtggctgagctcctaccccaaatatggctgtgaggaggctgcagttgcccagaccagacaggtgctgagtctctcagcaagcagcacagctccatccctctccttcagtgcaggaaggacacttggcttctgtgcggtgtccagagccaggccttagccttaggcctgagccaccagagtcctggcctggccttgccatgcccttgctgggtgactttgcagggtctccaacctctctgagcttctgcttttctcatgcacaagaactgtaacttctgccctggagacttatagacaggtagcaggatgtagcttaggtctgaatcgccatctgtggtcctggggctttggcgagtggggctgggcacctggtaattaactgtccccaccctccccgcttgaagaaggcaggcagatcacagatcagctcccactgtactcctagccctggtggggtgtgaccaaaaccacctctgctagaagccaggcctcagtggccaggtgccttcccgggtgctgggcctgtgctaggtgctgtacatacctcaccttgtccagtccacaagtcagtgtcacccccagcagtcaggttacactgactgaggccacactgcagggctacagccgctccacactggggaggaggtgggggaaatcctgggcaggagagagggcagatcctgctcacatgacagggacaggagcatgacccaggtgtgtctgaacttagcggacacaggaagaaagggagttggaagcaagtttctgtggggagcaggaggaggttgcctggtgttccttcggaggaagctttttggggtccattcctggagtgtatggctcayagccagtcccagtgtgcccccacccccagacctcattggcctaagtagctggagtaggtgacaggcagcccagggccctccacgatgtgggggacagcttgatgccttggaacaaggtgccaagaaaccagagagccagccagatgccaaagggccctgccatgtgccggtgccctttccctctccatttgcccagccacacagtgggctggggttgcacgtgtgtttgctgacaggccacatctctaactgtgggccatgtggaccttaggcctgaccagaccctcatgtcatcctcctgcctaggacgyccaccacctccatgccgagaggagggggccacagccctggcatgcagccctgcccagtagcccggcacctgcccctgccacgcaggaagccccccggcctgccagcagcctcaggcctccccgctgtggcgtgcccgacccatctgatgggctgagtgcccgcaaccgacagaagaggttcgtgctttctggcgggcsctgggagaagacggacctcacctacaggtaggggcctgggagcaggacactaggatgccacctgtgtgtccgtgggtaagccagytgccctcayagctgctgcttgagacacaggccagggtagatcttcgtgtctaacagacctgtgtgtccactgaaccccagggaggtcatctatgggcaaaccccctgaaaccccaacttagacacatacacatatggagaccctccctcagcagaggggcagagcctccgtcatcatgcaaagagtcgcagcacatgcctgcggacgggtgttcagtcactcaggcagcctttacaagagacctgtgaggaccaggctctgggactccacggtgaatgaggcagacacagccccatcctctgtgtcagtctgaggtgggtgtcagccatgtcattgtccaactctaccatcacaacttgggcttcgagcaggtggagacagtggtaagcggggagaggcaatagtgggcatctcactgggtgacctgggaggaccctgggcaggtgatggggaagctgaggctcacacatcctgcgggtggggacccagcctgaagaatgggctggtgtcacacagcattggagctgagactggggtctttagaatttcctaggtgggggcctgggaaccaacaggggctcaaggaaccaaggtgtccccacagtgagtggcactgtcaggtctaggatgggggtctcgggacccctggtcctggttctttccactgaattcagacacttgtatttgcctaagtatgagcaaaccacatacacatgtgcccatgtggccagggagaccagtgcgctgaagctgaggcccagagtacacctggcctgtgtcctgagtgttcacacacccaccaagcatccaggggcaactcctggtgcctcagccatcrggggctgtcccttccctgaggcccaggcccctccatctccctccaggatccttcggttcccatggcagttggtgcaggagcaggtgcggcagacgatggcagaggccctaaaggtatggagcgatgtgacgccactcacctttactgaggtgcacgagggccgtgctgacatcatgatcgacttcgccaggtgaatgggcggcctgggacccctccgggaacagcctcgcctgccagcagccactgaccccgcccccacccatctgtaggtactggcatggggacgacctgccgtttgatgggcctgggggcatcctggcccatgccttcttccccaagactcaccgagaaggggatgtccacttcgactatgatgagacctggactatcggggatgaccagggtatgggctggggacccattttccagatggggcaaccgaagatcataaagaatggggactcgccaaggtcactgagctggggtctggagctggatgtcctgggcaggaggttcgggggttgctgagccacctccctttttcaggcacagacctgctgcaggtggcagcccatgaatttggccacgtgctggggctgcagcacacaacagcagccaaggccctgatgtccgccttctacacctttcgctacccactgagtctcagcccagatgactgcaggggcgttcaacacctatatggccagccctggcccactgtcacctccaggaccccagccctgggcccccaggctgggatagacaccaatgagattgcaccgctggaggtgaggccctgcctgccagtccccctactcctctgctggccactgtgactgcagcatatgccctcagcatgtgtccctctctcccaccccagccagacgccccgccagatgcctgtgaggcctcctttgacgcggtctccaccatccgaggcgagctctttttcttcaaagcgggctttgtgtggcgcctccgtgggggccagctgcagcccggctacccagcattggcctctcgccactggcagggactgcccagccctgtggacgctgccttcgaggatgcccagggccacatttggttcttccaaggtgagtgggggttggggatctgctcgagagacttcccagagccaggaatgttatggccaagggcaggaacagacagatggatccttagggacacagtggatagggagarctgccccaaagcctgggggccragggagagagagtgtggtttgttcctcaggcacaggtaggaggttctcggaggtggctcttgagataggagcagcgtggaagggattgcacggtggggcctcgtgttggtgcgttcaaccctcagccaccccatggggcggggttctagagatgaggcctctggggccccgaggcagtgaagtgactcactgtgagtgcagctgggaagaggcagggcagggaattgatccaggtctatcatcctagagctgggatttccatcctcaactggcagagatgagagcctggagcattgcagatgccagggacttcacaaatgaaggcacagcatgggaaacctgcgtgggttccagggcagtccagcctgcaggggcccagggagtggtcagtaggcatttgtcacagccaaatgccagtggaaggagcagccgcccaggcagccctctactgatgagagtaacctcacccgtgcactagtttacagagcattcactgccccagcttatcccaggcctcccgcttccctctgcgggtggggtgctgagcaggcattattggcctgcatgttttactgatgaggaaactgaggctgggagagtctgtggtaggggtcaagcaggtccacagtggcggggcatggcagtggtggctgggcaggtccttgcagccttccctctccggcaggtgctcagtactgggtgtacgacggtgaaaagccagtcctgggcccygcacccctcacmgagctgggcctggtgaggttcccggtccatgctgccttggtctggggtcccgagaagaacaagatctacttcttccgaggcagggactactggcgtttccaccccagcacccggcgtgtagacagtcccgtgccccgcagggccactgactggagaggggtgccctctgagatcgacgctgccttccaggatgctgatggtgcgttgggggtgaggcagctggtgggaggtgggcacagcagccgcttctcccacctggtggtggctgggctcccacatgcctgccacaggaagtctggctcttcatcacaggtcctttgtccagagccatctgccctcctctcggtggccggctagtgctacattccatrttgcagatgaggaaactgagggtcagagaagtgcaaggtcttaccctggtttttcagccacagccagtagaacaataaactgctgtacactgagggccaacaatgctctaagctccttactggtctcatccagttctcagaacagccctctgatgtgacacctgttgtgaacccagtttccagaggagcaaacagaggctcaggcaatgaggcccctaacctggactaccctggtggtccctgctcctaaccactgacccacccagcctcccacaaccacagggggctagagccagtccagtgctccctcccctgctaggctcctcttctgtgctctttctcccacatcaggacccactgggagagctatcctagggtagcctccagctccaggactccagggtgcccgtcaatagcctggctaatttaatagatgcaggagagagtgatgtggagggtggtgggggcaacgggacttgctttcctgagaggtgggactcaggcctctgaggctctgggtacctgtcaggctgggtattagcccagcccagattccggggcaggcagaagggctccctagagggaagagaggttctgaaaggccggccctggatcctgcaggactcgaggractcagcagtggccaagggcttcccactcagccctcccttagtgcccatccctgggcacagcctgacaggcaggagtagggcccagtgtccrctcgcccaggcttgaccaccttctcttctcaggctatgcctacttcctgygcggccgcctctactggaagtttgaccctgtgaaggtgaaggctctggaaggcttcccccgtctcgtgggtcctgacttctttggctgtgccgagcctgccaacactttcctctgaccatggcttggatgccctcaggggtgctgacccctgccaggccacgaatatcaggctagagacccatggccatctttgtggctgtgggcaccaggcatgggactgagcccatgtctcctcagggggatggggtggggtacaaccaccatgacaactgccgggagggccacgcaggtcgtggtcacctgccagcgactgtctcagactgggcagggaggctttggcatgacttaagaggaagggcagtcttgggcccgctatgcaggtcctggcaaacctggctgccctgtctccatccctgtccctcagggtagcaccatggcaggactgggggaactggagtgtccttgctgtatccctgttgtgaggttccttccaggggctggcactgaagcaagggtgctggggccccatggccttcagccctggctgagcaactgggctgtagggcagggccacttcctgaggtcaggtcttggtaggtgcctgcatctgtctgccttctggctgacaatcctggaaatctgttctccagaatccaggccaaaaagttcacagtcaaatggggaggggtattcttcatgcaggagaccccaggccctggaggctgcaacatacctcaatcctgtcccaggccggatcctcctgaagcccttttcgcagcactgctatcctccaaagccattgtaaatgtgtgtacagtgtgtataaaccttcttcttcttttttttttttaaactgaggattgtcattaaacacagttgttttctacctgcctgcttggtctccttttgtgaatgttcagccaggatggggaggcctggccactgtccagccctatcctgggagccagggtcgaagtccaccacccccaagcctctggcccttggggctgggcacagtgctcagggctccttctgctccatttctacatcacattttgctacagtggcttcttaactggctccccactttcctacttgtcccctctgttcatcctccagagtggtggtttatctgctcatgccacagcccagcctgccatacatagctgtggtttctgcatccgtaggctcaactaacctcgggtagaaaaaacaatgtttaaaaaaaggatgcggmcgggcgcagtggctcgtgcctgtaatcccagttctttgggaggccgaggtgtgtggatcacctgaggtcagaagtttgagaccagtctggccaacatggtgaaaacccatctctactaaatatacaaaaattagttgggtgtggtggctcatgcctgtaatcccagctacttgggaggctgaggcaggagaatcacttgaacgtggaggcagaggttacagtgagctgagatagtgccattgcactccagcctgggtgacaagagcaaaattccgtctaaaaaaataataaagtaaataaataggctgggtgcagtggctcatgcctgtaatcccagcactttgggaggctgaggccagcagatcacgaggtcgggagatcgagaccatcctggctaacaccatgaaaccccgtctctactaaaaatacaaaaaattagccaggcgtggtggcgggcgcctgtagtcccagctactcggaaggctgaggcaggagaatggcgtgaacccaggaggcggtgcttgcagtgagccaagatcatgccactgcactccagcctggacgacagagcaagactctgtctcaataaaataagtaaataaataaataaataaataaataaataaataagggatggttacctccgtactgaacatgtacggacttttttccctatcattgttccctaaacaatagtataacaactatttatataacatttgcattgtattaggtagtataaggaatctagagatgatttaaggtatacaggaaagtgtgtgtaggttatatgcaagtatgacaccattttatataatggacttgagcatctgtggactttattatctgcagggggtcctggaaccaattcccatggatactgagggatgactgtactttggtttcccaccactgtgaggatacagaacaaagcaacttcagtcactgcccttcccaactctccagtgtctccttgccctaccttccagccccatgtgtgtcttcgtaatagcatagttgcattttttttttttttaagagaggcagggtctccctttgttgcccaggctgcagtgcagtggtgcaatcagctcactataaccttgaactcctgggctcaagggatcttcccctctccacttcccaagtagctggggctacaggtgcacaccgccatgccacacccagcttatttattttagaatttttgtagagacagggtcttgctgtcttgtccagtctggtctcaaactcctggcttcaagtgatcctccctgccttggcctcctaaagagttgggattacaaggccgggcgcagtggctcacacctgtaatcccagcactttgggaggccgaggggggcggatcacgaggtcaggagatcgagaccatcctggctaacatggtgaaaccctgtctctactaaaaatacaaaaaattagctgggcgtggtggcgggtgcctgtagtcccagctacttgggaggctgaggcaggagactccagcctcaaaaaaaaaaaaaaagagttaggattacaggcatgagccgctgagcccagccacagctgcaatttcattagattgaacggtgtgaaatcatcagtagtgggccactgttttactccctgcattattcaatcatgattgctttcagactttcattagtttcactagcttcgcgctgtaagagccaagaggcagagccacagggctgggctgcctggtttcactccccactgcagggctcggttaagcagagtgtaggctaagagaggaatggagaaggtggaaggtgtctctcccttccaacgctcatctgatgcaccagccaaaccaaataccacctgggcctttgaacattgccaagcctcatccgctgttgtcattttgcccacctccacagctgcagggacagccgtaggcccggaactgggatatctcttcctaggggcctgcctatctgctcagctgcactgcgttttaggggtggggaagctaaggcacgagattggggtcccaaagcatgcccagaccacccaggcttccagatactaggtcctcctccttcaggcctcacttcgttgcttttcccctgggctcagttccagtcctggctgtaagactgggaaagccactgcttgagtcaggacctcaktggctatttttgtccgtgagaagtcctctacaccacgacttgggaggcagcctgggagaaagagaaattagtcgtggctcctttaaggggtccgcggaggcgcgcccggccttttgtttgagcggcggcgcgcgcgtcagcgtcaacgccagcgcctgcgcactgagggcggcctggtcgtcgtctgcggcggcggcggcggctgaggagcccggctgaggcgccagtacccggyccggtccgcatttcgccttccggcttcggtttccctcggcccagcacgccccggccccgccccagccctcctgatccctcgcagcccggctccggccgcccgcctctgccgccgcaatgatgatgatggcgctgagcaagaccttcgggcagaagcccgtgaagttccagctggaggacgacggcgagttctacatgatcggctccgaggtagcccggggcgcgttctcgccctccccgggctcggccccgcgggagccccggggcgggcccatgcgccgagagcgcgcgtctccattcatcggggcgggcgggcgcgcgcgcgcgctcggggctgtggggcgtggcctagtgggcgtgtcgggtgtggcccccgccccctcatcgacctgggatttccttacttatttcgccgaggtccgccgccttcagtgctgccaagattttggcgccgcgaggggccccagtggttccgcgctgggttggtttccagtcagacgcaaagaaacgggatattgagttagcccctgcgacgcttgggggactgcactgctgcctttgaccctttttagatgtcgtaaatttcacgtgcacccctccccgtattgctacttgtgggaacctcaaatggcaggctggaaaccctggacttagtgagggctcatccccattgtgtttgttgcctcttaggtgagcagtggaggtcttttgacctttgtttaccggtgaagaaacagattggaggaagatgtttgcttttgggtgaataagggccccatgcctaagctagatctttcagcagttctgaagcgattgacactttccatatctgtgaactgattctgaattattacaggggaaagagcctaaggatgtttaacccttaactagagtggctgcattttgttgcatcaactggatgactgacttcaggaaaactctactggcctttgaatgggtgtttgttccaagtctattaggttcttgttttttgttttttatagagacagggtctggctatgttgcgcaggcaggtctccaactcctgggctcaagcagtctgcccgtctgggtctcccaaagtgctaggattacaggcatgagccaccacacccggccatatattaggtttttacagattgtctcaaactagccttttttgctccaaaggcagtccccagctagtatatgttacctttttaaaaaaattatggatatacagttcagatgtacaaatgtcaagcagtagaatctcatgtaaggaagtaagtgccaatcctggagaattaaagctatcatgaaatgccaagagtttcttctccttatagcagtttttagtatcatattccagcattttattcgtactttattttcttttatttttgaaaaaagatctcactttgtgcagtggtgtgatctcggctcactgcagccttgacctcctgggctcaagcgatcctcctgcctcagcctcccaagtacctgggactacaggtgtgcaccaccgtgcccgactaatttttgtattttttgtagagacagggttttgccatgttgcccaggctggtcttgaactcctgggctcaagtgatccttgcacctcagcctctcaaagtgctggaatgacaggtgtgagctactgcactcacactcagcgcattcatactttttaaacttgtgggttttatccttcacaattgagcatagcatgaatgaatgaagcctcaagatggtcacactgagtcccatggatgagactaaggtcaatagcatcagaactttagtgttagcattttccaccattttttttttctggacgaggtttgactctatcacccaggctggagtgtagtggtgtaatctcggctcactgcaacctccgcctcccaggctcaagccgtcctcccacctcagtctcccaagtagctgggactacacgcacacaccaccacacccggctaatttttatatttttagtaaagatggggttttaccatattgtccaggctggtcttaaacttgtgagctcaagtgatctgcccgcctcggcctcccaaagtgctcgattataggcgtgagccactgtgcctggcctccactaatttttataaaacaaaaaatataggattcaataaaattttcacgttgtcacttaaattacaactgttcaaagatgccagtgctggggaggtagagccagtgcctgtccatctgccacagttcagaatggtcctcattggccagtaggcacctgcctaactgcagaatgcaaaaggtgtcaaatttcagcctgtgatactaggcgagttgtttacctgatctaatgggtgtaaaagtaatcagtttggctctaagtaggtgacacttcaaaagaaagctttcatttattagttggagcaaattgagaagctgtgcgtggccaagtgggaagaaccttgggaggcctggttccagccctgctctgccttgctgtcgtgtttctcatgtgtataatgtgatgcttagactagatggtctccaagatcttccccaaaacacattttagtttctagaaagctaattacagtcttgtctttcagccccttgactcctgggcctcccagtaagaataatcttcctgagacccaggctgtaagagactcagttggagaggcagtttgttcttttgggcctgacttaatcatcagaccttcggagtttagggaagagttcaaggtcagagctctattgaaattcagtagctccagtgatagtagtggatggacggtctcagcccactgccctgtggaaaacaggcactgtattcagagaggtgggccagccatagcaacatacccagtgcctccatgcgccatctgtggagctgtcttgggaaggcatctgcatttactaagagtgtgtgtcactgttctgccattaacagacagctgtatttaccaagccggagtcatggagctttgaggaccctaacagatccccaagtccagcaccttgattttatattcaggaaacctgggtcccaagagggtgaaggctggttcagaggaaagccaggaaggcaagcccagtttcctaagttctgaaggggctttggggggcatctaggagactcagagccctgcagggcctgcaaggtagtcataggggggagtattgtcaatttcttttaaaaaacctaatggaaactctacatttaccatgatactggatgatactgacacacaagccaaataacatagaggggtctgtgccctctatgt

SEQ ID NO: 5700 - DNA, 52520 bp, Homo sapiens
  misc_feature (1)...(52520): n = A,T,C or G, or insertion/deletion polymorphism (see Tables 1-2)
gactctaagcgcttcataccacacctacaggaaatatctagcagccagttccatgctcagtttcttgaagcatgagattccaggcccctaatatggcatgtgactgtgggcagtacagaggcctcaattctcccatctgaaccatggggaaggtccccccgccctgaatcccctacagggctgagaggagggctctggaaaccttgaaaaggactttgtagactctgagctgggcaccctcaaaggcttggttaggagggagacaagagaaagaattaatccacttcccaccaaggaagccaagagctgaaggagaaatggtccgtgtcctcctccagggcctgcccctcagcatggttcctccctttgttaggagggttaagaacttggccaagtctcagctccactcatctctggctgtatgttctttgtacttcccctctctgagtgtcgggcttctcaactgtgaaatgggggtgataatgataacagccttaccaggactgtagtaaggacaagccttggcccattggttcattgtcttagtctgctcctgttgttataacaaaatacctcagactcagtaatatataaacaacagaaatatgttgctcatagttctagaggctgagaaatccaagaacaaggtgtcagtagattgggtgtcaatgagggcctgttcctcatagatgacgtcttctatgtctttacatggtagaaggggtgaacaaactccctcaggcttcttttataagggcactaatcccatttataaggatggagcttcatgaagtgatcgcccccaaaagtcccacctcttaatactaccacattgcagattacgtttcaatatataaattggaggagacacattgagacacatggatattggttgaataattatctttcttttttctttttttttttttgagacagagtcttactctgttgcctagactggagtgcaatggcacgatcttggctcactgcaacctctacctcctggattcaagtgattcctctgtctcagcctcccaagtggctgggattacagatgcatgccaccatgcctggctaatttttgcattactagtagaggcagggtttcaccatgttggccaggctggtctcaaactcctgacctcaagtgatccgcccacctcggcctcccaaagagctgggattacaggcgtgagccaccatgcctgccctgaataattatcttttgacacctggtctgcaattctcatggagtttccggtctggaagaagagtctgtatgtaatgtgtttggcacaggtaggtgcccaatgggtgggtagatggatggatggatggatgggtggatggatgagatgagtgacttactgcaggtctcacagttataaagtaactcttcctgatagctcacactggccaccaaagacacattaagcactgattagagaggtactccatggaccaaattacttgagcaaagtcttagaattaggaattattgcagcatggataagaggcattcattttatgttctcttttagtatttttcccaacaagatcctgagaaggaggatctggatggaggttctgccagagccccctggagcagagccaggaagttgagtagggagtagcgccccacagcccatatgagcaggcaggagcaggccaagcctgagggtcgggcctcagaggcctggcctggccgtatttagttttcaaggcactggaaggcttctcacctcctctgctgtccaggcacagaagcaaggccacccacagttgctgagtcagggaggcccctagggcaggaacagaggccccacagtggggtaacttgaacacagtggttcagagcctggtctctgtcaagaagatatggtgctgggaacagtggtgtgtccctgtggttcgygctcctcggaaggctgaggcaggaggataagcctagggattcttgagcccaagagttctaggctgtagtgtactatattgatcgagtgtctgtgctaagttcagcttcaatatggtgacctcctgtaagcaggggtgtctaaggaggggtgaacaggcccaagatgaaaatggagcaggtcaaaactgtgctgatcagtggtgggattgtgactgtgaatagccactgcattccaccctagacaacatagtgagactctgtctctaaaagtaaataaataggctgtgcgcagtgggctcacgcctgtaatcccagcactttaggaggccaaggcaggcggatcacytgaggtcaggagttcaagaccagcctggccgatatggcgaaaccctgtctttactaagaatataaaaattagctggtcatgatgtcatgtgcctgtggtcccagctactcaggaggctaaggcaggagaatcacttgaacccgggaggcagaggttgcagtgagctgagatcacatcactgcactgcagcctgggcaatgagtgagaccctatctcaaaaaaaaaattaattaaattaaatttaaaaatgtaaataaataagtaaataaataaataaaagctgtgggttcaaatcctgctcaacaaccaatagctgtgtgcctggcctacatatcacctatcagagcctttgttttctttatttgtaaaaacaacaacaaaaatggcggtaaaaacaagcaccattactgagttggttatgtacaagcctctgctaagcaccttacctgcattatcttatttaattgtcatcacaataaacaagtattattattgtcctcctgaaacaaagtacatgagaacggtgtctctcatccatgctgccgtaatttctaacccaagccgctgctcatgcagtcccatctacctggagtgtatctcttttttttttgagacggagtcttgctctgtctccagctggagtgcagtggtgcaatctttgctcactgcagcctctgcctcccgggttccagagattctcctgcctcaacctcccgagtagctgggattacaggcaagtgccaccacacctggctaatttttgtatttttaatagagtcggggtttcgccatgttggccaggctggtctcaaactcctgtcttcagatgagccacctacttcggcctcccaaagtgctaggattacaggcatgagccactgcacccagcctgtaaccaactcttatgcaaccttcagtgttcagtgtaaggtatccaaaaagttacttcctgactgtgagacctggatttccaaatgaggaagctgagtcacacagggtgagatcacattcaagtaagagacagagctagagaccgggtgcagtggctcacacctgtaatcccagcactttgggaggctgaggtgggtggatcacctgagctcgcgagttcgagaccagcctgatcaacatggagaaaccctgtctctactaaaagtacaaaattagctgggcatggtggcgcatgcctgtaatcccagctactcgggaggccgaggcaggagaatcgcttgaacctgggaagtggatcccatctactcgggaggctgaggcaggagaatcgcttgaccccagaaggtggaggttgccgtgagccgagatcacgccactgcactttaccctgggcaacaagagtgaaactccgtctcaaaaaaaaaaaaaaaaaagacagagctaggaagtgcttacaacttcctcacgcttacctacatttcaatttctgttattgaatcttttccccctcagatataccctatcagcttctatttttatttttatttttattttttgtgatggagtcttgctctgtcgctcaggctggagtgcagtggtgtgatcttggctcactgtagcctccacctcccaggttcaagtgattcttctacctcagcctcctgagtagctggaattacaggcggatgcaaccacaccgggctaatttttgtatttttagtagagacggggtttcaccatgttggccgggctggtctggaactcctgacctcaagtgatccacccgcctcagcttcccaaagtgctgggattacaggcatgaaccaccacacccggcccctagcagcttctataaaacaacactgggcacctgtcccatcccctgctgcctccttcagttccaaattgccaccaaagccttattcaaccctttgcaacagccctgtgcaaaaggtaggctagatatcatccccatgtcacagacggggaaactgaggctcagagaaatgaagcaagttgcttgaggccttgcaaccagcaagaggagaaaccataggtggacaacagtgctgtctgactcccaccccagtgctgtttccccaccacagcgagctgaccctcgacccctcaaccttcccagatgggagacttcacctcaactctcacacctacacaggtgattaggattaaagagaaaatcaacatgagatcaatttgaaaggaagggccctgcaggactaatagggtattttgcaaataagtaaaaaaataaaaataaaaagtaagcctccttgaaaaatcgtaaaagaactgggggaatgaataagctgtaactgttctaaatcagatcgtattcctacaagacacaggagaccagaacagctccctacagccattagctcatctcactcatttacaaggctctctgctgagagccaagagggggccccacccagaggaatcattacctggccagcacttcactgggatttcatgtcccagtaaagttttttcctaaattggggtacacaattgccaacatcttgttatttgtcaaagaatattaaaaggaaaaataaattgctactttctgctgttaccatcatctcataaaattcaataacaaggactaatcccagaatttggcaattttaaaaattacctatgtaagtgactcactatgttgtcctagttttctcactagccttgggccagtgagaactgtatctaagatgggcatttggcaaccctcagatgagtaggagagagaaaacatgtatgcaaataactcagagtagctcattgcaacttgggatgagaaccacataaaactcttctaattacttaatttaaaaaaaaagatttattggaagagggttttaccagaagattttttggattctgagggttatgtagtgactagggatcaaccaaacaaccactcttggcaaggacagaaaacttcaagaacaggtggaatcagcccatttgcatgcactctctctctctcttctctctctctctcctcattctgtgtctctgcttctctctctgccttagctgtcttctcactctagttacagacagggttcctccatgtggcagagaacatggtggctaatgttaccagaaaaactctgaactaggtacggtggcacgagcctgtagtcccagctacttgggaggctgaggtgggaggatcgcttgagcccaggagtttgagtccagtctgggcaacatagcgagtccctacctctaattggcggtggaggggggggcactttaggcaaattaaatttaacaaagtgtaactgcagaaagagcaattcacaaatccagagccttgcagaaccaggataggttcacagcaactcagagactgccacaagggtcagattacatttatggacagaaaaaggaaagttacatacagaaaacagaagtggggtacagaaacagctagattggttacggttggcattattggtacactgtttgaactgtggtcggcctgcaattggctgaaactcagcagctgtgactggatgagacctagccacttgttacaagagtaccttacggtctgtttacatacctaattagattacagttcacaatgtatggagaaacctttagacccaaattaatatacaacaggtaaggaagaagctttaggttaaacttaactcagtttcagtgagaaagaaaaaagaaagcaactgccacaaaaacagggaaggtgtctgattggcccagctgggtcagatgtctatctctggaccaatcagctgtggggtctgtaacaacatggcagctcccatgagaacggcatggttggagtcagaagaggaagaagcagaactgggcaggtgagctgggaagagaataccatagatgtccactatggagatgataaatgccctaatagatgcgcacaaaaaatgtcatgggcatttaggggatgaagacacaatttctagctgtgcaactgtggtgatcagtcagagcttcttggaagaggtggcattcgagctgggtcttgaagccgagaatcatctggaacgtacagagattctaaatgccacctcacattagaaaagaaagatgatccctggtaatggagaagatagcatccgaaagaattaaatatgaatgtctcactttgtcaagatttcataggttttttatttttacagatggtgtgtctcgctctccctcccagactggagtgcagtgcgatcatagctcattgcagccttgaactcctgggctcaagcggccctccagccccagcctccagagtagctgggactacaggtgcacaccaccacacctagctatagttttcaaaatttagatataattcatawataaattatattttatagttattttggtgtttaattttgaaataattttagacttacagaaacgttgcaaaaatagttcagagttatcctaaactcttcatttcctacaccttcacctagctttccctgataggaacatcttacctcaccttagtacaattatcagaaccaggaaattaacactggtacagtaacctacataccttatttgaattttagctgttttccttttgatctaatccaaggtccaacattgcatttagttgtaatgtcttcttagtcttctctaatctatgacagctcctcagcctctcgctttttttctcaaatgaccctgacacgtactgttcagtcattttatagaatatccctcaatttgaatgtctgattttttttttggtgattagattgagcttatgcacttttggcaagaatatcacagaagtaacgttatgcccttcttagtgcatcagatcaggggctactttctgttgatatgacttattactgggcatgttaacactgatcatgtggttaaagaggttatctgctgggtttctcttttataattttataataagtgtccttttgtaattagtaattatcttgtggggagataataagaccatgcaaaaatgtaaatttcttgacatttacggtatgtttgtttgtttttttgaaatgaaatctccttctgtcacccagggtggagtgcagtggtgccatttcggctcactgcaacctctgcctcttgggttcaagcgattctcctgcctcagccttccgagtagctgggattacaggggcccaccaccatgcctggctaatttttgtattttttagtagagacgtggtttcaccatgttggccaggctggtctcaaactcctgacctcaggtgattcgcccacctcggcctcccaaagtgttgggattacagacgtgagccaccgcgcctggcctacatttttttttttaagtgctgtcaaatgcatgccgtctacttttcttcagtaaatgtcaactctttacccattatgtgccagtccctgtggggtgtgccaagcagaaaaagcactgatctaagatgtgtggctcagttatgtgtagatccatgaccttgctgggctttaggatccttatctataaaatggatatcattatatcttaccagtaagaactgctgaggataaaggcagaccgtacttgtgaacgtgttctgtaatacaaactagggttgttcattctccttctgcagtgctcagctctggcctctcctctcctgtttgcatttcccttttccttcctgcctgtgttcaggcctgcagacttctgtctgtcctccctggtctaactcccttatcctacttgccaagccttactgtgatgtcatttaataaattttggagacacaaggagcgcctcatagagatggacaatttccttcagtagtctcctgctgtttttagagttgcctccaggtgcctgggcctgtgggtgttgggcaggagaaccttcctcctatggcagaaataagtgggagaagtagggattgccttcctccaataataatgctttggccctaaaaaggaaactcttgaaccccatagaatattttattttattttwttttwtttttgagacagagtctcgctctgtcgcccaggctggagtacagttgcacgatcttggctcacgcaacctctacctcccagattcaagcaattcttgtgcctcagcctcccaagtagctgggactacagtgatgcaccaccacgcctggctaatttttgtatctttagtagagatggggtttcactgtgttaccatgctggtgtcgaactcctggcttcaagtgatccgccctccttggcctcccaaagtgctgggattacaggcgtgagccaccgtgcccagccaaaccccatagaatattgaagaagcccaaatggatacttgtgtcttactgagtggacacactttaaagttacttcaaaacatgaaaggatgacttactccatatcaaacctcctaattaatccaacagtaattttttttattttgttttattttattttattttttgagacagggtctcactctgttgcccaggctggagtgcagtggcacaatcacagctcactgcagcctcaaccttttaggctcaagtgatcctcccaactcagtttcctgagtagctgggactgcaggtgtacgccaccatgcctggctaacttttgtatttttttgtaaagacagagttttgccatgttgccgaggccgctctcgaactcctaagctcaagcaatccacccacctcgtcctgccaaagagctgggattacaggtgtgagccaccacacctggcctgcaattttaatctaaggcaggatttacttatttatttagagacagagtctgtctctgttgcccaggctggagtgcagtggtgtgatcatgactcactgcaagcttaaactcctgggctaaaacaatcttcctacttcagcctcttgagtagctgggactacaggcacacaccaccatgaccagaaaggttttttttttttttgacacggagtcttgctctgtcgccaggctggagtgcagtggcatgatcttggctcgctgcaatctccgcctcccaggttcaagcaattctcctgcctcagcctcctgagtagctgggactacaggtgcgtgccaccacacccagctaacttttgtatttttagtagagatggggtttcaccatgttggccaggatgatcttgatctcttgacctcgtgatcctcccccttaggcctcccaaagtgctgggattacaggcataagccaccacgcccggcgcamctgcttcttcttctttttttttttttttttttgagacgagtccccctctgttgcccaggctggagtgcagtggcacgatcttggctcactgcaagctctgcctcccgggttcacgccattctcctgcctcagcctcctgagtagctgggactacaggcgcctgccaccatgcccagttaattttttttttgtatttttagtagagacagggtttcaccatgttagccgggatggtctcgatctcctgaccttgtgatccgcctgcctcagcctcctgaagtgctgggattacagtcatgagccaccgcgcctggcccacacctgcttcttaaaggaccaagtcctggctgggctcggtggctcatgcctataatcccagcactttgggaggccaaggtgggcagatcccttgagtccaagagttcaagaccagcctgggcatagcgaaatctcatctctacaaaccattaaaaaatgttttggctgggcacagtggctcacatttgtaatcccagcagtttgggaggccgaggcgggtggatcacctgaagtcaggagtttgagaccaacgggccaatatggtgaaaccccatctctactaaaaatccaaaatttagccgggcgtggtggtggacacctgtaatcccagctactcgggaggctgaggaaggagaatcacttgaacctgggaggcggaggttgcagtcagccaagaccgcgccattgcactctagcctgggtgacaagagtgaaactccatctcaaaaaaaaaaaaatgttttaaagggaccaagtccttttaggggagcttctgatcatttgaatctccaataacagaagaggttttcaaatgttaccccggggattcctcattgccygctcccagtattttccaagaaagacctgaggctcctttctgagcttcattcccttgttctcctcccagcccctcagctgtcttttgtaccaattaggtagttattaattgctccctaattgcaaattggctgcctccttactggctcccacccatgctggctggctgaccmaggggtcacatgcatccttcagggaaaggtgttttgtgaatccagtggttcatttgttccacacgtgtgttgagccccttcgttgaygccagatcctttctaggtcctggggaccgtgttgagcgagacaaacccaagtccctggcttctcagagctcacagtctagcaggagacaaacaacaaaaaaattaatcatttccgatcgtcagtgctgtgatggggagtaattacagtacagagtaattttggggagcttcagatacgtgctctgggaagacctttctaaggaggtgaygtgtgagttaagatctgaatggtaatcyggagccagccagagtgaagatgtggttgaagagcacagtcccrggggagaagaaagcaaaggcagaggccaggggagagaaagcagcatggcctctctcaggggcattcatcttatctatgaagccctaagcgattcagaagtcaaacatcaggttggggctagttgtaaggtttagggcaaaacacccctcctactccctgttgttagaagaccggaggcggggtttgcccccacctggccccgctccagaaggaggggttattatacgtctgattgaatcarcttccagsatccttattggtccttggwggtaaytagggcgctctcttccaggatccttattggtccttggtggtaattaggccactctcgcttcaaagtcccaaattcaggcgccccgctggggactagagcgaccgttccccacctcacccaccccaagctcagaggttggagagaactgcctccccaaaggaacccagacccaggcttgagactttgcaaagagacacaagatggggattgccatgtgaagtttccagattttttaaaatgttagaacgatgaattcgaaaagctttaaaacactgcacaggccaaacaacaagtctatgggcaagacctggccagctggcctgggtgcggtggggcttggtgaacgcctagaggtagggacgagggagagaaggagtcaggaaggatgctaactgcatcctggattctgggacacccatgccctggcagagatgtgccctaagaggaacgaactcacggccacaggcacagattgagcacctaactgtgtgcatggctctgtgctaggatgggggacacaaaacacttcataggactgcaccctcgctcagggctgggtgggccgacctcaggaaacctgggttccagccctgacttgctctcctataattgctgtgtgaacttgggttgattcatcatctctctgggattcagcacacagcctttgttgacattagattaactaaatccagtaagggaagattttgaagggcctctgggtgtctggatagggaatctgggctgggtctaataggaagtaggaaccaccccaggttcttgagcaggggagtgacatgttgaagaggaaagtgaagcaggccacctgtgcagagacacacatcatccaggtgtggggtagtgaggacagcaactgaagcgtatgcaaatcagatctgatcacctctagctcaaaaaccttccatggctccctgcagccctcacatgaaagtcctttcctcttactatgggccatgggcagggccagcttcacgtaatgaagggtcggtgtaatgctctgctgtcactatcttgaaatacttcagaatttttgaacaaggagctccgttttctcattttgcaccaggccctgcaaattgtgaaggttcccacaggggcctttcagtctgggcctttcccctctccccatccaaaccccacttctcccttacccttcatacttcactcacgttggtcttccatcagtttctggagattgttcctgcctygggacatttgcgtagtctgttccccttgcctggaacacccccacccccacgtcgagaccaacttagatttttgttcaacaatttcttatcttccagacttgagcataattatctcctgagagataactcctctgrcctcccagaactacctgttcaaaacaaaactttaaaaattatttaagccagccgggcacaatggctcatgcctgtaatcccrgcactttgggaggcccaggtggkcagatcacttgaggtcaggggttcaagaccagcctggccaacatcwtgaaaccccgtctctactaaaaatacaaaaattaaccgggtgtggtggcaggagcctgtaatcccagctacttgggaggctgaggcaggaggattgcttgaacccgggaagcagaggttgcagtgagctgagatcacgccattgcactccagcctgggygacagagtgaaactctgtctcaaaaaaaaaaaaaaaaagaaaagaaaacgatttaagcctgagtgcagtggctcactcctgtaatcccaatactttgggaggcaaggcaggagtattgctgaggccaggaattccagaccagtctgggcaacacagcaagatcccatctgtacaaaaaataagaaaattagccagacatggtggtgtgtgcctgtagtcccagctactttggtggctgaggcaggaggattgcttgcgcccaggagttcaaggcttcagtgagccatgattgcgccactgcactcctacctgtgcaacagagctacaccctgtctcaaaaaaaaaaaaaaaagcaataatggaggcatttcaggcatgtgtcagcagccataggtgttcaggggctttgtgcttatgaaggtttgttcagtaacaaatattcagctggagcgggcatcatggctcacacctgtaatcctagcacttcgggaggctgaggcaggaggattgcttgagcccaggagtttgagaccagctgggcaacaaagtgagacctgatctctacaaaaaataaaatacataaaattagttgggcatagtggcatgcaccggctgaggtgggaggatcgcttgagcccaggaggtcgaggctgcagtgagctgcgatcacgccattgcactccagcctgagagacagagtgagaccctgtctcaaaaaattaaaaacttaattaattaaaaaaaattcaactggggaaatagttctagctctctctttctctctctctctctcttttttttttttttttggaggcagagtttcactctgatacccaatctggagtgcagtggcatgatctcggctcactgcaacctccaccttccaggctcaagggattctcccacctcagcctcccaagtggctgggactataggtgcatgccaccacacccagctcatttttgtattttttgtagagatggggttttgccatgttgcccaggctggtctcgaactcctggactcaagcgatcctcccacctcagccccccaaagtgctgggattacaggcataagccaccacacttagccatattgccatctcttaatgaagtaaataaaaccatttacaccacaagagatagagggaagggataggatttgtccaaaacataataaatccccttggccaaattcatggaccctggcagggtaagatcagagatagcatcatttctgcctatgtggctgacattcattatgtaagtcccatgtaccaggatccccatcccatgcaagctccgtgaatgatcactcccaaccttataaggttggaagtattagctccccattttgtggatgaggaaactgaggcctagagaaattaagtaacttgccaaatgtcacacagtaaagaattgacagagttgggattcgcacctagatctgtccaactccagatctccctgagcccttcactactgcaaaatagctactcaactggcttgctgtatgatttggggcaagttcctcaacctttctgagtctcagattctttttttctttttctttttttgagatggaatttccctcttgtcacccaggctggagggcaatgcacgatctcagttcactgcaacgtccgccttccgggttcaaaccattttcctgcctcagcctcccaagtagctgggattacaggtgcccgccaccacgcctggctaatttttgtatttttagtacagacagggtttcaccatcttggccaggctagtctcgaactcctgacctctggtgatctgcccgcctcagccccccagagtgctgggattacaggcatgagccactgtgcccagcctctttttcttttttttaagacaaggtcttactctgtcacccaggctggaatgcagtgggcaatctctgcttactgcagcctcaacctcctaggctcaagtgatcctcccacttcagcctcccaagtagccgggactacaggcgtgcggcaccaggaccagttaagctgagcctcaaattctttacctataacttgtcccttatttaagctaacacatggtaggtgctgaagttgattctctctctctctctttttttttttttttttttttgagacagggtcttgctctgtcacccaggctagagtgcaatggcatgatctcggttcagtgtagcctcaacctcctgagctcaagcgatcctcctgcctcagcttcccagagtagtgggattayaggcatgcaccactgttgattctttatagatgttaattctctgcttaacacacaygcccctccaactcccaccacacatacagacacagacacacatacacacgcacgcacgcatgcacgcatgcacgccagccccacaacaggaggaatgtaacggaagcaatgytttgtgttctgtaacctgtttccttttcctggacacacaggaaggtcatgttctcatttttcctgcagttagtagagtcacgtgactacataaaggccagtgaaattatacgtgacccctgcgcaaaggcagttaagtgtggatgtgcctcctttgattttctgattccctttccacatgcagaggattcaggaatagattccagggraagcctggggtggaggcaggattsgggggcaaggtcactgcttggaaaagagctccctgggagagccccaacctgtatcagactttgcaggggtgagaaataaactctgattgggttaaaccactgagatatttggtttgttacagcagtcagcattaattacactgaataaaacwgtgtatcagttatcaattgccacaacaatgctacataacaaaccaccccaaaacttagtgccttaaaacagcaaccgtttttttagctcaagatttcatggattggcactttagcctgggctcagctaaagatttttctggtctcagttgggcttactcatgtatctgtggtcagctattggattagctggtgactgactaggacagcttcagctaggataactagtccctgttccagtggtctcttaggcaggatagcccaggcttgttcacataacagctgcgagagttccaagagaataagtggaatctcttaaggcccaatctcttaacacccaggcttygaactggcaatgccacttccgtatattctattggccaaaaatagtcacatgcctgcctgggcatggtggctcacacctgtgtaattccagcactttgggaggctgaggtggacggattacttgaaaccaggagtttgagaccagcctggacaacatggggaaactccatctctataaaaattagtcaggtgtggtggtgagtgcctgtagtcccagctactcrggaggctgaggtgagaggatcacctgagcccagacaggtcaaggctgtagtgtgccatgatcgcaccactgcactccagcttgggtgacagagatcctgtcttaaaaaataaaaaagagctcagcctctagaatcacagccctgggcttaagtcctgactcacttgctattgattttgggcaaatgccttcccctccctgagactgacatttcccttctataaaacaggtgctggggctgggcatggtggctcacacctgtaatcccagcactttgggaggccaagaagggcggatcacctgaggtcaggagttcaagactagcctggacaacatggtgaaatcctgtctctactaaaaatatrtaacttagccaggcgtggtggtgcacaccagtaatcctagctactcactactcgggaggctgaggcaagagaatcgcttgaacccaggaagcggargttgcagtgagctgagattgtgccattgcactccagcctgggtgacaagagtgaaactgtctcaaaaaacaacaacaacaacaacaacaacaacaaaacacaggtgctggaagagaggagycctaacgttgggggctattgtgagaattgactgagggaatgcaccgtggaaacgtgtgctgtaaattacctattttattacacccaaggtgggcttaatagctgtcagggagtgttagtattatctcaaccaaacccccaatttayagaggagaaaacaagagcctcaggcaggtgatgtgacttgccaaggctgcatagctagggagcagtgatgtccccaccgtactcaagtttgtctgtttccagaagctaaggtcttagcctytctacagttagaaagtcctaggtttgagtctcgactctgtccattatagctgtgtgaccttgggcaagtcacttttctctctgggcctcattttttttcttcgtctaaagaaattagcatctgtctcataatgccatggggaatcaatgggaaaatacaaagaaagtgcttagcagagtgccaaggagggacagtgtgcatgctcagcaattgaaggctgccaagttcctgttatcatcaggggcagtgttccatccatcaaaagggctaagaatagtcttagcccggccaggcgcggtgtaatcccagcattttgggagtccgaggcaggtggatcacctcagttcaggagttcaagaccagcctggccaacatgtcaaaaccccgtctctactgaaaatacaaaaattagccaggcgtggtgacggrcccttgtaatcccagctacttgggaggctgaggcaggagaatcacttgaagccgggaggcaggggttgcagtgagccaagattgcgccactgcactctagtctgggtgacagagcgagactctgtcttaaaaaaaaaaaaaaaaaggaatagtcttagccagtgggggtagggtgaggaataagtaagttactgtgggctaagctttarcccagtgcccagcacatattataaacttcataagcagttgctattttaaagggtttttgttttgttttgttttgtttttgtttttgtttttgagacaaggcctcgctctgtcgcccaggctggaatgcagtacttttaaagttctgaaccctgttggaggccaatatgagaccatgggggaccccaggccccaactggcagtggctccaggcactgcctccgtgccatttggctattaytaggcccggcgtcctcatctcaaatccagatggggatcgagaagggcgggtagggcagggcctggctggcggaaggctgggaacacggcttggaggctgggtttgggtttgggccccaccctgcctgccttcccttgcttgcagctggtccagccgccacgtctacacttggctctgaggttgttgcagagcactccctcccaccgtggccgcctcctctgggaagatgcagagcccttctgcagcctcagcacttttctccctgcccyagagaggccaggcctgcgtggaaactctgaattggacactgcgygccttcagaaccggcaaaggagccatccaccccgctgtctacaggtcttcatgcctccagtgaggcttactggatctgctgagggggaagggcctatatacctgggttcaaatcccttcgctaccaccaacatgcagtgtcaacttggacaaatgacttcccctctctgagcctcagtttctttgcccataaaagggacagaacrttagcatctgctttatagggctrtggtgatggttacatgagtgcatggtatgccataggcactcaatatgtgtcagttatttcatgcttaagtgtgccaggmcctgaggaggaaacaaagttttgrgaggttgagaatctgggatgcagaatggctctgctcctgatttgctacactacctgaagcctgtcccttgtcctctctgggactcagttacctatttgaaccataaggtgggtatctaggactctgtgatgccaagattcaggtgctatgttcagaagtagagagaagggtttgctgggatcccacactgacaggttggtaaaatattcattctcggactggactctggagccaaaataccctcagcccctgagctgctccagatactccctactctgccagtccagagctgaacctggaagaatctagacccttcttgttacagttttttgccctaggagggcctgaaggaggcgagtcaaaccccctcattttacagatgggcagactgaggcccaggtctccccagtgctcaggyktcatccaagyggagcttccaaatggtggatggtagaatatggtgattaagaacaaatgttctggccgggcgcagtggctcaygcctgtaatcytagcacttyrgaaggtcaaggcaggmggattkcttgaacccaggagttcragactagcccyggcaacayagggagmcccttgtctctacaaaaaataaaaaaattagccrggcatggtggcaygtgtctgtagtcccactgtgagcctgggaggtcaaggctgcagtgagccatggttgtgccactccactccagcctgggygacagagtgagactctgtctcaaaaacaaaacaaaacaaaaaaamaacaacaaaagaacgagggttctgagcctgtctccttatctgtataatggtggtcctayctcacaggactcaagctgtgaaggtcatagtggtaacaaaattgccacacatgtagtataagcatgatcaggagccagtgtccaacccatcaggtagcaattacatagtgtcccaccatgagcctagacccccactccctgmgcccaggcatcagggactcccagaagtctaaagaggtccaggctggcacatccagaactctctccttcctgttccagccccttgcctctcctttgtctgtgaggctgggtctcctggaattcaytgctgcccagtgggcatctgaggcccyttctcctcctgcagggccagaagtttgcctggcactrttgcccagagaacacagyggctggatgacatcmtggagatgatggccttgccaaactggtttcccarcaggtcctcagtcccactccgagggctgctggccatgacctaggrckcayccagttctgcacataaggaggaaggtcataccccttggatccagccaaccccaacaagaaccatccacctctaggggctccattctccagcctcacctgcctgtctgttgcccaacaaggtcgtcacaatcctacttccgttcctttgctaatgctgttcccgtctccagaatgacagtgctgtcctggggagagaggcttagagagcccaaggcacagctcctccattgtgcatatgagcaagttgaagctccaagagggccaacccttacctagggttggagccaggggtaagacacccatcacccttcttgcctcctgacccaaggcctgggctttctctgaaggacmctgactgggtggagggttagccagggtgacttagggatgcaayrcagacagcttggtaaaatagtcattctcagacttgrgctctggagcaaaatattacccctagcctctgagctgctccagccacttcccattctgcctttcyrgggttgaacctggaagaacctagagtagaccctttctgtgacagccccttgccctaggaaggcttgaagcagaccagtctaatcacctcattttacagggggcaggctgaggcccaggcctctctggygcccacaagatacattcatcctgctcatctggyattcagaatccttggcaaagagaaccacccacatttcctgctccgcccacagcctatcctcctccttttcccagactattggtctttgctcacactgttcctmtgccacaaatgccctttcatgcctttccccctcttctayrtgggatgaattttaaaaattagctgggcgtggtggtgtgtgcctgtagtcctagcctcttgggaggctgagatggaaggattgcttgagccaggagtttgaggccatggtaagctgtgatcatgcgactgcactccagcctgtgggacacagcaagaccctgtctccaaaaaaaataaaataaaataaaaacaagtgtgacacacagtttatacaccacttccctaagaagtcttccagagcttcccccatcctagtggcagcaaagtggagggaaggggcttcagcatcaggcagaattccactttagtctgaatgcctttactaggccaaggtgccttcacctccctgagcttcagcttcctctgtcgaatcagagtgtacctatcttgcacagtggtcacctggcagtagtgggagccccacgtctgacatgcaacaggtgttcagcaaatgctggggccctcgtcacgggatgtttactctttcctcggctgtagctgtaaacttccctagcactgtaccggactgccctttgatctctagatcacccccactcccttgcagagaggaagacagaggcaggcgggtatgtctggaggtggacccaggcactaagggcttgaaggggcaggacccacacatcccttccatagggccaagggctagtgagcgcatgtgccagacagtaaatccaagcatggaggaactcacctgtaccattcctcctagcctacagtagggcagggagaaaggagggcattagcacaaagcaggccattcattggagctggtgaccgccattcaggcaggccctgaaaatcagaggtggcctaggtgtgccctgcatgaaggggaggtcccaagggacgcgtgaattttgaagtattcagaattggtcttagagggcgcctgaccctcgttctggataataacatggcatctcgcccaggtagagaaagcctaggaccttgaaatatgtcctccgaagtgagctctgtttgcctctcctgctgtgtagcattgacaagtcgctttcttctgtgccttgattttcttttttctttttttgagacagaatcttgctctgtcgcttaggctggagtgcagtggcacaatctcggctcactgcaacctctgcctccaggttcaagtgattctactgcctcagcctcccaagtagctgggattacaggtgcatgccacttgcccgactaatttttgtatttttagtagagacggggtttttgccgtgttggccaggctggtctcgaactcctgaccttgggtgatccacctgccttggcatcccaaagtgctgggattacaggcatgagccaccgcacctggcccgtgccttggttttctgatgtgtaaaatgggaccacttctcaggggtgtggggatgaaatgaaatgacacatggaaaagactctcagtgtggagactgggcctttccttagatgggggctggggggtgtcacagaggacctgaaccggggctcttctgggttaacaggctgaaaccacctccccagaatcccacattatagtggttaaaagcagggtctggactcagaaggtgctgggtatgaatcacagctttactacttatcagctgttgtcctcatctgtaaaatggggcaatagtcatggtctcatgtgcttgttatgggcattatatgcctggtacatggcaagtacaaaataaatgatttgttattgtttttatttgacaggactccagaccccatcctcccaactccacccactttagtctccatggagacccaagggcggctttagggcctctggcactgaagatggaatagctttgccttgtggatctgacctcctgggtaccctggctgattccttgtttggtcttggacatgtcagctctctctgggcctcaatttcccccttttgctgaatgacagcctggactccatattccctatttaggactccagcgctcctaaaggcagactctcagggcttggaaggtagaagcatgctacaagaaggcaatgtctgttcaaaggtgtgtgggctgggggaggcgtgctgtgtgattgattctgctccacctgagatggtcccggcactccaacacagggtcaaggtgctgccagtcactcagtccctgctctgaggtggctcagaccaggtgtcccgaaagcagcctagggacggcggccaagcttaaacactgacgcgagaaaggggtggagtcgagggaggggacgtggtctcaggaacaaagaggagggcggagaggggctgtcctgaaggctctgagactcctacgaccccaggaaacttacctcggctcggggcgccccccccgacttggcgcagagcctgcgtccccctgccgatgcccacccgactcgctaaagccaccgaggcagacgaccccaagactcccaatttccgacctccctggcccgcgaggggcggggccttccyctcggggcgtggccgtcaaattgaattttcccaatggggcacgagagtgggaggtacccaatcgagggttggctggcgcgtcggggcagggcggggccagccgggctgctggcgcggctggacgggcagctctccgcagaatccaggggacggttgctgagcgggcctgggacagcgggtcgcggcacctccsgcctgcgcgtgtctaatccgtctgtcgggtcccgaaagagctaagccgagcctgcgccggacgggtgggctggactgagaggtgggtgtgcggacctcgggggggatcctggtgctgccccaacgtgtccgggggtggaacccggatgtctagacaggagttstggaacgtccagacctgggagcccccacccatacgagargtctaagccatgggataaagttatgagactgttgggggaagacgcccccggattcctaagagactccacgccccacaggggcgctagtctgtggcggcagaaaccctggggaagctgccacagaatcctgaggcccctcacaatgtccggcgaccccagactgtgtgacagggagattggagaagagcagcggcagggatcttcttataatcccatgggtgtcctagattaggcattagggtcagctgccccatagaagaacagacatggggggaatcagaatgtccgcagaacctaaggctggtgaccactggacagtcttgaagaggtttaacccagacagagtaactaggtaagaggcaaggatcctaacaggcagagattgggaggttgacacctctgagcctaccaggatgggagggggaacaagcagtgacttgaacaggctgggacccacacaccccaactgtgtggagcggtaaccctcaccccccacccatgcaccgtatggggtgacttcccaagtgactgttctgaagagagggaagggatgattgaaagatgaatcaacaggaggtggggggcaggcctggggccacacattagtcagtcaccatacattaactaagcatccacagtgtgccagaccagggcccctcaaattccagacagacattagttggggctacaggaggaaggagagatctgcgctgggaggctgggccaggatttaggggtccattttgatgggcagcactggggcaagatggggctcttgcctctgtcactgagagtgttccaggcccttgagggcactttggaagggagcttcggaagccggagatgacgaagattttgattacatccttctctgccctctaagtctttggcttcctccttgctcagtgacaaatccttggccctctccaatcttctcagtttgcctgaaatccaggggttgggcaggtcagcttctgaaagcccttccaggtggggaattgaattctgtatgaattggcaggaggtgctgggtgcctggacacctggcttcaggaggtctggacagcagagctggctccaagaatcggaagacacagtgtaccttcctatacctgggggaatgacagtggtggtggcagcaagaactacgggttcagcccacagccagaagctgagcctgcggagtgggtgggggctgggtaggccctgtggatgggtgggtggggcaggaaactggagactggagtgcaccccctggtggtaagcacagcttgggtgggtcttgccaggccctggcttctcaatccaggtccctgccctccctgttttgaggtttagacaggatgagagtccatcccaggccacacagcagactggcrgccaagctggcagggctggaaccagagaccccctaccctgggtttggtgagttttccagcaaaccaccctagggcagagggcagcttccagccaggagccacattataggatgggacagtaatggacgctcctaggttagagagggaaagtaaggcacagagcctaagtgcctgtggtttctggaagccccagcatgcctgattcatgtctgtcccctgcagaattctctgagctggtgacaggtgccacaggcactggggatctcaccagaaaggaaccgacggagctagrggccagcgagatggcggacgaggccttagctgggctggatgagggagcccttcggaagctggtaagtggccccatcacccactgtggggacagraaagccaagccagagaggcagggtcaatccagggtacctctcagctgacaggaagaagtgatgggggaaaggtcaggaggagggggacatgggaacaggggtaggccagttccatgtggctgatgcagaggcccttgtggcatgtgcctgtccatgcctggtactgaagcctagtccctcccaaccctccacagccaccacctgtttaaacagtaactgctgtagactcgcccgtatgcagccacaggtgtggggaggctggatatgcctctccagagcaatagctcgggcaatgcccacccctggaagctggcccagtgataatggtagcagcaatgattaataatgccaaggcctggcagggggcaggctgggtactgggtataccatgtcacagaataatcacagcagctctgaaagcctgggcactgcgactcaagagagttaaaatcacctgctcaaggacacccatctaagaaggagctgtgccaaaatcccaaccccatagtgggccacgggggaccagagtcctgggaaagtcaaggctggacgaggccataagagagagacaggttttgtgggcccttatggattctgtggyttctcatctcatttttctactcttgagtctcagttcctctacctgtaaaatgaagggagggagggagatgtgtttgcacacaagctctaggtcctagagttggcatggggacagaatgaggcatggacccagatctcagktggaggaaagatgagcccactcyatcccctttcttgttcctcttcctgagagccctgtctacctccatgcacagaggccgtagggcaacccagtggggcagggctccttccccaaccccaaaggccaggcagcctgacctggaggaggggccagaggagctccatctcctcagtccctgacccttgtccatgggggtaaattaaagatttactttacctagaagacaagtgacccaccccactctcataccttcccccgcaggcagaggctggaaccaaccagcgtagcccagccactgggcagtgcccagctgctgccatgacctccccaaggcactctgcctgtatgttctcggaccagcgcattagactctctgggtgtctgcctctccactatcaccgcaggatgtgtgcagcctggaggggatgaggttaggtttccaaaggtgcccgccagtcagttcgaccttccctcaggaagtccaagtcccagtgggggtcgtagaggcagcacagtccaaaaagagggaatgccaggcctggttcccgcacatcctcatctcaaggtatccacaggcaggctcagggttcttcagccgccacctccctctcttaagcgaggctcgggcggcgctggaaaagagttttggagagaagctggagcagtggttgaatctctgggaaaggacagatgagaacctgccccggtctcgggatcggtgcctctcgaagtctttccgaccccgggagcggctcctccagcacccggcgcccgccattactgcgccccgcgcgccggcccggcccccgctggcctcgtggcaagaacgggggcgtcccgagccgggctcctccccgcggggccgggccatataaggaaaagctaggcccgctccgcccgccmtgcgccccagcgtctggccgatttggggacgcgggcagtcgcttccggccccggctcccgcacattcttgaggattgggccggggatgggaggaatggggacgcctggggacttgcacgccgcgtgcccctccaccacccgccgggacgccctctgcctcggtcccgagttcgagttcgacctccgccactcagctgggtgtcctggggaccttggtttcttccctttagatccggacactgaagcaggcggtagcgggtgtcttcctacctggctaccccttcggcgcctagcgcgaggcagggtgggcgaggcgagggcggcgccctgcgagggagggcggtcgcagaacctgcgggccttcagcgccccctggcgaggcttccctccaccgccggcgggacccccatgggcaaccgggggagctgggactgaaagcctggagagccccctccgttgtgctgttggggagactgaggcccagtgagacctcagggcctgccaggcgttcccaacagcgagggcagagagtacacggagagccggctccccagggggaggaagcaccctctttcctcccgggagaatttcactgggcagtttcggaaaccgccccatccccttccccttccccctcggtagacaatggcgctttgtacttccttccctccctcccacagytccctccttacacagcggtggggcctgggcgggtggaactcgggacacacagaggagacactgtggtccaacctttgcctccaggcccaaagggaagggtcgtgccagagggtgaccagtggaatgaggttgtcagtctccagccttgcccacccactttgggggatcagagggaggctcccattttccagatggggacactgaagctccgggggttgtgctgtagaggtggccaagttcctacatcaggcttttgtcagagacaagsaccccatctccgagcccagagcactgagaatggggacctaggagacaaaaggctagcccttgcccctctgggcctctttaccctctgtacagaaggggctggaccctctgtcccctccagcccccagcctccaaatgtaccacagaaggctctaggcctgagacacagccagcaccgggggctggggagtgagcctcattccccccgcctctgctataaggcctccttaggcctcagagcatctctagtccaggctagaggggtctccaacacagtgccaggatccctgaggtccccaccatgacacacagaccccagtagcagagctatcttcagcctagggcaggccctggagtcagagagacctgggttcaaatcctggctcaggtcatttgaccatgagcaaatcacatgtcctccctggacttcaatctcctcatctgtcaaatgggaataacagtagtatctagggtttttgtgggcttaggacaagtagggggctcagcacagggtttgactcacaggctctccataaatgttactgatgcctcggggtatcctgcccttcccatttgcccccttgtctctctccctcctcctgactggctagaaccaagtatgggggtgatgcttattgcaactgcagctatgtacaggagaggccaagtcactgttcccaaccccacccactggcaaatgaaaaaaccaagacacagagagtttaagggatatgctcttgatcacccagccaggattggactagggctggaaccaactaggggctctggcctgagtttcagggggtcttctcataattcctcaggaatgtggagcctggagggctcttcccccaagactctccctgctctcttcagactaggacaagctggctcatggctgagttgggccagcccacactccctgctgaaaactatctccatcccatccccacccttgccacctggccttcccgctaagcagaaaggaatgacgggggggcgctaaaaagggagatgatagagggttctttggccctacccctgaatgatttggggggtggggacagaggaaatcaccccgcctttactggctcccgtctggttatcagacccacactggaggcttatctctgccactatcttccaggggaacmctgggccagtcctctctcccttgagccacggaggatctgtatgtagcaggtgrctctacatggtggaggtgtgggggaggcaacaggattggctgactcactccagagaaggtgttctttcctgaacctggttagaccagtcacccccaatttcccgggaactgaggggttgagaaccggtagaagcagctgtcacccagggatgccctctataaggccctggggtggcccctagtgccagccaccttatatgtctgggggattggtcctcccactctgcaccctggcttcttccatggtggctaggtccaggccagtgcagtggggacaatagccctcagccaggcaggactcctgagcacctgtcctcagtttccccrtctgtggatgaagcagtcaacccccagctgggctgtggtgtttggtgactagaccagggagcctcccttgctcagagggtggacttcatctgtcacctttccctctagggaccctgttagtgacccacagggtggcctccctcctcctcctacaatagctccctgacttttggggatctgggctctgagaggcaggaatcgagttgtagaaaggagtgcctggcttggcacctggcacaagtgggcagtttctggctgtccactcacagttgtgtgctctgtgaaccacaatgcaaagtggactacccaagatccctgaaacagtgggctgggtctacccccgggaccctgcgtgggcaggcaggcacgtgaagagcttgggacacagggagtggacacaggccacacattgtgccctaggcagagccgtgggcagctggtgccagccctccgcccctggcagccaaaatgacctgccyctcgcacccactgcagstggaggtcacagcagatctggcagagcggcggcgcatccgctcagccatccgggaactgcagcggcaggagctggagcgcgaggaggaggccctggcatccaagcgtttccgtgccgagcggcaggacaacaaggagaactggctgcagtgagtagcggggggtggaacatgcgggtgagaaggtgagtgtgagccctggctcagctcatgtgtgcaggcaggcgtgagcacaagtktatctgtggattgcatgtgctaatggcagtacgtccacacacgcttctggaaaaacagagatgtttgtgggcatggagcatgtactgattgtggcgtcgcggccgtgctgatgtagccagcacgtctgagtgtgtggtattagtgcccacgtccatgggcatatgtgtatcagtgtgcagttagagggtgtgcacagccacatgcccttctgccaaggttctgggtactctgttctggctcctacccttagcccacatcctccacgacctggccatggcagtggtggttacagtcatgatgtctctgcagctctcagcagcgggaagctgagcagcgggctgccctggcacggctggcagggcagctggagtccatgaacgatgtggaggaattgactgcactggtgaggcccaggctggggcaggggatgggggcagggcaggtgaagacctggactccacagcccaacacccgcgacctgtctcttacccacagttgcgaagcgctggtgagtatgaggagcgcaagctgatccgagctgccatccgccgtgtacgggctcaggagattgagggtatgtggcctgtcccggccccacccctgccctgctgtctgctgtccacagcacctccctgtcactcacctgccacttgctccttcccttccagctgccaccttggctgggaggttgtacagcgggcgtcccaacagtggctcaagagaggacagcaaggggctagcggcacacaggctggaacagtgtgaggtaaggagggtgggagagtggcccagtgtcctgtgcccatggataccggtagcacagagtgcctgagtgtctttgctaggctggtatttcactgtaaggggcccacccctgccatccagcctctatttagcagtcagagggatctcccagaaatgcaaatccggccctggcacctcccctgcttcaacccgtcccagggctgcccctcaccctccacacagcccacatctttaccttggcttatggggcctgcatgtcagaccccagctggctcacagttcactctattttccagagtgtgggtgagaggtcaggccatgcaggttccccaagtggccagcagaggccgctgggtccacggtcctggcaggaccccactcccactccagatgaaccaggctgaggccaggagtcaggaacctccactccagggatctattaaggctcccgtccccaataggtctcctgccatacccacccactgacatcaggacctggtcctctctgaacccctttggctaggtagtgccaagagattgggaagtggggatcagagactgcccttagcatgccagtgccagtgcttgcgcaggtgtgcctacaggaagccatgccccaccactctgctttgcatgccctgccctgggcacttgccagcctggccctcagtggtgggggtggcgttcaaagcctagggagccttggttgcatcctgtgggtcccttacaggtgccagagcgagaggaacaggaacagcaggcagaggtttcaaagccaacccccacccctgaaggcaccagccaggatgtgaccacagtgacactcctgctgcgagccccacctgggagcacatccagctcacctgcctcacccagcagttcacccacccctgcctctcctgagcctccattggagcctgccgaggcccagtgccttacagctgaggttccaggcagcccagagccaccccccagcccacccaagaccaccagccctgagcctcaggagtctccaacgctccccagcactgagggccagktggtcaacaaggtgagtctggatgaggggcagggatgccaggcaagtgagcaggtctgggagtcaggccttgctcaggccctgttcttctcccttgcagcttctgtctggccccaaagagacccctgctgcccagagccccaccaraggcccctctgacaccaagagagcaggtgagggtcccagcaggggtagtcacaggcatctttcttcccctccccctgcctccctttccctgcctagaaaatgggctcttgtgcctggcagctctagcttcctcaggtccatgcagtccctsatactgcaccccacccctgaagtgtccccgcccccagctaggccagcctccccctccacccccatggctagaggcctcccctgcagccttgaaaggcaacgggcctcaggcacattcttctccccaataagggagtccacccatctcccagctggagctgtgggcagcactggccaggagggctgtcccccctccccatctgcagaaaggatctgggcacccttcctccagcctaagcctcgcctggcccccaggagtgtccaagtcatcctagggtcagtgtggcaggagaaggaggtgcctgtaggagagatgcagccgagtggggatgccggagtgtgggagatccaggaggggatggagaggtggggtgggggttgagtacaggaaagggtgggaagctagggaggtgtagaggagaggattatgaaaggtggacacccactatcccctgtcttttctctttccccacatggccatcaccccctccccaacctgccagacgtggctggaccccgaccctgccaacgctccctgtcggtgctcagcccccgccaaccagcccagaaccgaggtactacctattctcaccctgcctaggatctgtgcagaccctgtcscacccagttgctgacagccctcctgttccttctagagtccaccccccttgccagcggaccttcctcattccagcgggctggctctgtgcgggatcgtgtccacaagttcacatctgattctcctatggctgctaggctccaggatggcacaccccaggctgccctaagtcccctgacccccgcaaggctcctgggcccctccctcaccagcaccacccctgcctcctcctccagcggctcctcctctcggggccccagtgatacctcctcccggttcagcaaggagcaacgaggagtagcccagcccctggcccagcttcgaagctgcccccaggaggagggccccagggggcggggcttggctgctaggccccttgaaaacagagcaggggggcctgtggcacgttcagaggagcctggtgccccgctgcccgtggccgtcggcactgccgagccaggggrcagtatgaagaccacattcaccatcgagatcaaggacggccgtggccaggcctccacaggccgggtgctgctgcccacaggcaaccagagggcaggtaggcgccccccactgcctccccaatggggatgagtgcctgcaaccgcacttctgcatgcaggacaggtgctgcggccaggactcagggtgtctccaaagggtgtgctgggagcgagggcattatcaaccttgtctggcactgccctcactccacctgatcctcctgacagccacctttctccccactcagaactgacactggggctgcgggygcccccgaccctactcagyaccagtagtgggggcaagagcaccatcacccgtgtcaacagccctgggaccctggctcggctgggcagtgtcactcatgtcaccagcttcagccatgccccccccagtagccgaggaggctgcagcatcaaggtgagcccctcctcaccccaccagcctcaccatccgtcagcctcacatacactgcttcagggtgtagggctagcagggttcctctgctcctcccctactgcacacacagagaaaccgaggcccagagagggaaggtggctgctcacagaccacagccagtcggtggcagagctaaggccagaccctagcatatcagtccctaagtgtgtcggaagcttactctgtactggcgttaagcttcctggatgctgatctctgatccttagttcgaaattggttggttcattcctggtgaacagatggggaaactgaggctcagagagggtggtaagggcttgctcccctcttcctgtggcagccccagtgcccctgcgcccacccacactggacatcagccccgaggtatagagcagctcatctgctcatccaagatcagcctggcccattaggagattggagattagtgattagcatctgcgtcaacctccctgtgggggttgggcagaagctctgaggggggacagacaggcagaggggcgccaatcaggtgaggcagcagcctagcaggtgccttgggaactgaatacgcagcacccttccattattcattcccaagcccaggatccactagccgggagctcagccgggaaagggatccccaagcgggccacccggctgcccaggtaatgccctctgtgctaaaccagggactgaatgggactttggctgaggtgagatggctagaccagctttgggccttctcaggggagacagggagagagtgagggaaataaagcacccttcctttccaaaaaagcaggatccagctgccctctgacaagggattgtgtggggtggggtggggggacccgctgaggcccttgaggtggatgggaggtgccacagtgagacctgggtctgacaccaccaacttgcctcagtttacccatctggaaccaaaggggacaggtgatgtacccataatgtgcttgctcaaagtctgtggttggacgtgagcaccatgggcaggccagagggcatttatgtaagaccaagacactttttatagcagatcactcaaagtcctgcctccctgtgcctccatttcccccatctgttccagctgtctaaaacagctggagttagggtaaagggtaaaggagtacaggctgtggagtccagcagactgattctcacagctaatgtacatggtggctaggccaggtccattccctgttccctgcctcagtttccccacctgtgaggcatggggccccgatctcagtgatcttcagaacccatgcagtcttactgtgctgcaggcctatgatttctgtagggctatagccaggcctggcgatccgcctgcttgggcaggccccccctcccccactgccccttccacggaggagcccagaataggtttctatttgggctgcagctccagctggctggtggcgggctgggaggcaggggcggggcaggcccgctgcccttgcctttgccctcggaccagctgcaaagactcagacactcagccagagacagcagcccctgccactgccccaccattaccccccatagagtccccaccagcaccatgccgggggtaccagggcctgggcctgagctggccgcagcccttgaggagcagttgggccgggcactggaggagctgcgggcggtggctgaagcaggccgggtggcagtgacccaggcagccgaggtagctgtagccaccgtggagccggtggcccgggcagctgaagagctgcgggcagagagagcagcactgagccggcggctggatgcactgagcaggcaggtggaggtgctgagcctacggctgggggtcccacttgtgtccggccttgagcctgagctggagcccagcgagctgctcctggctgccgccgaccccgaggccctctttcaggctgccgaggatgccgggacccccgtggcccacccacctgccttcagcacccgccgccgctcctccaccggcaccacccgcagcactagtctcgtaagtgcttctgggttggtgggaggggtagttttgagccaggctctgcctcctcttgactttaggtatgtcaccaccttctctgagcctcagtttatctatcttgacaggggactggggcactagtgctctaagactagggcaagagggtgccaggctccagccctgaggcatgtgtggcagctgccttggcagcccctggcatgacccaggccccagcccccagctccctgccgccctgcaccctggccagaccaagcctccctgaaacagctgccacctcagctctccttacccttatagcagacggagaggccctgccaggagaggaagggccataatagttggcttggggccttgtcttcaaggggctagggagatgccctgggagggctgcagggctagagactccttagaggatggtttccagcaggggcgaggcagggggaggtggtacagaggagagcttcatagaggtcttggctcagggcagccccagtcagacacctggtcaggagcctacaggccccgggccagccctcttggcaaggtagcaggcagatggggggcaacatgtgctgcctgggcactggcccaggaggacctaggcctcgggaactggcagcacagagcagagcctgcctgggagggggctgggaacaaagcagcaaaatgaactaaggttcaggagttaggctgccttcagctcagatcccaggctgcatcacacttagagagagactgtgggcaagtcagttagctgccctgagcctcagtttccccttctggttttttttttttttttccggtcttgttttctttgcaacagggtcttactctcttgcccagactggagtgcagctgcgtgatcatagctctctgcagcctctaactcctgggctcaagtaatcctcctacctcagctttctgagtaggtgggactacaggtgcacaccaccatgcctagctaattttttatttttgtttttgtagagatgcggtctcgctatgttacccaggttggtctcaaactgctggcaacaagtgatccctcccacctcggcctcccaaactgttgacattacaggcatgagccactgcgcccggccttcccttctgttaaatagggacagtaaagtccctagtgtttatacaacacttactatggactggaaatcatcattattatcactatccattgtattaatacaattcggggtacgtgggaagccctacaacaaaactgtcagtgcctcttccctgactgacgctgacatggccatctttgggcaggcaggckggcaggctagtggttatttccaaggcgtgccagcaaccctaggatctgcttccctayccattggagacatgatgagtttcacccatacccctgcttaaagtccatgccctctccccaccctgcagatggaascagagccagcagagcctctcgctgcagcagtggaagnggccaatggggctgagcagacccgagtgaacaaagcaccagaagggcggagccctctgagcgctgaggagctgatgactattgaggatgaaggagtcttggacaagatggtatagccagatccggtgggctgggggttggcagaggccagcaggcaccaggtaggcaatgatgggctctatatgcagctggatcagagcacggactttgaagarcggaagctcatccgggctgcacttcgtgagctccgacaaaggaagagaggtagagagccagttgccctaccctagatccagctgccccattccccagctgctcccctcatactctgrggtccatttgtggacaccccagcttaataactgccctacccagcttctccttctctagacccagcagttcccttggctattccctgctggatccagctgctccttccctagctccttctctcccgctggtgaccccagttattctccccaaccagcttctcttctccttcctagacccagatactccctcccgcagctactctctccttggatccagttgcctctcaaagtactgtcaacgactccttccctgaatccagatactccttctccctgctgctcctctctccctgaagtccattgatggccatcttagcctctgccccatccagcttcccttttcctggacacaactacttcctcccccagayagttcttccctggacacatctattcattcccttagattctgggttcaattgcttctcctctcaaacactctcaattactcctctgaatctagctgcttctgccagggcccactgatggccaccccagtctctatctctacccacctacttctattttaagcccagttaacccccttcactagcttctctcccagctactcttcccctggatcagattgcttctcagatcccatcaattgctcccttcctggatctaaatattcctgcctccagctgctcttctcctccaaccaaagacctgctgatggcccacccagctacttcctcactcagcttctccttccttggactcagctaccccctcactagatctagatacccctcctgacttagctactcatgcctatagaaaccctttttggatccatacccctttgagtttagctaytccgtattctctagtttctgcctgagtccatcaamcccttcccacactccattccctgtcaagttatggctgtcccctcaccccagctgctcctagagaggcccttgttacctgtgtcattcatgtttctaacaagccaccctccaccccgtcttgtgtgccccatgcacctgtgcatctgtgctgtgtgggtgttggtggcccttttgcgcatgcatggggcatcccctgcccagaccagcgggacaaggagcgggaacggcggctgcaggaggcacggggccggccaggggaggggygcggcaacacagccactgagaccaccacgaggcacagccagcgggcagctgatggctctgctgtcagcactgttaccaagactgagcggctcgtccactccagtaaggggccaaatggggccggcccagggctcagggtgggaacacatcctcccccagccccctgtgcmtttcacatccttctcatcccctgcccctgcagatgatggcacacggacggcccgcaccaccacagtggagtcgagtttcgtgaggcgctcggagagtaaggccacctggtgtcgccctgtgcctgcctgcctgtccgcccacctcctccggctcttccttgagctctctctccrtgtcttcaactgtgccgtcactttctcttctctgcctgyggctatcaccacccctccatacagcctcccatcccatctcctgatgtccagcccaggccctcacctggtgccccttccccttttttgcagatggcagtggcagcaccatgatgcaaaccaagaccttctcctcttcctcctcatccaagaagatgggcaggtgagcaccagcacccaatccctgaccatagaggagtcagtgccacaggggacctaactgcaaacccgttttacagaggggtgggctgggcacagtggctcttgcctgtaatcccagcactttgggaggccgaggcgggcggatcacttgaggtcaggagttcaagaccagcctggccaacatggtaaaacctcatctctactaaaaatacaaaaattagccgggcgtggtggcaggcacctgtaatcccaactactggggaggccgaggcacaagaatcacttgaacctgggaggcggaggttgcagtgaactgagatcactccactgcactccagtctgggcaacagagcgagactcagtctcaaaaataaatagataaataaataaataaataaataaataaataaataaaacagaggggtagactgggatgctgggaggtaataggtctatagccagggaggggcaaagtgagagttaaggatcctgctctccttgggatctcattttattctcaaccacaccacaggagaggtggatgctcagggaggccagtgagttgcttaggggctcacatctctgagtggctgcaatagcattgaacacttacagaggcctacctaccacactgagctgcctggtggcactgccacttcccagtatctgcaaaccatgtcccaggtcacacagcacctttataccttagccccatgagaaaggagggtacccccatgtaacagaggctgttggggctggcagaaagcaggaacaggatcagaatccaggatgagaaccaaaggggtccagagactctgaatcagagagaccttgttcaagttctagttccgcccatcacgtcctctgaaatsttaggcaagttactgccagaggtctcagtttcctcacctttagtggaattggtaaggcccctccctgctcttgtgaagtttaaaatggcacacaggaaaggatcaacagagatgaattattattattactattattatgctagtcatcatttttattatcggatagtgcccagaagctgaactcccctgtaacttgagggtacaatgaggcttctcagagaactactcgtgggtgggggagggggaggcggaaacctgttgaaaaccttgctgtcatttgagactcagtgtactcctctaaaatgcgtgtgatgaggacgcctccctccctggcaggcgtttgtggcagtggagatactagtgtgctacaagacccccccctcctcctcgcgagtggtggtccaggctggggagcagccctgctctccctgcctaacatgcgcctccccaacccctagcatcttcgaccgcgaggaccaggccagcccacgggccggcagcctggcggcgctcgagaaacggcaggccgagaagaagaaagagctgatgaaggcgcagagtctgcccaagacctcagcctcccaggcgcgcaaggccatgattgagaagctggagaaggagggcgcggccgggtgagctgcagaagtgggctgggcagtggggggcggggcktgataggcagtggggggcggggcttgatagttggcccggcagaggcgggaagaycgcgcggctagatctgtggtgcaaaggcccgaaggtcatggaaggcggggcctgggatccactgggtgggcccaccgaggcatgccccttatagtcgtgtgacctggtcctgacaccgcccctacagcagccctggcggaccccgcgcagccgtgcagcgatccaccagcttcggggtccccaacgccaacagcatcaagcagatgctgctggactggtgtcgagccaagactcgcggctacgaggtgagccccgggaggccagggggcctggaggcctccccagaccccagctcaacacctccttcttagcagagctcctattacccagtacacttcctgccactgtgtggcctcacagggaacatggaaaggctcttggggtgaggaaactgaggctcaaagaggacacaaggcaagccctagattccagaatcagtgatgaagtaacagggcctcttgggtggtgggcagggttcaaggccggatcccactcttggagtcccctccttgttgctctgtakgaggccctgagtcaatttctctaaatgagggaaggagtgatgaggcatgaccatagccttagctgggtggcgctgggcctctcagtagctctgtcccttgaaattgcaaatatgggagttgacaggctgacttggaggaggctcatgttccaactattcactcattgtgcaagctacggggcctctttgtgcccagtgccctaggtctggaataacagaatgctgaggggtagacagcaggggggagttgcccccaggttcctgaccagtcctcctacggcttatagcacgtcgacatccagaacttctcctccagctggagtgatgggatggccttctgtgccctggtgcacaacttcttccctgaggccttcgactatgggcagcttagccctcagaaccgacgccagaacttcgaggtggccttctcatctgcggagtaagtgtgggccctggccctgctaatgttgctgcacatctggggctggacatcgggaccaggcccagttgccctgagaacccctggagcgggccagccacattgtcagtcagcggctgagacccccttccccagagagtccccgtccttctccatccccacccccccgctgctgagcgtgccaggtgcccgccggaacgaaggagccgcaggccggcctaccagcccgggccaaagcccaccaggtggccctgtccatatcccctccatcctccctctgcccccttctccctctctctccctttctctgtcctgctctcctcccactatcaccagagcttcctgctcccacgggatcccggctggagattccaaaaggaggctcctggcccgggcaccgtgcccgcccagcctatatagtgctgccagaggcttatataggacctcagcaagccctccactttggaatcgttgccccgtctgctcacctcaccctcagcacccttctccatctgtcttcccttctttccccttctctttctggtttccctcaaatttcttcctcctcctccttctcctcttcctcctccccccacctcctctcacgcctccctcaccccctctccccggggcacagccctcctctccaaccttggtgccaacgccatcgcccccaccccgcgttcccgcttgcccctagagttctctgcacctgtgactggtttggcccccacccttgtctgcattgcacaccattagtgatgggtagtgagcggcacgtccacagtggggaggaggcatgcggggggctggcagactgcagcactggaatcgtaattgaactcatgtctctgtgtgtgtgtgtgtatgtgtgtgtgtctctgtttcctcccctctctcttctctgcctcttccctctcttccccacccggggccctggcctcctgcccccgtmccccaccccttcccggccccctaccctccccaggacccatgcggactgcccgcagctcctggatacagaggacatggtgcggcttcgagagcctgactggaagtgcgtgtacacgtacatccaggaattctaccgctgtctggtccagaaggggctggtaaaaaccaaaaagtcctaacccctgctcggggccccacggtgagaaacgccgcctctcccacctgccccgtttcaccagaatctgctcagcaaggccagagagggtccagggakgcgggtgggggaagtaaggggggcatttagtcaagccagaggagccagacatagccctgtcttctggcagttcagggcccagcaggtgagaccattctaaatgggcagtgatgacccaggtgggcagcactgtgatgggggaagcccaggggagatgcctgacccaggctgcaggtctgggccccccatctgaaaaaagtgcaaactaagctgggatctgaacaagttcaggctaaaggagggagagggagttccaggcagaggaatcagcctaggcttagcagggcaagagagctggagagcacagcacatcaggaagggaagaaacttgagtctggatatgagggaggagggggccacagttagaagtttgaccttctggccgagcacggtggctcatgcctgtaatcccagcactttgggaggccaaggtgggcagatcacgaggtcatgagttcgagaccagcctgaccaacatggtgaaaccccatctctactaaaaatacaaaaattagccaggcgtgtggcgcacacctgtaatcctagcgactcgggaggctgaggtaggagaatcacttgaacccaggaggcgaaggttgcaatgagctgaaatcatgccactgcactccagcctgggtgacagagcgagactccatctcaaaaaaaaaaaaaaaaaaaaaaaagtttgaccttcctcctgaggacaacaggagttataaagggtttccaaacagagaagggatggatatagcattctaggaccttcctyggatgaggcttggatgagagatgggatggactagatgactggaatagcttaagagctagagagacaggcttcccaatagatctggtttggagagggagagggaaggtcaagaagtctgccaggctcctgtgtgggcactggggagttggtggtgccatactccaaagtggggagctcaggagcaggaccagttcaacaggaagatgtttctggctggggactctggatcctaagccagctgtggcatttcctctctggtcacctcacctcagtaccaaagtaaagaattcagatcctaaactaactaccccattacagacaaggagctcagagagagacgtgggctaagactgtcctgggggtgggagggagagggaagatggttaggtcagagctggggccagaaactgagactccaaactccccacttagtggctgttttccttgccccatcactgtgttcccgcccattttgtagagaggattgaaaatagaggcccagaaggagcaaggggattggctgaaggaatgtgagtcagtgacaggtaggggcacactcagatgcccctcagggcctggagccattgtggggggcagtccacatgtgcacacacacactcagagaaggagcacagatgagtggcggatgggcttggtgctatctccagatcatatatggacttaggagctgctgcccagcaagccagcttggagggagaggggcccagcccagccctgatccagttggaaagtgtgactcagccgtgctgttgctcaagttgcctggtgtttggcctgtcactggggcagcctgagccctgagccctgagccccagtgtaaacaatggctttataaggtctccagggaagggagtggggcgggagggagcaccaggttggagagggcggtcgggatccccaggacgatagccacagctggaagaagcttcagagagaggctgcctttgcatcatggtacagctcgggaaacaagcccagtctgggatagggatgaccctaggggcacgtggcacatcrgcagcagacccagaaccctctcactcatcctaaattcttgtaaggtctcaaatgagatagagaataactgtcctgttctaaagagggggaaacagtcatagaaaagggccttatctagcacccacaactggttagggatacagtctggactaaaacagaggtgttcggtgttctgcctcccaggtttcttctctgaaggagtccaggtgagctgggggtaggcccagccctaccacagttctgagtttgtccataagggcacgagatgggaggtggtcttgggttctcaggtgtcttgagaataaggagcaattgttgccattatgccttccctgccataggaaactcattcagcaacattgaatgcttgctatgtcccaggtatggcagataggagggatcaaggcagaagaggtcttgctctgggggttgagggacaggggaaaaggagccagagagcagactccagcttcagagctctgggagctgtcagttgcttaataggcacaacccactcactccagagtggggaaaaggctttgccaacacccagaactgggggcctgggtcccatgcggcctagcctgcacttactaagccrtggggcttgaaacaaatggctcctctgctctgtgactcagtttccttatctgtgaagggcagctagcattctgaaggatggccagaagggtggtccccccgagcatggcatagatggtccattggtattggctgggatcctcatctgcctcctctgctctacccawggcaggtgataagggttagagaacccctctgctgcccacacgttccctggcctccatctccagcagcagggttatccccaccccctgtcaaagaataggggtccctgggcctctcaacaggaagtaccagatcaggcagctagcagacaatcatcggtggaccacagggccactagagtgagacctatccatagataaagattggccagtgatgaagcccatctgggtgcaaaggccgagctgagaggcttctaccaactggagtgtgccagtgagggtgagcagaaggtggtctccagggagaacatgggcagggtttggagccagcacctccccagggttggaggaagcagacccaggmcctgcctgactgggatggggctctcttctgccatctccgcctccacctgcctagctctgctcccccgccccgagagatgcctccaggcttgggtagatgaagccaggggcttcctgccttcctggaaggcttttccctgtctggagtttatgaaagaccagcaggcaatgcggcaataaaaaagaccttggggtagaggggcgccacgagaggcrggtctggcgctgacatccaaccccgtgccccctccctgcaggatgctggtggactgtgtgcccctggtggaggtggacgacatgatgatcatgggcaagaagcctgaccccaagtgtgtcttcacctatgtgcagtcgctctacaaccacctgcgacgccacgaactgcgcctgcgcggcaagaatgtctagcctgcccgcccgcatggccagccagtggcaagctgccgcccccactctccgggcaccgtytcctgcctgtgcgtccgcccaccrctgccctgtctgttgcgacaccctcccccccacatacacacgcagcgttttgataaattattggttttcaacgatcctgactcctctctgcgtctcctgggggtggggagggggtttgaaccgaaggcagctccgcaaggtctccaactccagcagggatcctcagaggttcttcttccgacctcccaccccacccgcccgcagcaacgaaggagtcgagcctcagttaaggcaggagggaatttagtggagctggggaaggaagaaagtggggttgggagaacctccccaaccccatccctgctggcccggggacgggcatcggctctcagcaagagaagtattcccgggatgctgagcgcttcattctgtctccaggactcaggcaggtaggtcccagctccgccgcgcccccggacctacaggtcagcgtggtccgaagtttcctctgggggcttcgcgggcgcccacacgtactcggggggcacctgcgcgtcgggcgccgccttgcggtagaagccgagctcctgcactagckcattgatctcttcgcgggtcatttcactgagtgggatgcgctgaggcggaggaggggcggggtcagcaggctgggcctcgcctctggcctcgcccccagcccacctcccacggcctcacctctagttcctcstagcggcggcccagcagcacgagctcagggtcggccccagggaggtgtttcatcaccaggttgtgactggaggtggtgttaaggagcggggtggtgggcagagggaggtggtggtttccgcagccttactgatgggaacagcattgcctcctttgctcagagcttactctgtgcccgggaggggccagggtctccgcttatacgtgagaaaattagggttcaaagaagtaaagggccctcctctccattctgtggcagtcatcactagtcaatctctcttgcccacccaacatggagaccacctcagaatcctctgggagccactaccaatcaattcaacttgtcagttgaaaaccatctgccacccctttctgaagttacgtggagattctcccaggtgcccatcccatttcccctcccccagaacagaaggatactagaatggaatgtcctgcgtgacgaaagccttcacctggggaggaaccagagcatcagagaccatgacctcagtctactcgaggtacagacgagacactgaagcccagtgaggtcataaagcaagtcaggtgcaggctagactctcagcctaggctagactctcagcctagggatccttcccccctcccygccccagtcattgggaccatgttgcccactccccaagaggctcagggggaacagagctagggacctcttccttcaaactcacctcctttaggcggttcagctgtcatcccccgcaggtctggagggggataaaatgggataggtcaggagtccttcacgtttattccagtcacatccccaaagccatacttccttatccctgagttgggtcgggctgtgagttatccccggatcagcagttcccaaggtctgaaggaaatgctggacccttgtgggcagaagggggaactgtgtatacaggtggggagactcaggcctagagacaccaggggaaaagagcaaggccagagacccacagtgtgcctgccagccttggggcctgtacatcctactggctgtggactgactcccaatgcccaggggaaatgatcaccctgctcctcttaagcagtagagacctgggcttggcctttgatccctgaaatctcacagtggaggcagagcagaaggaaacacctcagaatggccctgggggcccccattggagacacctaccatctggtccctactctacacaggcagacctcaccctgcctgccacctgcggcccagccccacagaccatgtggttgcttccctgacatgggaggatgggagggctcctccctgccttccctgaggagatgccaccatccagcaggagtctagaccccaggaccacccactccagccctcctccatcctaccctcagcccttttcttagagacagggtctcactatgtcccccaagctggtcttgaactcctgggctcaagcaatcctcctgccttggcctcccaaagtgctgggattacaggcgtgcaccaccggcacccaaccattctacacccttttgtcagacagagctgacaaaaagctcagaggcgggctgtgatggtcaaagtcacatagcaagacagggactccgaacgggaatttcctggttgggggaggatgggaggctgctgcagagtaaatgttggcaaccaagttcccaactcggttgcccctccgagttggcccccttccccggatcctgcatatgggaggaggcacccagaaagtcttctttccccccaggagaaggaaaagagactttctggagcctccagccctggaaccgggtcgggggggaattccaggaaaacatgaagtgatgggggatgggaagttgggacaggattgggagtcataggccacgagaagagttaggagactgcgtcagtgtgtctgggtgtccgctgtcggaccgggtagggggagctggggaagggttcggagttccaggccccaaagtcggtgtctcaggcttccacggtggatgctggggccatctggggctagggaacaggagggatggtcccggcgccagggggaaagcagggagactcgcggttcgaggtggtcttggggccgggacggacggtgctcccatggggccgcagggttggggaacgatagtgccggggctggaggccggcgtactcacctctacccgggcgcgggttaggccgctcagacggttccagtccggccggtaggcagtggcggctgtggctggggccacaagcgccgcgagaagcagcagcagcgccagcggaggcaacaggaggctcatcgggacccggccgcagatgatgcgcaagctggaggcgaacctccgagtcgctgcgccacgtctgggcctccaggctggccccgcccccgccccggcccccactcccgctagaggcccagtcccgctggagaccacgcccccagcgctcggtctccgccccaggactccccgccgttacctcccgctagctcagggcgaggtcctggctcctccctggcgtttgggccgtcactttcccaggtccgagagtgtcgacgctccttttgtcgaccgaggatgtggacgctcccccaggatgcggccaggcagcgccacctcacgccggcagagggtgccggcgagacgctgagggacactggagtttctgagccgaacctgcgactttaagatagggaaactggtaggacatccaagaaaaaaaaaggaaagaaagaaagaagaataaataagggaaactggctttctgaggactcctcgctttggagcgtgggagatgaggagtgaggttcggtggagggggtgcggcttctgggagccactgagacctaccagcgtgtcttcttaccatccacagctactgctgagcagactttctgacctggggtgaggaaaggaatttgctattcaaaggtgggaagatgcaaggagggttacagctgataggccacaacagggtcttaaatcagctgggttaaatttatggagtcaggatttacttttttttttaatgtggctatccaattcaattaaaaatcttgtctttttcattgctactctgccgcgttacctctgttatatataaataggcaaccacggccgggcgtggtggctcacacctgtaatcccagcactttgggaggccgaggtgggtagatcacttgaggtcagaagttcgaggccagcctggccaacatggtgaaaccccatcgctactaaaaatacaaaaattagctgggcgtggtgtgggcgcctgtaatcctagctacttgggaggctgaggcaggagaatcacttcaacctgggaggcagagtttgcaatgagccgacatcctaccactgcactccagcctgggcgacagagactgtctcaaaaataaataaataaataaataggtaaccatataaatatatgggagtctacttctgaatatcataccctattctagtccttcagtgggtttgtctaactacgctgtcttattaactatagctttatagtcagacttgacatctggttgtgtgttggtcctctagctttgttctttctttctttctttttttttttgagacggagtctcgctctgttgcccaggctggagttcagtggcctgatctcggctcactgcaacctccgcctcccgggttcaagcaattctcctgcctcagcctcccgagtagctgggactacaggcacgcgccaccacgcccagctaatttttttgtatttttagtagagatggggtttcactgtgttagccaggatgttcttgatctcctgatctcatgatccgcccgtctcagcctcccaaagtgctgggataacaggtgtgagccactgcgcctggcccatttttttttgtttttttgtttgtttgtttttttgagacagagtcttgctctgtcagccaggctggagtgcagtggcacgatctcagctcactgcaacctccacctcccaggttcaagcgattcttctgcctcagcctcccaagtagctgggattacaggtgcccaccaccacgcccagctaattttgtatttttagtaaatatgggggtttcatcatcttggccaggctggtctcgaactcctaacctcaagtcatccacccgccttggcctcccaaagtcctgggattacaggtgtgagctgctgggctggctatttttttttttttttttttgagacagagtcttgctctgttgcccaggctggagtgcagtggctcaatcacagcctgaacctcccaggctcaagcaatcctcccacctcagcctcctgagtagctgggactacaggcatgcaccatcacgcccagctgattttttttttttttttttgagacggagtttcactctcattgtccaggctggacactctcatgtccagtggcatgatccggactcactgcaacctctgcctcccaggttcaagcgattctcttgcctcagcctcctaagtagctgggattacaggcgtcggccaccacacccggctaattttttgtctttttagtagagacgaggtttcaccatgttgaccaagctggtcgcaaactcctgggctcaagtgatcctcctgccttggcctcccaaagtactgggattacaggcatgagcgaccatgcctggcctgtggcctacattttcctgtggtgagggccatgtgtgatcccacagcctcagtaagccatcgcagtctagctttgttcttcttgaaggttgtcttgactatacttggcctttcacacttccaggtacaatttagggccagctcgtcaacctccacagaaaaaccttccaaatttctatcaggatttcagattcccactggggaaatcaatgtggggagactctacagctttacattattgtgacttttcttccacgaacatagtaagtccctccatttctataggtcttctttaatttccttcaataatattttgtggtttttagaataaatatcttgcatatctttcattagatttactcctaggtatttaattttttatagcattacaaactctattgtttttacatattcattttcaagttgcttggtagtagcatataggaagacaattgatttttgtatattaaccttgcagccagtgaccttactgaattttcttactctaatagtttaactggatatttttttttattttctacatatgcatattatatcatctggaaataaaagtggttttcttcctttctggtccttataccttggttttgtttcgttgcactgtcttaattttacggtctggggcctctggtacaatgttgactggaactgataattgtctttttccagatatcatctttaaacgatcatgtttgctgtaggtttgttactggtgccttttgtaaaagaaagttttctatttctatttttctt

SEQ ID NO: 5701 - DNA, 32572 bp, Homo sapiens
aaactcagatcatactcctggcccatttaagagatggttatcaaattccaattaaatagagaagtgggtatatttcaaagtgtatcgtacagttcttgtgtaatcaccctcctgttcctccctgaaaatctggcaggtgtatggggtggtggccacgaggctgcagggacatttgcccaggatgaaacagttcccagtgaaagggtcatgttggtcagggttcagcccctctcaaaacccttctgcctggggtaaagcagaaaagtccgccagcaatccgacagcacgccttcttagccacgggactgtggctgagcagtgggcttaggccccttccctctaagtgttaccaataatcctgcactgggatggattcttaacagaggtggggattaacagagctggagctctggaccagcaatctcagttcctctgatagtgagcgaagaattgcagactaacaccaaaatgcaagctcaaggcaaagtgtattgaagcacagtaatatactctcagagggagagcggaatgatttctgcgaagtgaaataagcccctctttacagggtttaaggtgcttttatggggtttgtggggaggagtcaaggtttgggttgtgtctgagtaacaggatgatgtcatttgattggcagtttatggttatataactaaaattaaactggcatggttttacccatcatttataaagaaaagcccactctggggaaaggagggtacaaccacatgtaaattttattataatgatggtataatgaacttggggtgacctgagggcatgtttttgtgttactgggcatgtgcccctttaggagacttccacctgtgccttactttctctttctttgggatgtgctggccacagactttaccaaaaactccatccattaggatggcattaggacggttctggggctaaacttaggtgggccaggggctgtttcactgtcagcctttctactctcttttcttacccactcctagctgctaatgtctatttaactacctaatatttccccctttagagaaaaaaagccaaatttttgggtagatcggtgacaattaatctggctacttcctgctgacaagaggcagtggtaataattgggttctcttttttgctctcttgtagctggtaggttgggcagagaaaagtggtggccatccaaggggcccacgtagatatcagacatggttgagacctcgcggtaaccttgtgtagaatcatttggagttttatggattctaggtgggaagaaacaaaacaaccttgtaaatcaaatgagcatcgtttgaaagctataagttgtataaagctgttttaggaccaagaaagggggctaaccaggaaaaccaggaccagttgttaaatttccaccagtcaaagcctcctgaaactctgttttccattaacttgttggccctgtctgtaatttttttaagttggtttgcactttacctgattggttgatgaaaacagcaatgtttatcaagtgttgcacaagctcccccttgattggctgtgagcaaattaaaagctcatcaatttcataagactatgcttgctaatgaagcaatttgttctgaaagggtattgacctggttagttagattaataatttgttgagtaatttttaagaagagtttctgggcagtaaaaatggagttaaggaggtcctccagttcccgtgccaataccagccagaacgccaattatagtcagtgctgttaaaactcctctttcagttttaccagattgagcgtgtatagggaggggaatgctatcgataagagtgagtttggggatgatgtaaactagggccaaatccccgtttaattagcagacaagcagagatatgccttgtttctatacaaaaatgtgatttgtcatgttaagacaaatatcaacagtgatactaaagtagggtttttccatgctgtgtaagtctgctttaataccctcagaagtggaagtcaaggctagttcatgtaatgggggaacacaggcagtacttgacagaatgaaagaggaatcaaaagcccaattagaggaaggagtgatgggatcccaaccaatattgtgaaattatggggagctgcagttttttgcaatgattttgcccgaagttgtgagactgaaaccagaagttgttatgtttaaaatgatattctggtgtgggtctggggaaaagggtagatccagaatagctggcttctttccacatagtggttctgttggggggcttgggaaatgaataaaacacaaagaagaattagaatatcaggtatgtttgcattttttgttgtcagtgactaagctgacacataattgggtggaaaatagggtacaagtgtgattgcaagccttggaaatattaggaaaaaatccaagtaatggcctcatcctcaatgaagatagaagacaaaggagtgcttagtcagatagtattacagatagacgacaggtcctcggaggttgtaacaggtttgttggtatagacttttaaggagtatgcaattgactgtgggctcgaccctaggattgacagcttattctggtcggttaacagaagtgggggctggaaatgtttctgattgattccactcagaagcaggaatggaaatggctgatagacctctgctagggaaggtgtaaacacagattcaacagtttctgtgatgttgtgcagtccgttgatgttgtgtttaaacaaggttttaaaacttctttgatggtagctaaatatgggtgttggaaaaaaacattaggagaaatgattgcaagggttaatctagtttaaaaagcaaaaatattggttactgcatttaaaacagctattttagcataaaaaattatttcacccattcaggaggaggcaattgaactgcaaatatatgagaataactataacaatccaacttaaagctaatatttaaaaaaaggcactagggaaagtcagtgggcattacttattttttggcagtcttttaaagagaggcttgaggtccactaaagtctcacaagtgtatttgtctgtggagacatcatcagtttgggcagccctctgtggttttacataggagtgtggatgcagctggcaatccagaatacacagcactgagatcaaggtagtctcgacatcccaatatccttgaccattaccaggagagagtgtcccctgctctttagatggaggctccgcctcccctggggcagtctgtgtgtctctcaagttgtacctatgtgtggaccatggctgtgcccagcatggagaccccttcctacagtgggtactacagccttgctgaaaacatttgtcccctagattctgaataaaagtggttagaaagaaagaaaagaaatgaagctctgttcaaaagaaaaaggaaaaaaaattgcaaaacgatcttcagaagctgtgctgctgcctatggcagtgtggcagggagggggcctcgggtggggtgagtgcccaaaagggtgggcraggacgatttggggagttctccaaaggttatgacccactatgggcctacccttcgttcccggctgtaaacctctaaacttagcatttatccaagctatcccatgatctgaatcccaatcggctctcttaatcagtaattttaaaaattgcatccagccaaaatgcccagtctaaagggagttgagggtgattcctggctctgtggccagagcataagaaaccattttgcctctcaaagcttccctgggctgttaacaagctctgggcttcaatggccactacaacctaatgaagttgtttaatcacgttaaacagctaattaaacctaaatccagagaagatttctctaagcccttctctaaaagttattggtggcatgttgggggatataccccctctctaatgcagcaaatacaacactcattgcaacttctcttagccaagcagcgaaacatagcacaaacatcttgacccaaagcgaaaggaagcattttagcaaaatatgtttcagttccccaagctaaaatcaagcacatattaaaagccatgctgaacgtaaatcatccaggtcacagcactaagatattaccaggaattctgcgctgggatggatcctttaactgaggagattaacagagctggagttctggaccagtaatctcagttcttctgagagtgagcaaacaattgcaggctaactccaaaatgcaagctcaaagcaaagtgtattgaagcacagttagacactctcagagggacagtgggctaatttctgtgaagtgaagtcagcccctctatatagagtttaaggtgcttctgtgcggtttgtggagagaagttgaggttggggctgtgtctgagtaaaggacgatgtcatctgattggcagtttatggttatataactaaaattaggcaatgcatgtttttacccataattttcacagaaaagcccactctggggcttttgtataataaaaccacattttattataatgatggtataatgaacttggggtgacctgagggcacagtttcatgttactgggcatgtgcccctttagggaatttccacctgtgccctagtttctctttcttcaggatgtgctggccacaaactataccaccaacttcatcagttaggggggtcttagaatggctctggggctgaacttaggtgggccaggagctgttgcagtgacaggctttctgctctcttttctcctcccagctgctaatgtctacttaactgcctgttgggagctgaaaaggccaaagggattgtgaccaactcagcatttcactggaggctatatgatcaaacagcaaactgtttatcatgaatgcgggatgtgggtaaactcacactgcacccgccgccagaaggtttcctgagggccatcactccctggtgctgggctccttgaagttatctgttgggatatctagcacctattatttgaaggatgcagtcttgcaagcctgctgtgaaccaaacggctgactgacaattacctgacaatcaccccccacctttttctcgtcatctcttttacctaataaactcagagagcttgaaaagctcagagcccttgttcactagaagcaaggaaccccctgaccccttcttcctaatatactcttttgtctttgtcttttactcccacatccaccccccactttgttcagtcaacctgggactgtggccaattacaacagcctaacaaaagtgccacaggagtggaacatggggcagtgggctctgctgaagaggatgctagggggcttctcaggggaggaaatgctagatttgcattctgatagaggagcgtgacttttccaggtgaaggtagcaggtgctcctggcagaagaacccacataaggaagtgtccagaagccacacaggtatggcgttcgacaagagcaggtctggaacggtggctcatgctgaggcaggaggatcatttgaggccagagtttgaaaccaacctggtaaaaatagtaagatttcaccccttcaaaatcattttttaaaagtagccaggccgagtggctcatgcttgtagtcccagctactcaggaggttcatttgaaccctggaatttgaggctacagtgagctattattgtgccaccgcactccagcctgggtgacagagccagaccccatctcaaaaacaaaacaaaacaaaacaacaaaataaccccaacagcaatacaatcaatatgcaataagcgtccacccggcatgtgtgatggactgtggtaatgctgatggcatggagggagtgaggtgggcatctggggagtgtggtgttattgggggtggggagtaatctggagggtctcatagtctttcagtggtaggtctttcttcctgaagacacagcaaacccccaaccctaagtatgggaggcaggtgggttggccaagaaggacgtctggggctgctcttggatcagcaggagggtgggaccaagggtgctgctggaccaaggatgggactgggccaagggtggggctgggaagcatcctgttttgcatgtttgatcaggagctgctgccaagttgtgactttcactttcccttttgggttccagggtatatctcagagmctggagaacgtgtctggttattatgcagatgcacggctggaggtgggatccacayagctcagaacagctggatcttgctcacactctttcaagagaagcttccttggtaagttaggggtggtctgaccttccccatctccccatcctcacagcagctctataagagaagggtcattcaccttttgtagatgagctcagagaggttaggtaactgactgaggtcacatctcggtccatggcagagcctgaatttgcacccaggttttagctggacttctccctccctctctctgggcccccaaacagtagagacagaggcagaatcagctcagctgggttcacaaagcttcctagggctcagctctagttccagcctgcgtgagacatggcccggtgaccccagaaggaaggcagatgttgggactgtccattcctttagaatatttggaggaaccagagaaggtggaggacaggaggtgatccagagcctggcctgtccttcttgtggcctggccaccctgaggctggccccagggtgctgctgctgaggcccgatggggacagaggatttcctttgagatacaaggaacctggctgggcgcggtggctcatgcctgtaatcccagcactttgagaggccgagacgggtagatcacttgaggttaggagttcgagacctgcctggccaatatggagaaaccctgcctctactaaaaatacaaaaaattagctgggcgtggtggcacaagccagtaatcccagctacttgggaggctgaggcatgagaatcacttgaacccaggtgatgaaggttgcagtgagtcgagatcgcaccagtcactccagcctgagtgcactcctgacagagtgagactctgtctcaaaaaaaaaaaagagagagagagcgaaaagagataacaaggaacccagaggttgtttcacccaccctgactctgagcacctacttgagccaggccctgtgggtaaactgaggccatgggagatgagtgactcgctgagggtcccatrtcaggaagttgagcaggtagatcacaggactccatgtccctgacactcacctggttccttttcaggcctctgggtgatagagaagaaagaagctgtgctgttccctagtgggaaagatggcccagacaggggcagtgagaacggcatgttgcagaatggtgtctgccacatgatcccagcttgacaatcatgagattaaaagtcaaactgtggaagcgtgagcataactgtgggagcgtgagcttagccctctgtgtttgtagaagcagaaacaaacctggaagattttggattattaacattatactttcttgcttcaatstcagagtcaggaggtcaggtgttgaccttccccctgccctccaagaggtgtgtgacactggggaagtcacttcccctctctgagcctcagggtttttcacctgccwkagggggttaggatgccctaccctgctgacycccagcaggctgctgaccccatctggggtgaggtgggaggcggggcagtgcgagtcaggggaaagttgacattgcagcccagatgcctgcaggggctgcaggaaagtggggagagctggaggcctgcatgggcttctcagatccaggtgatgcccagcaggtgagagggtgggcctggctcctcagagctcagatgacggaacatttgctataaactcaggtgcaattacatttgacatgctggcaaccaaataaaaggcaaaccttgcatatgccacacacacactcacaaattcacacacacacacacacacacacacgcacactcacacctgctattcagatttcacttcatggagccctgtgtttctcacctctgtgtcgtggcctcgaagggtctttgattctgtgcagcttcttttcctcctcatttctttaagggaggcatcgcattcattagtcttttttttctgayggagtcttgctctgtcgcccaggctggagtgcaagtagcaccatcggctcactgcaccctccgcctcctgggttcaagtgattctccagctcaccctcctgagtagctgggactacagaggcgtgccaccacgcccggctaatttttagtatttttagtagagacggggtttcaccatgttagccaggatgttctcgatctcctgaccttgtgatccacccacctccgccacccaaagtgctgggattacaggcatgagccaccgtgccagrcgcattccttagtcttaatgggcatagtgttagggacccgcctactccctatggcaggagatttagtgatttctccctttttggtgatagaaacaacgctgcatggcaccctctaaagcccctgtccctgcacacttgccctctgctccctggaggctgagacctaggagtgggtgctgtgccatgacgtgggggcactttgtaaagtgtgctgagtatcgctgacgatcctccaggacaccagaacctttcacactccatcaacagtgaaggggcttgtgccacctttacctccctaacagtggacattattagtcactttaggtttggcttatctaatgtttcaaaaacgtatgtctctgtgatcacttacatatatggttcaaaagtgagcttgagtgccttttcatatggttaacgttaatttctatttcttcagatcctatcttttacccatttttaaattttatttatttatttatttatttatgagatggagtctggctttgttgcccaggctgaagtgcagtggcgcaatctcagctcactgcaacctccacctccggggttcaagcaattctcctgtctcagcctcccaagtagctaggactacaggcgcgtgcctccacacctggcaaattttgatatttttagtagagtcagagtttcaccatattggtcaggctggtctcgaactcctgacctcaggtgatccacccgccttggcctgccaaagtgctgggattacaggtatgagccaccgcacctggctatatttttagaaacttgatttcagtcttttcatgttgatttgagcatttcttgtggattgtggacagttacctttgctttaagtattgcaaaccgtgcttcctattctttcattttattctggctcttgaatgatgttctttctaatttttaatttgtaagaggtaaaactctattcaattttccctttaagtcttctgggaattgagttttgattcgaaaggtcttcccaactcaacattgtttttaacatttcttctagtatagttttaattttttctttctggggtacacttagatccctttgggattgatttacttatttttggagaagaatttgtttcttcttcttttaaatgtaggacctatttcatgggtacctactacagacaaagaagaacaagacttttttgtgtgtattctaaggcacaacaagtgcaggaaggaaatgacctctttcccgtaaaagtccctggcagtagttggttgctgcataagagtgtcatggacccggagggagctgggcccagatgcaggcctgggccattgccgtgggggaggggaggcttggaaaccatggctatgattcagaggttagctggctcgcgtgtttttagaaatttcttttttctttcycctcgtacaaaagtaataagactggggaggacacgggagaaaataaatggaaactcagaaacctgatagagccaccaaaagtacatgaaatcagagtcatggtcttatttgttcttccccaaaaagagatgagcatctagatagcaaggaaaaacattcaatccctcaactgaaagtgaaactgaagctgggccatgttgtccagaggctggttgcttttagtccaagtgctgcctcccacacctcggatttcagccaggctgtgccacggagggcagaggccacccaggtcagtcataggggatgcagctgggaacaccgcagggtccctgccggatgctcagagtttaacggggagacagaggcccaaagagccacacagaggtagagctgcccccggaaagcagagtgctcagggagcctggggagggctgggggacgctgcagggtccaggcagctttggctgagcctctgaggatgggtgacttgcacatggtggggaaggtgggggaggcattccaaggggagggagcagcctgagcaaaggcctgaggctgggaatgggagtggggggagtagatgggctctgggaggcagggaagcagggcgtcagtgtgtacctggacccaaggtgactgtgtgggcagggagcagtgaggaaagtaggagcccgtgtgcccagttaaggggttgaacttgaccctggcaggtcattaaagattcctcaggagacctaggtattgtggctcagggctgtaattcccgtgctaatgcacgraggctaatgcaggaggatccctcgaacccaggagttcaggacaagcctgggcagcatagcacraccccatctctgcaaaaatgaaaataaaaagattgactgacatagtgatgcacttgtagttcccactactcagaaggatgaggcaggaggatcgattgatcctagaacgtcaacactacagtgagttatggtggtgccactgcgttccagcctgggtaacagagcaaaaaaaaaaaatattgaaaataaaaataaagattcctcaggaggagcacggtgtcttcacccctctctccctctctctctgcctaaggaggaggccccacagccacttgcagggagctgctttgctgagagtctctgtcctctgcatctggagagcttggctcagagctgaggcaggagggagggctccctgtctgggcctcctccaggaactaaagtccctttccgggaattgaccaaactgcaggcttgcccagrgaggacatgctgtgtcctagttcagctcgaggggcagtatccagcttcaaccctcagcggatgccccagacaagattccgagccaggccaacaacgcctaaggaggacgagaccctgggtgtagctcatcagaggtgtcaggtgtggtctgaggccccagctctctctgccctcctgctcctctgctctgtgctggctcctggtccttatggctcatgatgttgagacagctgccctggcctagggggtcacacactgaacaaagcaggaagaaggggaaggggagccctccttctatcacccttatcccttacagcaagaagcacccagaaacccctcagcacactcccctagtgcctctattggcctcactgtcaccatggttgcatgggggccccagacaatagacacctggatgcaagatccctaagacagaggcaggaaataggaagagggaggtgagaggctttcgatgaggatgcttctacacatgaccttgaggatgaaaacgcatcagggggtcccgggaaccactgcgttgttaacataaagtctgggagcaaagaccagcggctggaatggatgtgcctgggagccagctgaaacagatgcagccgaagccacagtaaagaagaaagagataggggcctgcttggagccaacccctacctttgaggggcctgacagggccacctcacagctgcctgggcttgttgttgcctcctcactacagaaaccatggaagtctctagagtcartgtttccaggctggggctgccagatcactcctgtaggtggttgaaccagttgagttcattcttctcagtgagggggacacaggtggaggtccatcggcacctccataaggggtgcgagaaggaacctgttagaatatctgggttctggctgggtgattggcaggagggcctatgaaatggagcccactctggattgggtgttgcagaaagtggggggcaagtctaccagtgggtatctcagcaaatctcatctagagagagggagaccaggaagaggttagagttgacttggtgtagaaaaaacaggcattctatttagccaggagagggagtgtttggtattttgtgggtggagcagagactcagtttctgtctatacttagacagtattatgaagtctaattgctctgtctcatttgctcacaatctcagagtcaccctgtgtgtggttactattctgtgacattatttctgtccataggagaataacacagcccttctgggagtccacgccagcttccaaatgtctgtggcagctcttccttcattctcaacacttacgaacaggaacataaataaatagaaggaaaaatatccatttatattaagatgctcttcttgttaaaaccaattaacaattaaacattctctgttacgataagtctttgcatttcaagtaccctgttttagccttttctgtatacttttctcaaatgttctcacttgaatgttagtatcaacccaaggcctttcacagattcatcttggaccaagtaaacatgatcataataatcacaatcaattattactgttgaatataagcggtataaaccaaaagtaagattctaagcctccccctcatttaaaggacttcctcctcagccagggctcttaaaatttaacctgaaagactggttcaggccrtgaagggaaatgggggtcagacatgcttcattatgcctctctggcattaatatcaacacaggctttcagtctaataagaaacattttacagcctgtttctctgtgaagcctgctagctgaaagcttcatctgcaggataaaactttggtctccacaacctcttatcrcaactcaaacattccttcctattgatctccggtctttagacaaactcaaccaattgtcaaccagaaaacgtttcaatttacctgtagcctggaaacgcccactttgagttgtcccgcctttctagaccaaaccgatgtatttctcaagtgtacttaattgatgtctcatgctccctaagtgtataaaatcaagctacaccccaaccaccttgggcacatgtcatcaggacttcctgaggctgtgtcacaggcatacgtcctcaaccttggcaaaataaactttctaaattaactgacaccagtctcagattttccgggttcacagcggttgggactgaccagtgggcatccctttgaacactgctctgaacatctttggaagcgtccttgctttctggggtaacacatatcacagtctggggaatttggttccccacaagacgtcttggttcctttgggtggaaaagaagcccgtatgttgagtggcaaggtgccactggaaattatactgattcaagataggagttcactctgattatgctgttaatattaacagtttaacataaaatgacaacatccgtacttttcttagcagcttggttaccccagccaccgaggtttctctgaagctgacatttctcccatcaggaggcaggtgtatttctctttggcacttgctcacacttctccatcaactttaaggtggtggcaccacaatccaaaccattattgaggttagcagttactaactactataaagtaacttctgttttgttaaaatttaaaaaaatcaattaataagtgtatacggttcagacaaatcatttaataaagagggctccactcactcccttcccaattaaaagcagctaattttgatgttcagattttcctttttttwttttctgagacagaatttcactcttgttgcccaggctggagtgcaatgtagctatcttggctcaccacaaactccacctcctgggttcaagcgattctcctgcctcagcctcctgagtagctgagataacaggcatgcaccaccatgcccggctaattttttcatttttttagtagagacagagttgctccatgttggtcaggctgctctcgaactcccaacctsaggtgatccacccacctcagcttcctaaagtgctgggattacagatgtgaaccagtgtgcctagccagcttttctttagggagtaaatcattttctttacataatattcttatgctagcagatgaaatagagtgagagtgcatgctctggagattgggcacttgagtttggcttctggctgtcactagctaggggctccaggtgaattacttaacttctccaagctttagttttcccctcagaactattaagatgataacagtgcctacgtaggatggttgttgtgagaactaaacgtgagtttatttaactttatttcttatgcccttaactgtagccagtatttcttgactcttcactttacaaaatggccatattaatcctccccctccttccttcagtgtttcacctcccacctttaccatggaacattaattatactgactggtaacaagtagatttagttctcatatgtaaatgttctgttttgttctaaaagttaaaagttaaccaagtgtttacattttggtgacgytttaaatcttgcttactgttgagctgagttgtacaatatggttgcacatgttttgctgcacggctttagtttttcctgatgtttctaattgcctttgttttttccccctcttgtactgtttgccttcatgatttcctcagtttttctcaaactgtgaattatatgcaatgttctatcgagtcccctttccctacagagccctttccttcttattctatcctggactggttgctttctaggcctgctgcatgcccagctgtgatccttgcatttccttctccctgggttgatttttctctttcacgtctttttctctcttggttttccttatcccctctccatgagtgtgcgtgcacacacacacacacactcacattcttcctcctctcagcctccacagctcattctcaagtaactttcttttctgttatttacttgtttttcttttaacagagacagggtcttgctctgtgacctcttgggctcaagagattctccccagtcagcttccagagtagttgggactagaggcatgcatcaccacacctggttcatttttgtattctttgtaatgatggggtgtcactatgtggcccatactggtctagaactcctggactcaaagaattctcctgcttaccctcccaaagtatggggttataggcatgagccaccatgctcagactcaagtagctttctatgtaattattatgtatggtaactttcttattctatatctagctctgtttttgtttttgtttttttctttttctgtcatccttttagttgattttctggaaagcttccttgcctatctttttgaatcttgtcctagagttgtttattttctcaatcaccttttaattctcaagaagtcttttttgttccatcatctttgttccttttcagtacataatgttctcatttatgaataaaacatttttatgtccctgaggacatgggtttgagtttttaaaaattattttctattttcgcaatcatccatttcttctggactcattttttacttgttatcttgaccttttccccattttttgtctttctgctttatctgatcctagatctattcatattaaagaaaggggcaggtccactggcagtcttccctgtagagtgatgaaatgagaactccttggcatcaggatacaaagatattatttctggggcctttagatgcagttatgaagtctctaattttttccattggtgtagactcacggctactgtgaatcctgtatgggtcgtggggctggtgaacttctcccctctctgaggctctgcttagcaggcaattcttggctgaatgtgctcttggtgttgctgtggattgcagatccctttacccctctctattcagttgtcacttcttcagccagttctgtcttccaaatatctgttgaagtctctgatctcctgttttcctcattcaaattttcatatgtatatattttttgagacagagtcccagtctgtcaccagggtggagtgcagtgacccaatctcggctcactgcaacttctgcctcctgggttcaagcgattctcctgcctcagcctcccgggtaactgggattacaggcacacgccaccacgcccagctaatttgtgtgtgtgtgtgtgtgtgcatttttagtagagacagggtttcactatgttggccagcatggtcttgatctcctgacctcgtgatccacctgcctcggtctcccaaattgctgggattaaggcgtgagccaccacaactggtccattcacattttcattggcagcagagggtgcagaggcagtgtgtgtgttcttgagtccgtctggttgggtgggaacccagtctttacaccttagtagatttctgagattgggcaagtcgctgaacatctgtttcagttttcttatctgaaaatggaaatacaaatggtacccacttaataggctcttggaagaggactgtgagttattatttatamcatcttagagcaattagtggtgcaaagtcgagtccacaaatgttcacccctatttctcattgactgttattatacctataagtgccttgactaacactgtagtcagatcttgaagggatagtcaataaatgttcttctaccttcttagaacaatgcctaaacataatcaacatttgctttcttttttctcatttcccaaggcaagatcatcacaagcagaatgtgaagagtgtttctctgtataaagatcagcatttatttaggctggttgtagtggctgatgcctgcaatcgcaggactttggggggctcaggcaggaggattgcttgaaaccaggagttggagaccagctctgggcaacaaagcaagatccacatttctaaaaaaaatttttttttaatgtgcctagcgtggtggtatgtacctgtagggacaactacttgggaagttgaagcagaagcatcacttgcagccaggacatacaggcagaagcaagggggacaaagggtgtccagcacagcaccagtgaattcaccaagacagacacttgggcatagagtgcaagacacagatttggaatgaggagtcatttacartaagcatgtatgcatgagtcaatatttttatatatttaagggagtrgagcccagtcatggaagacatgggatttgaatcagaagtcctggctctacccctattgtgaaaacatggcaaggttgcttaacatttgaggtttcttctgtttcaaaatgggagccacrgttgcacccatctcctggcctgtgtgtgatcatcgaatgaggcacatatgaggagccctgcagatcacagacacccagtacacactggctrttatcaattagttatcacacatgttgccaggcccaggtcattgtcagaacgttccttcccatctctatttcggtgtatagactctgtagtttctgtgattatcagatgtccatcccttcctctgattatcttctcttcatacccctacaggacaaaaggaccctgccttggtgtgagagtgagggcagagggagctggagcaagtagaatttctctaaataccagctggctggggcccaggagattaaaaaacaccgggctaggttggtcttggcatttgctgacacgcaaagggattgcagagatccagcccctccaacctccctctgtccacaggtggctcacattcagtcccacaatttgctttctcctcctcaagggttaagaaaaaaaacgaacccttccagtcaggtcagtgactggagagctccawggaaagtctctcagtgacctggctgctggcaccatggactcaggtaggcttgcttcttcctcttccctggctggttcctactcgcacctagaatggagggtggcgtttccacaactcagtsagccccagaggaacccggatggtcaagcaggccgatgagtcttccctgagccccaaaagaggccacatggagtcccccgacccaagggtctgtgggggcatctatgtcctgacctctcctcaggggagcatggcccaggtgcccacttcctccctgccctggcacctagcaaaygactcaagtggggcaccacagccttggggaagtggaaacagcagggtcggggagtagggggagagcagggtccaggaggtgcggagggctgagagaggaggttgaccagcagycccgacctctgacctcccgctctgctcccagctgaccctggggtgtttccagcacaggccagtcccctccctccagctcttgccctgcaccagcccctctgctctgagtggccctgtgaaaagagtgactcagcgtcccactgaactgagccccattctggccttygccacgtcttctctgtgtcacctggagcttcttacctcccctcacctggaatgcgagtataatatttccccatgtggtcatgaggatcaaatagtacatgggtacctggcccagccagtgcctgccacacagtagggcctccctaagagttggttcccatcccctttacctgccactgttgattccaggtggaagcccctttttgtcccccagggcgcctgccctgcacggcccatcacaagcacctgcttaccagggatgactgcctcaggcagggcctcattcccatgatctcaaataccccttgtcaaagaaaaatctgaggtccaatcgaattttgaagactttatttgaggaagaagcaagtcatgaagtgggaaacatcaaaatgaaagacatttcatgttatgatggaaaagtgtcagaggcaggtatttatagggtgaatatggaagtggaataaggacattatttgatttgttgcagttgtcaaattatgttttttggtttaccttgttggaaaattcctagtcgtgtacccgtctgtcagctggctgctcatgactggccgaagttaagttttgtttgtgcctaacgtaagcacccatctgaaacgactccagttaagttccccatagttggcagtttaaggggggttacagccwttctgaaggcctgtttgcttttgtttgcccaggtgttcattttaagtttgctttaacaccctggtactcccaccccagcaataaatacacagatctagtgctggaggttccctccatccaaccctggtttccttcatcctttcagtgaaggaggaaaaaataaaagcaaaatacccstcacccaagtcagcactgtgttcatttccctaaggcctgttttctcccctcactgagttgccttggcaaccaagtcacatctgctcaggagccgccctggacagcaaactgggctctgctgagtcctgtccaagatgaggagagggcagggaagattagaagccgggacctaccagccaaccccggaatccttcagaagggcttggctgggaggctcaaggaagaaactctstctccgaaacaagatgatctgtggtttaataacgcggccagctgggttcagaggtgatagtggggagccatgtcccctgagaccagcctgcagaggacagaggtaacacagaagggccacagggatcagtgctgagggtcttgctcccctgcccgcctaaagaaccccctccactgcccatctgagagcgcccatgagcagcaggaggaatcctctgtgcatggtagtttattcaatggtgtagggttgaaatattctttttcaataaaatgtttaaaatcccacaggtatactacagtggagaatgcaggaaccacaggcattttcaaaatatatggagtcttcaaagtaatggcaagggaacgctggccttgagtcaaatcctgagcttcctgcttgctgggttgggtggtgtctttcgctgtctgggtctcaatttctccttctgtgaaatgagaatgaggcctcgcaagtgtgtccacggcaggaaacgattttacctcatgtcccagtgcatacataaatccatactgcttcccagtcccttctctgcagttccataattcccaaatccctgcaaaccacacatttttggggcaactcmtctgggcagtaatcctgctgtgtactaagatgctttgtactgataatattatgtatcccatttaaggtgaatattcattggtttctctgttgaaacatttgtacctttgattacaaggttgaaacatttgtagcgttgaccagtgtgggagtggtcagtgatacagcatatgcaccctgtgtcatattgacacagattgaaaatgctgccatcctaaacacatctakatcccaggaatttacataagggtatatatatatacacccttatgtatatatatattatatatatttcaaatatcttacaaaagaawactcactcttgctgtgttcaatacactctgatattttcaatgctcttttctttttaaaatgctgctcttgacaaaatgaactattttcataacccactgatgggtcgaaactcagattttgaagacactggtgtaaagcgtttgacaataggcacatggcagraggaagcgatcactggaatatttcccgtacatggggagaaarcatggtggaaagctcactttctggtgattctcagctgaaatagatyggttcctccacaaagcaccrtggcacttccctggtgaatcactcttctcaggatgccttagtaaaacgccacaggctgggtggctccaacaactgatgtattttctyacagttctggaggcaaaaaktccaaggtgaaggtgccagcagggttgatgtctggggagggctctgctcctggcttacagagkctgcctcagggctgtgtcctcacatggccttcccagtgtggggggtgtatgtgtgtgtgtgtgtgtgtgtgtgtgtgagtgtgagagagagagagagagagagaaagagagacagggagagagggctggaaggcaagagagacagcgagggcggggtggggtgaggagagagagagagatcttctgcctcttttttttcttttaactagacaccagtcctgtaggattagggccctacccttacgactctctttaaattaatgacttccttaaaggctcaatctccaaatatagttactggggtttarggtctcagtatatgaatttggagggcacacaactcagtctatagcactgatgcctccatcaaaaataccccatgtgacagctggttgaggaggattaacmtcgaaccaccttattctcaatgccatttaggctgtagcacactttcttccaatcttatgctttttgtttccaagtagaaaagaaacgctttactgaagaggccaccaaatacttccgggagagagtcagcccagtgcatctgcaaatcctgctgactaacaatgaagcctggaagagattygtgactgcggctgaattgcccaggtaacctccgtggggttacctccatggggcgccccggctatgccatcctgatctcccctgggctagttttctctggcaggcacacctcctccaggcagccccctctgctgaacttgagaatgtccctctcagcagtccaggaggaatatttcctccaagtccttcgctggcagtgagtgacctcaggctgaggggagaggaagcccacaagggcagggtcagttctgccatctactggtgatgggagctttgcaagctacttgactactttctgccttcctttcttcatccattgagctttattgtgagaaaaataagctaatgcatgtaaagtatttagcataatgactgacacatggtaggtgctccgttaatgttaccttttaaaaagattgctggggagagaccaggaccaaaagtgtttttctttttttttcyttttttttyttttttttttttttttgagacagagtcttgcttgtcccccaggctggagtgcagtggcatgatctcggcycayygcaacctccgcctcccggtttcacgccattctcctgccccagcctcccaagtagctgggactacaggctccggccaccgcatccggctawttttttttgtatttttagtacagacggggtttcatcgtgttagccaggatggtcttgatctcctgacctcgtgatcctcccgcctcggcctcccaaggtgctgggattacaggcatgagccgctgcrcccgaccaagtgtttttcttagagttggatgcccagcaggactttctttgaaaaaagccagaaaaatcttgacctgatcaatgtgtgttcctggagatgctgtccggggcccttttcttccacctctgaggaactgcacaaacacagcaggatcctcctgctgacmcagaacacagagaggctggaatggagttggacagagctgggggtggatcttggctctgtccctgcacagctctggggctgttgttttatgtcttggagactgggacctgccatctctccaatgctaatagtagttcaatcagatgggcrtgtggttaaagcctgagaatgaacagcaggtcaraggtggggaaccaagtagcatgatgccatscaaagacccagagagacgtttcaggggcagagccaggggtcaggatggggcaggggtgggcctgggttggaggagcagcaggaaggctcgggcaccaaggctgggagtagggtgagaagagggaggcactgagggcatgaaakgtaacgtggccatggacttgcagaggaccagtgagtgggagagggatatttcttccctccctgatttgatcccatcactgatgggcatagtgggccatgggtgactgtttccctgacagcatgcctgggaactggggcrttctgaactgccatttgggaccctcttctgttctacatagagtagaggaagtgtttcttcgggccagcttggagagttggaacaagtgtctgccaactgggtaatttgaagggttctcaggagactcacaagtccccaaccaaagagaaaaacactttctctatcatcttgtccaaatgcaggtcttttcagcattagtgatttatagagatgattttcaaagtctcatgagtccataagaggttccatgaaattgcacatggcattggyatgcacacaggtgaagctgtcacctgctaaggcattagtttggctggygacatgtgacagtgagaccctgaagcttggaggtgccaggtcaggaggcmgtcaagtggcttgagagttcatgtgcagccaggactaatagccaggcctttcacttttcagtcaaagggggcagtggctggacccagtggccttcagtcagaagatcaaagggcatgtggcattggaagagagaacatgccaggcaaggtgatctcttccagtctgaggttttatttgatagcttaaggactcagagttagtcaaaatgcaatgtctgaaggcacccttcyttctgacaccagttgcagatttgaaggtgtttcttaagcccccactcaggtttgataattcactacaaagacttacgtaactcactgataactgttattgcacgattgtggtttatcacagggaaagaacacagattaaaatcagcctaaggaagagacacacagggcagagtctgggagggtttcaggtgtgaagcttcgttgtcctcaggacgctgtgttctcctgtgtgaatgtgggacaaaacacatggggtgttgccaaccagagaagctcacccagttaaggaaaaattcctgtgaatcacattagatcaggaagcctttattcaggattgttgttacaggggagggagactgagcccagctcccaatatagtaaagacagagggggagtcacagccaacaccagggtgaggagtgggagatggaccagttctgactggagacaccagaatggggggtttctgctaaactggcctaacaagctgctcaactaaaggcaggtaaggagcgggtgaagaccgtgatcagacagcaagaatgctcagacagcaagtggggaggaccctccctaactgccttgggggattcttgctgaactggggcagtacaggcccagcaagcacgggatgggcatggaaggtcagcgcctagaggagaaaaggctcagagcagcctgactggagtttggccaaggagaaagtctttctcaacctatgcctcaatgtacagagctctttctggggctggatcacaagctgtcctgatggctgacatggagtccccagcccctccctgaggtctaacacccttagttcccagttcctttggaaggcagaaaagatacgtaatagccccaaaacccatcacccataacattgctatactgtgctgtagccaaaccaccagggaaacaaagatgttcctaccaggcaggacattccagggccccagagatcccttcccagggcccaaagacaaaagaacgacctctcttctaataaagttaatccttcactgttctatgatcctctgaatgaaggtctttttgctccgaacccacttctctttgttcatctacaaaatttcccctctccacacactattggagggatgatgttgacctctcttgcttgaggagccatctttatcgaatacctaccactaaagagcatctgaagatgactttaagttttttattcccatacagaataagtactgtggcatatctatgatatacaaaacatgtttaaccttggaaaaattattttaaatttttccatttaaaatttaaagctttatttccatttgactcatagtaatagctctgtgatttatgtagaacagatcttattgagctgattttacagataagtaagctgcctttcttaatcatctgtcctttattggtacagggatgaggcagatgctctctacgaagctctgaagaagcttagaacatatgcagctattgaggacgaatatgtgcagcagaaagatgagcagtttagggaatggtttttgaaagagtttccccaagtcaagaggaagatccaggagtccatagaaaagcttcgtgcccttgcaaatggtattgaagaggtccacagaggctgcaccatctccaaygtggtgtccagctccactggcgctgcctctggcatcatgtcccttgctggtcttgttttggcaccatttacagcagggacgagtctggcccttactgcagctggggtagggctgggagcagcgtctgctrtgactgggatcaccaccagcatcgtggagcactcatayacatcatcagcagaagctgaagccagcaggctgactgcaaccagcattgaccgmttgaaggtatttaaggaagttatgcgtgacatcacacccaacttactttcccttcttaataattattacgaagccacacaaaccattgggagtgaaatccgtgccatcaggcaagccagagccagggcccgactccctgtgaccacctggcgaatctcagctggaagtggwggtcaagcagagagaacgattgcaggcaccacccgggcagtgagcagaggagcccggatcctgagtgcgaccacttcaggcatcttccttgcactggatgtggtcaaccttgtatacgagtcaaagcacttgcatgagggggcaaagtctgcatctgctgaggagctgaggcggcaggctcaggagctggaggagaatctaatggagctcactcagatctatcagcgtctgaatccatgccatacccactgaccccagaccagtgcagccagcaggggaggtgagccatacacaggccacgacaaaatgcaggcattttattagggggataaagagggcaaggtaaagtttatggagctgagtgttagtgactttggcatttctgtagctgagcacagcaggggaggggttaatgcagatggcaagtgcaccaaggagaaggcaggaatgctggagcctggaataagggargagaggggactggagagtgtggggaataggaagaagaaatttcctttagactaacgaatatattggggggaggaatagaggggaggtgtgcaggaaccagcaatgagaaggccaggaaaagaaagagctgaaaatgcagaaagccgaagagttagaacttttggatacagcagaagaaacagcggctccactaccgacctgcccccggttcgatgtccttccaagaatgaagtctttccctggtgatggtcccctgccctgtctttccagcatccactctgtcttgtcctcctggaagtgtatctcagtcagccagtggcttcttgatgatggcggtggaggtggtggttgtagtgtgatggatcccctttaggttatttaggggtatatgtcccctgcttgaaccctgaaggccaggtaatgagccatggccattgtccccagctgaggaccaggtgtctctaaaaacccaaacatcctggagagtatgcgagaacctaccaagaaaaacagtctcattactcatatacagcaggcaaagagacagaaaattaactgaaaagcagtttagagactgggggaggccggatctctagagccatcctgctgagtgccctgtgtgtaagtcctaataaactcacctactcaccaagctggacttattcgagtcattccttggtctcctggctcctttctcgctttgggagcaagttcctgtctgaagtttttgtctgaacagtggtaaaggtgatggtgatgatgtcagcagacagcaggaggacttgacaaatgtcagccctgcttggggccaggatacactgagggaacgatgacattccaatgaaactccaaattctgtattggaaaagtcattgatttgtgaagaaaaataaaaggaggctgggcacggtggctcaggcctgtaatcctggcactttgggaggccgaggcgggtggatcacctgaggtcagtagttggagaccagccaggacaacacagtgaaaccccttctctactaaaaatacaaaaattagctgggcatggtggtgggtgcctgtaatcttagctactaaggaggctgaggcaggcggattgcttgaactcaagaggaggaggttgcagtgagccgagatggcgccaatgcactccagtctgggagacagagcgagactccatcccccgcgtcccccccccaaaaaaaaacaaggaagagaaaagcaaaaccagatgccaggaaccaatcaaggaactttgtggtgcattgaggagatgaaccagcctgcagtcaagagaccccgcctctctgagcctcagtttcctcatcagctgggaaagaggggctggacaagatgatatctcaggtccacctggctctctcctcttgtgttctggagatctgggttcaagcaacactgatctatgcctgtgcctttgtggtgctgatggatgggctcccctgggctctcggtgcctgacttcacttcctcatgatccttcttccagggactcagggagctaggcctccatggccccttctgcttgttcttctggtcggtcatttctgggcgaccccagtgcccagtggcctgtgaggcactcagggaaagcttgtagacatctggcttggcccaagtgcaggcatggtccccatctagcagccagggcccacgaatgacatgggtcacacaaggctgactaaaatcagaggggcctgtgtgtaggttgagagaaagtccatgagaaatagaggaacagagagagatagccagacagcaaacaccctcatccagtctgcaaacaccctcatccagtctgcaaacaccctcatccagtcagccctctcatttcacccagactcctgcaaaagcttccagaatggtcttccctgttatacagcccttgccactatccctgcccatcctccacactgggccaatttgccccgtaagaacatagatttcttcaagcccatgcttccatgtcttcaatggcttcctattactcttagcacaaaagcccagagccttcatgctgtctaatgtaggctgctgtggcctgagttcccctgaagggagagccctaggcaaggctcccaggcagaggatttgtttgggaagtgattctaggagcaggactggggtactgggaggagtgacacagagaaggacagaaggctgatgccgggagaaattcttgatagggtcacccatgtgggcgactggagacctcctgaggagtcttcaaggagcgtcttcagaatgttcctctacagggaggagagagggaggcctgtaaccactgctcctgtcccccatggccttgccccagtggacattaattatctgtatttccatgcatagaatatagaactgctgggcgcctcagctggagcccagagcaggggcaagagatacagaatgcacaaaatcaccccagaacctctcctaagtcactcgtaaagtgcacccagggcctacttagtccttttttatgtagcatcctgcagaacacttgcctcagtccctgtaactctccatcagccaaggcttccctgaccttcagttgattcatctatttcttcctgaagaagtcaacagagcaacggccaccgacttgcctaacgccagaacattgtgtttcatttgtttgtcaattgttcatcaattcctggataattcccattcttttcatacatttcacttaagctttgaatgtttctggcactgagtaatttacttcttcagtgatccagccagcatttgccctgacacttagagttgaaatgccatcaggctacctgcatttgatgcaattccactgtactgctagtattgtttaaaaatttttcaattgcaagcaacagaaacagaaactatctgtcttaaacaaaatagaagattcattggatgaaaactagagcaggtcagaggatggaaggaagaacaaaatctacagaatttggaaggacaggagcagaccattaccaacatcaggaatatatggtttgccctttcagggctctgcctgcacctggcttagctccacacactttgattcctagtgtctctgattaaagtttcacatactcagtagacagaatagcttgggttagtgactcttcttgaactaatcagtgaggctatggtatcaggaatggggatgggtaacagagacacaaaccctaatgggaagcctctggccaaacagccacctgaatttgtgctcattgtatacagtcaatcgcttgctactgcacacacactcttcttctcatacaaacaaaaagaactctccttatctgctatgaacccagccatcccaaggaaaaaggcaaatgcacttgcctcttccccagtgagagccacacacagcatctccaccttctgcatgctgaagttatgtcacaggaggagggcctcagcacacgatcaatttttcttttggtccattggcagcttctgtctcagaatttttgtgtgtgtatatttgtagaaaataaagaggtacggtcaaggctacagccactactgaccattgctgccaccatcagaagtcttgaattgttccactcaatgttcctcttacttatgggcaaagtcattctcgtggtgtctaagctccttgatggtctggcctcagtaagttggtgaaatttcctattcacatttacactaatactctaacactttagagtattacaaggagcaatcctaggggatccctcaattcctcctgtcctgctgtgtaataacaacatgagcttccctggaggaacatgatgcatgattatatccaacccagtgacgtcattgctatccctacatcagggagcatgagaagccagctatggtttctgctgaaacaacttttgtcaaccttagatactgaaacttccagacctaaaagtctgtgagttaggagtatgtatcataaacaaaatttttgaaagtggtttattgtgggtaaccatagagctatcaccctcatcttaacctctgactgcccagctccatgaattctggctattacaggaaatggggaaaattctgggtatggattcaaaacatatcacatcctaagggcagctcccagcctctgatatggagctgagtcccctttgggccatttccatgggacctaaggctgtcatttccggggttgagattcactgggtgccaagtggtcagccttgatgagtggggtccgtgttgtgtggttacatagagctccacattaggcaagttggttaatgagcccattctgaaaatgtcaggctgcctggggaacagaggagatttgagccttaaagagtgacttcttcccttgtttattaacagcctctgagccaggcatggtgactcacgcctgtaatcccagcacattgggagaccaaggcgagtggatcagttgaagtcaggagttggagaccagcctggtcaacatggtgaaaccctatttctactagaaatacaaaaactagccaccagacatggtgacgggtgcctgtaatcccagctactttggaggctgaggcacgagaattgcttgaacctgggaggcagaggttgcagtgagccgagattgcaccactgcactccagcctgggcgatacagtgagacccagtctcaaaaaaaaaaaaaaaggagtcttttttgatggtggacatcttccaatgagcattcacatgggacagatttttttttacttctaccgttgttctgaaagctctatgtatgttcctcttccctaaaaatctttgtcaccaagcctccagatttattccttctaaaatgttgaaattccagctaattccttagttgttacccaggaaacaatgcagatcctggtccgaggatgcagctccttccaggcagcctggactgtgaggtgtgctccattgctcttcaggaaccgtccttgagaggcgttccacagcaggccagacctggggggagcaggtgggccaggcggaaagcacagcacaatttgagagatgctgagtactcatgactctgtgtaagcacctgaattcagccctcatggtcttttctgagctgtcagtcatttatctctatttagtcattttgcgaattggagttagcttccttccctctacactcaaagacggcatgtcaacattttaggcctctgggtggaatgaactcccagtttcctgggagggagctgattggcatctattcgcctcttcctagttttgtggggtttcccagcatgtggagtcatagagaaagactggtcccaccttctatgtaatgcccaagagaatagatgactctctgtccacccccaccctggcatccagggcttctggacaagacctaggctggctaattggctgcttccacatgggatcctgaatctggagcaagtgaggcaaagcccagggtgcttagaatccattctcagtgagagcagcaggactgcccgggaggggaatagagacggggacgaccgagtcctgcaccagcagagatgacgtccgcaggtggcagggcagcgctgtggccgtgtcactcctcacaaagcagggctcttgtgctcgcagccttcgataccgtctcactgtcttggcttctatttatcttccaagccaatttccagcctcctacacacgtggggttcttctggtatcattccagtgaatttcatgttgttttctgccctaagaaaacagagttggtacctctgctcgaccaagaagcctgattgatacagactgagagctgcaggctgtgtttatttgcttcattaacaagaacaacttaggaatggcaacttccattgatgagcttcctactttgttctgcggttggaaaacaaacagttgtttccctgttgacgactggccacactggagaggtgaacaggtgagtcacaggaatcactgcttctgctccctttaaatcttgatgatggcagaaatctctgtaactgcctctgtaactcctccatgaagttggtgttgactttgagtaaaatatttaggcaggtatgtaaaaccaatggcctccactggcgtatgtcactgaaatagtccccgtccgtgggtctgggtgaacaatctgaagcttccaagagtattctttccagttatccacccaggaatttgaaaaatgatgaccaggtgagggtgggaccctgatggacttaatcaaaggtaaacgaatatagatattcactaattacttgtgccctataatctccccctctgacccaggcctaagaattgggtgacaagcagggactatccagcctgatgacctgtgacaggtatccactcaccagattgggggttttgtaaagtcagtggactgtcttccagctctattttggaaccttgttcctatcaaatgtcccttgagccatgatcatgcgccctcctggtgcgtgacctggcgcccgcactctcttttcttctggcagttacctgcctcccctacagtcggcctcttggaatttctcccaccctaaagagaccagagtcccagcccctcccctattatagagagttcctggttatccattgactcttctcgttaaaggagcgggaaatcttttgggccctggcaggaaacagtgtgggcaggaagtgcttgagaaatcaaatctagcatttcagcctcctacacacttt

SEQ ID NO: 5702 - DNA, 86361 bp, Homo sapiens
  misc_feature (1)...(86361): n = A,T,C or G, or insertion/deletion polymorphism (see Tables 1-2)
gcagcaaagggaagccaagccttagagaagcctcatggaagggcccagaacatcctgcacccatcagttactcggaagtaaggggacaagaagcagctggaagagagctgggtgtgggggctgggaggagtgctggagaaatttccccatcagaaggcccctcactgggcagtggaggcagggcagtgtggtgggactgactcaacagacatagtttcatctccaccctgcccttctcaggttgtgtgaccccagccacatggacacccgagtctgtgaactaaagggctggtccatggcattaacagtggagggtgtccaggttcttgatgtcttgaacaaagaattgggcaaaatgcacaaagcaaggaaggaatgaagggttttactgagaatgaaagtatactccacagcatgggagagggcctgagcatagggactcaaggggcccgttacagaatttttgggagtaaatacccactagaggattccattggttacttgaggtacaccctatgtaaatggaaaggatgaagtaaatttacaaattcatttacagcatataccctatggggaggatattccctgttatagctgaagcgtgaattggccttatgttccctgcctccagaccctattttcctgcatcaacgggaaagggtcagattcactggctcagctgtttaacctgtcctggtgccagcagctggagctgggtgtcaggaccagcccgcaagctcttccctgccggaaggaccaggccagtcgctgtccttttcatgctagagagtggttgtggttgctgacttagcagagaaggtgcttggctttccccttaactggagaaaaaactttctaagaaccaggcctggttggcagcagacctagctttcttggggtggcagggaggctaaagcatacctcaggacagtcagtggtgggtccagcttcggctggaggttctttctactgaataacttctacgggctctgtcattagcaggatttgtataatttgaagcagagctgggcaactgcagagcaatggggaagccagcccagtgtggtggcaagacctgggcaacttgggaccagcctgggctgtctcttgccagctgttgttatcagaaccaggctcttcacactcagatccttgggccccccatctcagaatgcccagtggttgaaaggatgaaacctggaatttaagtgacttctcagtgatgtgtgcccttctctgacggttccttgttcatcccatgtatttactgactgcctgctatatatgcagagccaaagagtggggcctggtcttgaactatctcctcatctgccccttctggcacctccttcctcctgggctctttcctctaataccgtcatcctctctccaacctggttaatcctgtcctttctgccctcaaatgggcaccttcaaagaaacaaatagaactactccactcgctccctctctccctccctttactgccactattgattgttatagtcacttgctccaggaagtccacttgctgagtcttactgcagacagagcccaccccctgagctgtaaaggccctagggcacatgtttgtccagctgcctcttgcagctgggattgttaggtcactatagcgctaccaactgcatataccactgtgggagtcgtgctggtggcggtagtggtcacaggtaccaggggcagcagtgaaggggtggctctaatgccaagtccagtgaccagtgccagggtgcccagtggtggcaacagtggtgttttcagtgtgatcttggacattgctcctgtctactcagctgctagtctgtgagctccctgatatcctttaagacagcgttttccagcagcggcactattaacgtttggggctaggtaatcgttgggggtgtgagtgtgaagagggctgtcctgtgtgttgtaggctattttagcagcatcccggcctctccctgccaggtgcctgtagcagtcccccagttacgacaaccaaaaatgtgtccagacattgccagatgtccactgggagggaaaacctctctggtccacagcccttctccttattccagtcccacatcttcctccccttccccatcactgtcctcagagagatgctgttgacagctccttgaggtgattctctcaggcttgttgttgtagttctctgctgtcaagtctgagctgactctctcttccggattcttctttcctcacctgcccccgtttgcatgaagttttttatggagctgtttctattttctttttgggcagccatactctctaagacctaaaagctgaatactcgcccggttactacctgataattctcatcgcttatgtttccaaaaccaaactggttatttccctctctaaccccatctctgtgtcaaacagtggagtacatgcttttggttaatccaattggaaggcttcctagaggaagtaatatctgaactgaatcctgaaagattaggggaagaggaagaaaaggacaggtgctgtgggaaaaaggggaaagtgtcagaggaagtaaatgaaaaaccatatacaaaattatcttctgtgacccgtagcacatgcccaatccatggtagatatcgaaacatagtggttacccagtctaatccatcccttttctttctttctttcttttttttctttttttttgagacaagtctcactttgttgcctgcctggagtgcagtggtgcgatctcggctcactgcaacccccgcctcccgggttcaagtgattcttctgcctcagcctcctgagtagctaggactacaggtgcttgccaccatgaccagctaatttttgtattttcagtagagatgggtttcaccatattggccaggatggtctcgatctcttgacttcgtgatctgcctgcctcggcctcctaaagtgctgggattacaggcgtaagcaaccgtgcccggctgtccatctcttttcagatgaagagctcaggttctgaggagtgacttgtcaaaagctgttctacctctcagagccagcccttgtcctcctgctagccagagcaaggtaccacctggaagagatgttcagttacatgggatccagggccagagggaaaatatcagtgcttcctgaggttcgggtccagccacccttcttccaccatttctactgagccttcagttgtaccccttcagtccacttggcgaggcatcacgccctctgggcaggctcagtggggaactatgggagcaggtgctgtgtgccacctctggagggggtcactgaggttctgggttgtggggggtgccctgggccagagtgagttgtatgggagttgttgctgaatccccccagagtaccagtcacacaccagtgtgaggggccttgcaagagccactgggcagcacagttgaaggtggcaccttcctgctcagtgctgtgtccagagcagggtttagttttctgtgtctttcagggtgagactggtgtattctataccagcctccctgtgtgtgaacaatgacgagaacaatgttgtcttgctttcccaaaaaataagacactatctatttctcattagttatacacgttcattataaaacgtaatttaagcaatactgaaatgccaaaaagaaagtaaaattcactccaaaagtaaaattcaccccaaatctcactactcctgtaactatgtctgacagccagctgttgggtcttccatcgtttttaaccttcaggtgagcacacagatccttattttttcttttcttttctttcttttttttttttttttgagacgcagtctcctgttgcccaggctggagtgcaatggtgcgatctctgctcaccgtaacttctgcctcccgggttcaagcaagtctcctgcctcagcttcctgagtagctgggattacaggcatgcaccatcacgcctggctaatttttgtatttttagtagagacggggtttcaccaagctggccaagctggtctcgaactcccgacctcaggcaatccgcccacctcagcctcccaaagtgctgggattacaggcgtgagccaccttgcccggactctctttgtattttttctttcttttttttgagacagagtcttgctctgtctcccaggctggagtgcagcgacatgatctcagctcactgcagcctctatctcccaggttccggcagttctcctaccggttagctgggattacaggcatgcgccaccacacccggctaatttttgtatttttagtagagacggggtttcaccatgttggtcaggctggtctccaactcctgacctcaaatgatctgcacacctcggcctcctaaagtgctggaattaccggtgtgagccaccgcgcctggccagatccttattttttcaattgcaatacagcagtatgcaaggcacttactgtatgccaaagcttatgccgagagctggctgccagcagctcctcctgcctcgaggcctttgtccatgtcatcatttcccctttggctgtaacagctgcagttctctcataattttaggtttcatcttaaatgtcacttcttcagaggcttcttgacagcacaagtcagggcccttgttagtttcatcacatccattacctttccttgatcacttgtaccatcatctgtaatttatttttatgtttaatacgggtgtgggatttctgattttttttttgctagactggaagctctcagagggcaggaaccatttgtttccctgccacagagatgttcaataaatattgtcaattgaatgtgcaaataatctcacttaaccacagctatgagggatgctattttatccccattttagagatgactaaactgaggcttagaacaattaacccaaggtcacagtgaattagtggatccatgtgtctgcctccacacagcctgtgtgttcttaattattgatcactaagcaacagctgcctctcacaaactggcaggaaacttcaacttttcccttttatcaatatattgtgaacgccttttcttgctaataaatatacatttgtgtgcgtaatttttaatgatcccatggtattccatcgtgtggatgtaatttacatattcatttccttattctcacttcttcctagttacagcacttctttaagcacttgtaatttttattcctttggataaattcctagaagtttacaacacgaccagctgcaagatggggcagtgaggtgcttgaagsagtgggtgggctgcacttcagaatcccggtggaactttttcaaaaaactcgtgcccggggcccccctctcaggaggccgtcggtgggcctgggcactggcgtggttttcaggtcctcagtggttccgaggtgccagagattgaggaccactggagtaagcgcgaggtcacggcgggtgcaaagcagaagacgtaaaatcctgaccgccctgggacaatctgcaaccttgtcaagcctccgtgcccgcctttgtaaggaggctgggagaagcgggacttggatgacccggactcccgtcccgagcgctggggtccaggtttgactccgctggctttctcaggcgggcagggcgggggtaggcagctgggaagatgacgtaatgtgctcccagccaggcctggaggcggccagcggtcgcaggtggagggtggcctgttaacccttcactcccaggccagtggacggacttgcgtgtggcgcagatccaacggagaaggcagcggctcctttaaacaaggcggagaaggttaagatgatgaccggacggctactccaggcattcgctccgaggccgcggggggagggacctcactatgcaaatctgagctgctgatcgatgacgcgccatcaccccacgcaccgcttcgctcgcccattggctgagatgagcctggtcccattgacaacaaacaggggggcgcgcggcctggaggcggggccgcagggggcgcgggctggggcgggggaatcccgccccgccctttctgtgcggcgcccgggcgcaacgcaaacatggcggcgggtggcacccgtcggtgaggcggtgccgggcgggggttgtcgggtgtcatgggcggtggcgacggcaccgcccccgcgtctccctgagcgggacggcagggggggcttctgcgctgagccgggcgatggacgacagcggcgagctgggtggtctggagaccatggagaccctcacggagctgggcgacgagctgaccctgggagacatcgacggtgagtggtgggtgggtgggagtgcgggggccgcgcggggaggaaggggttacggcggcgcgcccgggtgcgcgtgcgcccaccccccgacagccccggttcgcgcgggaagaaccccgtgcgcacggtgcccccggcggtcctcaacccttccggcgctgcgagcgtgagcccgacccagctgcgccgctccgggaggccgtgggatctggggcgccgcggggccgaaagcggcgcgagggtcgcgggttccagagcgcggggctagggacgtcgcgggggcgtctcagggagcggcctaaggagagcgcgtggccgccgcctccctcgcgcgcccacacgcggtttccgtggtccgctctcccgccgcccgcgaccgcgcgtcgcacctgtcactcccttcctggccgcggggacgtctttgggattcccggggcccagcccccagtctccgcgccccgaatccctgggcttctcaggattgaccgacggccaggtcgccgggtgctccgcgaaactttgggcagcgactgcagaagcaagttgctgatgaagagagcagtggcggcggagtgtggacacatctctccgggatggagacccgggcgctcctgctgtcacgctgcaaggggaattgagcagaagaaattttgagttgtggcccctcgggtacgggctggggagcgggtggcctttgttccagcgccttaacagcggagtggaagagctggtaggagcccagggatccactcttaaaatactaattttgcgaccacgggaacaacgatttggagagggtcagcggcttgctcaaggtcacccagctggttagagcctagttcttgcagttccttggccagtattggtttttttatacccctcctttcaagaaagagtccagttgactaggctagtaatcttattaactggatagttgcactcttatgtttaggccccaaaatgctttgtattatttcacttcttcctmaacaatcctgtgagatactcttattacctctattttaatacggtaattaaagaagccgaggccaggagatgttgacttatctaaggccactcaccttagagagcttaggcagaaacacaggtgcattgtacttttcagttttcagaatgctttcatgtccaggatctcactacagccttgcaggcatgtatgatggctacatccccgttgtgcagatgaagaagcagaagcagcagaagattctcttttgggggaagagataaatgcagcagctaattgaaaaggatctgtttgccattttcccattttgcttttgtaatatttctccccttggtttgtccttgatttccattttggtcatgtgggcagtgtgataagacccttaattgaagccccagttctaaccacagactctttgctaagtgcttctaaatacagaaatgggttaacaaatgggggatggggtaggtgggggttgggaacatagcaagggcagctaacatgttttgagaacttctgtgccagacggtgttaaacagttatacacgttaatgttctcaatcttcctaacaaccctgtcaggtagagagaactgttatacttgtcatctccctctcactgatcctgaaagtgaggcccagggtggttcattaatttactgaagattacacagccagtagaaagtactgtatgtctatagctgcctacctgcaagggcacagaaagaaattcatgtgcattttgcattcctattccatgatcaattcctatttgtcttattttgtttatctgatttttaaatttaaatttttatttatttagttattttttgagacagggtctcattctgtcacccaggctggaatgcagtggcacaatcacagctcactgcagccttgaccttctgggctcaagcaatcctcccacctcagccgggaggctgggaccacagaacgcatgccaccacacccagcaaattttttgaattttgtagagatgaggtctcactatgttgccaggcacaaactcttaggctcaaatgatcctcctgccttggcctcccaaagtgctaggattacaggtgtgagccacctaaattttttttttttttttttgagatggagtttcgctattgttgcccaggctggagtgcaatggcgcgatctcggctcaccgcaacctccacctcccgagttcaggcgattctcctgtctcagcctcccgagtagctgggattacaggcatgcgccaccacgcccggctaattttgtatttttagtagagacagggtttctccatgttggtcgggctggtctccaactcccaacctcaggtgatccgcccaccttggcctcctaaagtgctgagattacaggcatgagccactgtacctggccgagccaccgtgcctggccgagccacctaattttttttagagacagtgtctggctgttgcccaggctggagtgcagtggcacaatcatagctcactgcagccttgaactcttgggcttaagcaatcctcccagctcagcttcccgagtagttaggactaaggcatgtgccaccacacctagctaatttatatatatatggtagagccagtctcactgtgttgcccaggctagtcttcaacttccaggcacatgcagtcctcctgtcttggcctcccaaagtgctgggattactggcatgagccactgtacccgaccctgtcttaatttgtaatgagtttaaattacctagtggttaatactgtctttatccccacagatttctgaataaaatggaaactaccaccctctggaaactaccacagtggttcagtggcttcataggtccattaggtttgatcccagtggaagaagattccatttctctgtccttccagaagacctggtttataacagtgcataaggctttttctcaaaatagttatataccgcacaaggaagaggtgtggctgttgtgtcacaggagacctaggggccaggtttgggaaaagtggttccatgtcttcagttgatcaacaagtattcaagtgctggctgtggtttctgagctgtaaggaatcrtgaaagatagcatagaattttatggcttcatggagcttgagatgagaaactctagtgccagtatggaacagcttaaaattgcacagcacaacaagtaaaagtcagcagtgagggtagcttggtaaaggctggcttagcaggaagaccacaccaaagaggtggctcttgacctgggccttggaggacaaaaagagttgggcatgctgaaggtcagtggtctgaagataaaattatcccttgattctcacccctgtgttcccattactgaatgttagctccttgaggyagagaccttcgtttcattcccactaaattctttgaacctagaacagtgcctggcacagtgagagtgcccattaaatatttgtggaatgcctgagtgatccagtgatcttgggctgggcaggatactaattgtcttggacatggtttggagttggattagatcaaggaaatagccagcctggatgcttctaggagccggtcaggtgaggaaggggagaggcaggcagggtgagtacatttacttcctttgtatgtgtatggtggggataaggggtggatgcaacctagagagcctccaggaggtgcaggcaggcaaggatccattcattccacaatgtctgctgtgttccagtccattggtacccttcaaggatatgggctcagggaggccacattcatttactcattgaatggcttctaagtattcatgatggacaaaggataacttgagcgcgacagatcatgtgtcttctctctcacgaagcttacattcttgatggaggaaatacaagttgagtaaaataaatgaacagtttaggcagggcactgtgagcaaaataaaattgggccatattatagagtgtgactgggctagcctacttagattcggaagtccagggaggcttcttggaagagaggtatcagtgtctgtttttcaagagatgccgaagtctggatttttatttgaaatacccagatttttggccgggcacagtggctcatgcctgtaatcccagcactttgggaggccgaggtgggcggatcacctgaggtcaggagttcaagaccagcctagccaatatggtgaaaccccatctctactaaaaatacaaaaattagccgggcatggtggtacacgcctatagtcccagcaacccaggaggcagagacaggagaatcacttgaacctgggaggcagaggttgcagtaagctgagatcatgccactgcactccagcctaggcaacagaatgagactccgtctaaaaaaaaaaaaaaaaaaaatgctggacacggtggctcacacctataatcccagcactttgggaggccgaggcgggtggatcacctgaggttgggagtttgagaccagcctgaccaacatggagaaaccccgtctctactaaaaatacaaaattagccgggcgtcgtggcacatgcctgtaatcccagctactcaggaggctaaggcaggagaattgcttgaacccgggaggcagaggttgcagtgagccgagatcgcgccattgcactccagcctgggcaacaagagcaagactctgtctcaaaaaaaaaaaaaaaagaaagaaagaaagaaatacccagatttttatatgttggctcatttaaaaaaaaagtactataggcacccaataaagcatgtgtgctagttgatctctggggtcttgtactactgcagaacgtcctgttgtcccaggcccccaggtttcccataatagagtaagtctaccatttcattttgtgttatatatctctattttgagaaagggcctcatgtgccattacacaccaggtcttctggaagggcagcaaggtgggatcctcttccactgggatcaggaaagaaacagtcatggaggtgacctttttgctgggtccaaatagatgggtggcaggagcagcctgacaagtatgtgggaggagttagaacaagctgcctttggaaatgaaagtttactagagatttcttggaatatagtgtgtgtgaggaaacagtagaagatgaggtctgagaggtgaggtggagctaaattgtactgtagatgcaaggtgttttatggaagatagggaattgttgaagattttcaagtagggggtgacatattaatcatgggtttttaagaaaattgaattgtgggctgggctcagtggctcatgcctgtaatcctagcattttggtaggccgaggagggtggatcacccgaggtcaggagttcgagaccagcttggccaacatggtgaaaccccatttctactaaagatgcaaaaattagccgggcatgatggtgggcacctgtaaccccagctacctgggaagctgaggcaggagaatcgcttgaacctgggaggcggaggttgcagtgaacccagattgtgccactgtactccagcctaggtgacagagcaagaccttgtctcaaaaaaataaaagagaaagaaaagaaaattgaacggtggtgataggcaaggaagattggaggcagggaggccaattaggaaactgtagccatccaggtgtgaggtgatgaagggtgacaaatttggatgggaagtggccctcattcaaatacctttccatggcactgacttgggcctctgcttgcttctccctgcagaaatccagtttgacagagtaccctgcagtacctggcactgactaggtgttctgtaaaggtgtgtctgatgaggaaaggaaagcacctcaagttcagtctgagtgttcacaccattgggaaggttggagtggccaactgggtgagcaaggagtgagtgttggggatgtgacaggacatgtcctcactgaaggcttgtccctgaaggcagagcagagggagaattctaagatcccattaagactttgagcctggagcactgggggagttaggagtcagcagaaagagctggttaggggaaatgatgaaaatttatcttaattgtgctgaaattggggtgcctgggggtcatccattaggaaatgagatgtagatacttaggagaaggtaaaactgggatggagattgaagagagtcactgytgagtcaagaggagagaactgggagattagaggttaggaaagtgttagcttttcaaggagtagtctgtagatggtggagacaatgccacagagaacaacaaggatgacaaggccatgcaaggagtcgtgggacttggtattaggaggccaaaccttgccagaacagtcagatgagggaatccaaggcagaaaggaagcaggggtgagtgggagatgggcaggtggaagcaagtagttctctttggagaaagtagaataattttttcaatgagctgatctactttctgtcttgatgagtttgcctgttctggacaactcataaatggaatcagacaggtagcataatattgcttaggttcatcatgttgcagtgtagtgttccattgcatggacacaccgcattctgttttatctactcttcagttggtggacatttgggccgtttccactctggctacattatgaatgaagctgctacaaacttgtgtacaagttgctgtgtggacatatatgttcatttctcttgggtagatcttctacattttttgttgtttatgttttccaagagcttataataaatagtcccatttattcacatgcttagtttctttttttttttttttttttttgagacggagtctcactctgtcgcccaggctgaagtgcagtggcgcggtctcagctcactgcagcctctgcctcctgggttcaggcagttctctgcctcagcctcccaagtagctgggattataggcacccacctccacacccagctaattttttgtatttttagtagagacggggtttcaccatcttggccaggctggtcttgaactcctgwccttgtgatccacccgactcggtctcccaaagtgctgggattacagacgtgagccaccgcgcccggcccacatgcttagtttctatgttcctgtaactaatttgccctaaatcttgtgacagaaacttgcaatgtggtggtcaattcctttctttcctgtcccatctgatggctatggtttaggtctgctctcccttcacttatcttgggacaacccctaaccatcacccttgggggcaatgttgaagctcttctttcccagttcttgatttttactcacttattttagtggagcacatcctccagtggcttcctgagaaagagtacatttaggtaactcttcgaggccttgcctgtctaaaaacatctttctaccaacctcattccactttggtagtttggctgagtttagaattttaggttggacagagttttatgtcagaattttgaaggcattgtctgattatcttcttgcttctagtagagaaatctgatgccatttccattcttgatcctttgtgtgacctgttttcttctctggaagcttttgggatcctgtctttatgttctgaattccatgacaacgtgccttgatgtgactgggccgacagtcactgtcccaacttgttggggctctggagagctgtgtctgatacctgaattcatgcagtccccctgccatcagcctccttgtcacctgagcctgcagaggaacttccagtacctgagcctttccatggcactgatttgggcctctgcttgcttctctctgcagacacccagtttcatctttggcagagtatcctgcatgcagtacctggcactgaataggcactctgtaaaggtgtgtctaatgagggaaggaaagcacctcaagttcagtctgggtgttcacaccattgggaaagttggagtggccaactggctgagctaggagtgagtgttggggatggttgtggtcagcacacccctaggaggtggaggtgggagaagagtggaaactgacttcacatttctccagggagggatgctttggaaaaactgctcagtgagatgaagcacagatctgcttttcatcccttttgtacctttttaaagacataaggtatgttttgacactggagtatatatgagggttgctaacgtttgggttgaaagagctgctgttgtccacagcttatttattttccacccatttttgtctcctggtctcatccagttacatttcctgggatatgtttttggaggttgctcagatcacggcactagagtccctttgggtttctcctccctcctctgtctatttggcctcgcccttgacaaacattccccacattcacacccaggcctttggcctaatgttcttgaatgytgcttgcctctcattgaataggcttttatgtagctctcatattcagttcatattttggcattttaaaaaatatatatttttgcttctttctcaactagatcatttcactcctcaaatttgtaattaaaaaaaggaaattctcaagcagttttattcaattagaactttgcaaatatcaaattgtccgtatccttctggattctygtctgaacattgcttatctgcgtacatatcacagtgttttcacatagggattgctgtatgttgaagtagttgaggtgtaatagccatataatctaatgtgatccatctgaataggcaaacccttgcacacctgtgtacctgttgaacattttcatcatttgcagttttttcttaacataagcactgttctgaatacttgtgaacaagtcacttgggagtttgttcatgggcgtgtatcttccaaagaggagtcttcamgttcagctgggtaacacactatcagctgtagccctttcattttaaaaacatttccagtgctgcaaattactatggtgattgggaattacaacttggaaatatttttatttttttaaaagatagtacattcatatgaatcaaaataaaatacataaaaaggtactatgaaaagtcttgctcccggccctacccactatctgcgtagtcccaccgctccctcacaagtaattaaatttttagtttcttttacctgcttcaaaatgtatttgttattacaaaagaagctaataacaaatattgattttagtttttgctttgctttcctttttgactgaaaaagttagcatgctataagccctgttcttctgtgccttgccttttcctttctgcttaccaatgtatcttatagatcatcccagactttttcactgctgcatggttttccatttgatgatgccctgtaatttattcatccagtccttttttgatggacatctgaaggtattttcagtcttctgctattaaaaacaatgctgcgaatagctttgtaaattcttcctttcacacatgtgcaagtctagaggcaggagcggttaccagaagtgggattgttggatcaaagccagggtggtgctgtctccgacatagttgtcgcaagaatccagttaggtaaaacataagaggggctggtcacagtggctcatgcctataatcccagcacttggggaggccgagccgggtgaatcatggggtcaggagatcaagaccatcctggctaacatggtgaaaccctgtctcgactaaaaaatacaaaaaattagccgggcgtggtggcatgagcctgtaatcccagctacgtgggaggctgaggcaggagaatcgcttgaatccaggaggtggaggttgcagtgagctgaaatcgcaccactgtattctagctgggacaccagagcgagacgtccgtctcaaaaaaaaaaaaaagattataatggagctattgccataccatctaggtgtgtgtaagtatactctgtgatgtttgcacaatgaagcagttgcctaatgacacatttctcagaatgaatcctgttgtcaagtgacacatgactttatttgataatgaatacaagaccatttcatcttgatcccagatagatacattgagatgcattgatgttctctaagtgaacgtgactcatcctgttctttattagttattgactgtttccgtagtcacctctactttttgatcgttcaccaggttttgaaatcactgtgtaggcagcacccactatgcagttcaaaactttatgtaggcctsttttgtactgggctccaggttcagtgctggcaaataaacaagttccttgttctcacagaatgtgtatggccttgggtgccaggcaccgttccatgccttaacctacattcgtctcataatacgtttttgcatgcaatcttttcttcaattctgtggtatgctgcaggtgaagaaactgaggcatagatcacgtagcttgtaagtgatggaacagtggcctaaatccaacatgtgcaactttagaacccatgtatttttcctctgtcccatgccctgtctgatgtaagcaggcttctaagttgcaaataccaggtggtgtggtgtgctttgaagctatttattcaacatgtgtttatcaagaagtgtctgtccaggcgcagtrgctcatacctgtrrtcctagcactttgggaggccaagatgagaggatcccttgagcccaggagtttgagactagcctgggcaacatacctggacaayatagtgagaccccatttctgtaaaaaaaaaaaaaatacaaaaattagccaggcttggtggcaccagcctgtagtcccaactacttgggaggctgaggtgggaggatcactygagcctaagaggctgaagatacagtgagtcaagatcacaccactgcacttcagcctcgtcaacagagcgagaccctgtctcaaaaaaaaaaaaatacatacacacacacacacacacacacacacacacaygtatatgtatatatattttttaaattaagaaaaaatgtctgctctatgctggacacttaaagtgacttcccctgggtcctagggtactttctgagccttaatttcctctgtaaggtgggggttgggtaccttagctcacttagttcttgcagcacctatgatgtagctaaggtacaaaaaaggaagaggacaggacctaacctcttttggctctatttaaaaatgaatgaggaactgaatgaacttcagtttgcacattgatgtaggactaggggacctgtttttagaatatgtttggaaatgtttattttttccttttgaaatggcttttgtaggtgtggtagtgggacacagaggagcagtcacagagtgtggtgcaagtgaccacaaaattaagggttaaactttgttgacatgatggaattttttagagtagcagaatcccagagcctgtgccttaaggtaaggctccctggggaactttgtttagaaatgaatcctaaactatcgaagggcttgcaaactagaaaatttctgcatatctcaggccttgagaattgctaatggatatgtatctaaatgtcccttacaagcttgctcctccacgtggccctgtggaacaggtctgttgggttcaggatctagtttggaacagtgatgaaatttcgagctgctgaaccagatatggaactgctttgctaacctggtgtctgcccagcttaagcccyctccatcccacagctgtgaaaggaaatcatgcttcttcccaagtgctaacattcctgtgaggccttacactttacccaagtcctcctgatacatttgtcttcctaataagtgctataaaattgaggcttgatttccacccccaccccccacccccacaagagtcctgctctgtcgcccaggctagggtgcagtggcacgatctctgctcactgcgacctctgcctcctgggttcaagcaattctcctgtctcctgtaatcccgagtagctgggattacaggtgtgtgccactatgccaggctaatttttgtatttttagtaaagatgaggtttcaacatgttggccatgctggtcttgaactccttacctcgtgatccacctgccttggcctcccaaagtgctgcgattacaggtgtgagccactgcgcctgcccatggcttgatttttatgcccattttccatggacatagatgaaggcactgagacagagaaattagatgatttgccaatgcttcctatgctgatgacggggaatgaacttggattttctgatgtgggattccatattcttcrctgtcctatgaaaatgaggtgggagatgccttgattcaggaagcctgtctgtctaggagccccttctctggtcaaaagttgtttttaaaaaatccttgctgcatttcaacgtgaatgagtatccactgtattcatagcacagtgctagaagctgttagagttgaatgaaatggcctctgctttcagggagctaacatgtaaacatccagtcataatacatgggaaaatacaacagaggctataacagaggaacaactctaaatctttggaggactgaggaagggaattagaaaaatcttcacaaggactttggcatttgggctgaattgtgaagggtgagtaaataggattttagaaggtaaaggagcaggcatggtgtttatttagatagatttagacaaagttgggaataatttggcatgctctaggaatatgtgtgtcagagtactgcataggacagaggttctcaaacttgaatgtgtctatgaactcccagggtatacccccaaagatctgaatgtggaaggtctgggatgttgtccaacaggaacacctaactagtggagggggcaggatcagaggagccttctcagggataagctgaggtcttaaagggtggaaggagagagcagctgtgttccaggctgagtgaacagccattttgaagggcttgaccagtgctggtgctcgagtgtctgggttttgtgtagaccacactcttgataactgtgctgttcgttatcttccacaaacagggttttggtcaggtgcctccttgcttcagtgtgttctttatcagtcaggattcttggtgataagcagcagaaaccgcttctatctagcttgaacagaaaaggatttgttagaagggtggttcttggagtgactagaaaagctggagagccaatttggaaaatgggccagaaccaaggaggctcctgcttagtactcctccgccttcatgatctgtatattgtctctgctttcctgggtcattccctcaagggtcgcactcctggtgggaggatgcattaatcagagctgactggcaggaaaccttccctcacatgaggactgcccaatggggattctccaaaggaagatcagggtgctaatgggagggtcgggtctgatgatggacaaatggaacaaaagtggcaaatgcccaccatgtattctgtgcctttccttgcctctgaaataaaagcagtttctgccgccaaatatacatggtagcattaagtcaggcctttcacaggcagctccatctctccattttgcaccgtgctgtctctacttcagcagctggcaggacatttcctgatactgtggttttgctcaaactatttcctttgcctggaatacccttccctctctctaatttataaacccttttcatccgttaagctcggttttcactgcctgccaggatggatcagtcctttctctgctctctgacagccctttctttgtgaggcacttgtctgttcttgcccttgtcgcagtttatggagttggttaggtttctctttcttctctgtgagcatgggagatgggaagaaaacgaatacttttcagtctttgccctgtgcggagttccacacaaggcacataggatcctccagctcccagcccagagtacatagygtatgcaaatttgagtggatgtttgtatttgtagcgtgatttgataacctgctttgcaagtattctttttctctttagttttagggagatttgggggcatggtaatggatggaagggtaagatggtgggatgttggggtctttcatttttgcctgaatggtttaagggctgaaaaaggttgagatctcttgctttgtagactctgcccccaggaggaggacagttcaggtgaagtggcttgtgcctgattttgttggcagtgggtcacctgaaatgtgaaatgtgagggcctccttttgcagaacagggtcatgcaggatcagttccttggagtctcactctgcatctcactcaattttgtagtctcctgctaaaagagagtgaaagagggaacagtatgatgccagggcagcagcaggtgaagagctgggagatacaggaaagacctgggatgacacatccttctctgtctgagcttggggcattcactctactcattcgtgaatgaagcacttactgagcacctgtccagtgtcaggctgtctttggtgatatccgtatgatgatagaaccaaagcatctgcattatgtggtagctaagagcttgactttaaatcccagctccaccacctgctgactgggtgacattagacaagttacttagcctctgagtgcctcattttccttacctgtaaagtggagatgataatggcatctacctcaaagtgtcattgagattaaacgaaatttgtgtaaagtgtttaattgctgatacatagtaagagctcagcaaatgttaattcctgtactttttaaaaatcattactactaatttgctcagtttttcttcttgattgttgttctcaaagtctgtttcttttatttattttcattattattattattwtttttttttttgagacggagtctcgctctgtcgcccaggctggagtgcagtggcgcaaactcggctcagtgcaagctccgcctcccgggttcatggcattctcctgcctcagcttcccgagtagctgggactacaggcgcccgccaccacgcccagctaatttttttttgtatttttatttatttattattattatactttgagttttagggtacatgtgcacaatgtgcaggttagttacatatgtatacatgtgcagtgctggtgcgctgtacccactaactcgtcatctagcattaggtatatctcccaatgctatccctccctcctccccctgtatttttttagtagagacggagtttcaccgtgttagccaggatgatctcaatctcctgacctcatgatccgcccaccgtggcctcccaaagtgctgggattacaggcgtgagccaccgcgcctggccttcaaagtctgtttttaatagagcagtcatttaaaaataataagtgggataagagagacagcctttcaaacatgggatgacaagaatctgatgtctgtgttttagcattaggcaaggattggagtccctggctgcagcaagggtggggctcttgcatgggtcgggactctggttgattgcagcatcgtagagcctaactgctgggaggtggggcaaccccagcgagaaactcctaggaggaagcacctccctgtggtggttggggcaacttgtggagcagggtgcttgagaaaagagcacagggcttagaggaaggagtaaggctcctatctctgtctgctactcgctccccacctgcctgagatggtgtgcaggtcaccccctctttggacttggacttttcttcctgtgtaaaaaccaccaccaagaccgcttttcaagcacttactgccaggcactcactatcccaggtgatttacatatattaactcacttaaaacagtgcttgaaatggctacctcacagggtgattttgaagattatataacacagtgtgtgaaagtagaagtgttaaaaggaaaaataagggagccacagtgttaatgaagttattttccagtaaaaaaaatcatgtttaaactttgtatatgaatatatacatacgtatatatacactgaagtaaatagtactgaaaacagcaacaacagctttttaagcaacattccagcaggttcctcttgtaccatgtatccctttttatcctaacactttgcatgcagtcctggcagatttattatttatttatttatttatttattttttggagatggggtctcactgtgttgcccaggctggagtgcaatggcgcgatctcagctactgcaaactctgccttccagattcaagcgattctcctgcctcagcctcccaagtagctgggattacaggtgcttgccgccacgcccggctaacttttgtatttttagagaaatggggtttcaccatgttaccaggccaggctggtcttgaactcctgacttcaggtgatcctcccgccttagcctcccaaagtgctgggattacaggtgtgagccaccgcacccgccccaacagatgtttttacagaggttttctaccataacatgtgcctcttgaaggcatttatttttgtatctggcacatagtaggatctcagttaatgtttcttgaatgcgtgtcttaagggatgtatcttttattaaaatgtatacttaaaaagagagagattgttctagaaaacagcatcttgtcaaggcatatggtctcatttgaagaataatttaataatttggataggaaggtatacttgtaaaatacagccagtcaaaaataycttttccccattccccttgatgcgtccattacatacatgttcaccctgagattgatcttccatcagcattgaaatgaacattgaaagtaataagatgggccgggcttggtgactcacgcctgtaatcccagcactttgggaggcggaggtgggtggatcacgaggtcaggagatcgagaccatcctgactaacatggtgaaaccccgtctctgttaaaaaaatacaaaaaattagccgggcgtagtggcacacacctgtagtcccagctactcgggaggctgaggcgagagaatcgctttaacctgggaggcggagtttgcagtgagccgagattaccccactgcactctagcctgggtgacagagtgagactccgtctcaaaagaaaaaaagaaagtaatgagatggggctgggcgccgtggcttacgcctgtaatcccagcactttgggaggccgaggcaggtggatcacaagggcaggagatcaagaccatcctggctaacatggtgaaaccctgtctctactaaaaataccaaaaattagccaggtgtggtggcgggcacctgtagtcccagctactcaggagggtgaggcaggagaatcacttcagaaccagggaggcggaggttgcagtgagccgagatggtgccactgcactccagcctggcaacagagcgagactccatctcaaaaaaaaaaaaaaagtaatgacatgattacctaagtgcccctccacacagccccaaatctcctttgttgtcactccgagtctgtcttacagcttttccccaagttgtgatgagcataaatgtaaaatccaagaaatgtttattttgtaaggggaaaaaagtgtgggtagaggagagactcagacaaacctaaatatagatataaattcaaatctcagttcagccactttgtagcttatgtagggggctttggcaaattatctaatttctttgaatcttagattcctcacttttttctttcttttttttgagatagcctctgtcccctgggctggagtacagtggagagatcttggctcactgcaacctctgcctccagggttcaagtgattctcctgcctcagcctcccgagtagctcggattacaggtgcccaccaccacgcccagctaatttttgtatttttggtagagatggggtttcaccatgttggccaggctggtcttgaactcctgacctcaagtgatccgcccacctcggcctcccaaagtgctgggattacaggcgtgagccaccaagcccggccagtttcctcacttttaaaacataataatattggtctcagggttgatataacgtactaagtgggtatcagtggtagctacttttatgttgtcctcatggaggacatgaatgaatttaatttcagtaatattaccttctgtactggtaatatttattctgtaaataaaatataaatatgctttctacccagaaaataagtttattagctttgtcacttcattggttttgttcttaaatatcaatagtgcaaccactggcttttattcaaaggtttaattggaatctaacctggggattttcccctttttaaatttatrtttaaaaaaaaaaactatggaaagtcggcatggtctgggctgcttgggagcctgaggcaggaggatcacttgagtccaggaatttgagactctcctgggcaacatagtaaggccctgcttcttttagtctttttgtttgtttgtttgtttttttgagatgaagtcttgctcttgtcccccagtctggagtgcaatggcgcgatctcgcctcactgcaacctccacctcccgggttcaagcgattctcctgcctcagccttccaagtagctgggattacaggtgcgtaccaccacgcccagctgattttttgtattttaagtagagagagggtttcaccctgttggccaggctgatcttgaactcctgactgcaggtgatccacccgcctcggcctcccaaagtgctggtattacaggcatgagccaccgcacccagccaataaggccttgcttctaaagacactttaaaaaaaaaacaaagcggccgggcgcggtggctcacgcctgtaatcccagcactttgtggggccaaggggggtggatcacaaggtcaggagatcaagaccatcctggctaacacggtgaaaccccgtctctactaaaaaatacgaaaaattagccgggcatggtagcggatgcctgtagtctcagctacttgggaggctgaggcaggagaatggtgtgaacccgggaggtggagcttgcagtgagcagagattgtgccactgcactccagcctgggcgatagagagagactccatctcaaacaaacaaacaaacaaaaggcaaacctatggggacctggcctgggagtgaaggagggagggaggcagggagggaggaaggaaaaaaccagaaaaaaaaagtgaaaaaattaaatacattttattatgtgcttgatgtatttttctgtgtattgatatatatccatcagtttggattattcccatatttacaattaagtaactgagtctcaaggaaattaattaatttttcaaagatagcacagtgattacattattggagtcacagccacttctctttgaatttaatcgtgacatctccattcagtttggccttgcaaaacgggccttggtttagctttttgacatcttgcctttctccttaaatctgatcccttgtcactctttttttatttttttgttttttcctctcctgactttcatctgaaaccctgaaccctacaggccatgggagatgacctgtttcccagttttggtcactttttgggccatatttataaccaaaactcttatttaaccagttttcagaaaattctcagcttcttcatcaattgatgaagttatctgactgactttttattccagccattctcatactctcagaatgattttttttttttttttttttttttttttggggtagatggagttttgctctttttgctctttttgcctaggctggagtgcagtggcacagtctcagctcactgcaccctccacctcctgggttcargtgattcttctgcctcagcctcccaagtagctgcaggcatgtgccaccatgcccagctaatttttttatttttagtagagacggggtttcaccatgttggccaggcttgtctcgaactcctgacctcaagtgatccacccgccttggcgtcccaaagtgctgggattacaggcatgagccactgtgcccggccagtgattcttaattagttcatgatattttggagttctaggcaggacagcagcctctgcctcctcaaccccatgtaaaccagaatgagcaactgctgggctggaggagctctccttcttagagcattgtgggacaacttgctatgagttctccttcattttttcatttcaccaccatgagttgtagggccctttgtgctttggcccctaacaacttgcccagtatggtgccctgcccatcacccattgtcttcaacaacctatcatgcagctccatgtctccctgccttggctcttgaggttccctggcctagactgtactttgcatcctgatcagccttcaatccaactccttcagggaactattgacttgctggattctgtgattttgtcatgttccctgtgtctctttggtgtcttgcagatgcacatctctgctgtgacaatcttcacaaaccatattgtgatcctttcactaactctttgaggtcaaggactaatttattatctctgtgcctggtacacagtggatgcttaacccgttgaaatccttctgtatttacatacttacctccctaaaagtgaaagctttgcagaaattacatagatctgtccagattttccaggctagtctaacttttaaaaatatcttattccattatgaggtgaaacatcccttctagtttctggttcagaaagcatgatcggtcaggtgcagtggctcacgcctgtaatcccagcactttgggaggccgcggcaggtggatcacaaggtcaggagatcaagaccatcctggctaacacggtgaaaccccgtctctactaaaaatacaaaaaattagctgggcgtggtggcgggcgcctgtagtcccagctactcgggaggctgaggcaggagaatggcgtgaacccgggaggcggagcttgcagtgagctgagatcacgccactgcactccatcctgggcgacagagcgagactccatctcaaaaaaaaaaaaaaaagaagaaagcatgatcaccatttttataagttgcatgaaagttgctattgagagcatttcagtgagtcagtgccagtttttttgttgttgttgttttgtgttttgtgtttttttgtttttgtttttgttttgagatggcgtttcactcttgccacccaggctggagtgcagtggcgcgatctcgactcactgcaacccctgcctcccaggttcaagtgataactgcctcagccttccgagtagctgggattacaggcacccacccccacactcagataatttttatatttttagtagagatggggtttcaccatgttggccaggctagtctcgaactcctgacctcaggtgatccacccgcctcggcctcccaaagtgctgagattgcaggggtgaaccaccatgcccggcctggcttttgttttttaataccagtatgcttggtgcttgaagcggtacagggaaaggaacattttctccatgcactcatagaacacaagacataagaaaaacatctttaagatttatttatttagaatccgggggtggtggctcattcctataatcccagcactttgggaggctgaggcgggcagatcacttgaggccaggagttcaagaccagcctggccaacatggtgaaacccggtctcaactgaaaatacaaaaattagccgggtttggtggtacgtgcctgtaatgccagctactcaggagcctgaggcttgagaattgcttgaacgtgggaggcggaggtggagccagaggctgcagtgagctgagatcacaccactgcactccagcctgggcgacagagtgagactctgtctcaaaaaataataaaataaaatttatttatttagtgaccttgtctcactttgttgcctaggccgaccttgaattcctaggttcaagcgatcctcccatcttagcctcccgtgtagctggaccaacaggcatgtgcagcattaaaaaaaaaaaaaaaacttactatgtgtaatatagcaaagttttttaaaagttaaaaacatagccttgaactaaaacatcatgagcacatgtcagaaatttattaacattgttaatgaagataacaggatgacaaatggatcaaaggagactgcaagaaactgatatttacatagaaaaaagaatgcaggaataagattgcaaatttaaatacaaaactagggccagattccgtggttcatgcctgtaatctcaggactttgggagactgaggcgagtggatcacttgaggtcaggagctgaagaccagcctagccaacatggttaaattaaacttcgtctactaaaaatacaaaaattagctgggtgtggtggcgggcacctgtagtcccagctacttgggagactgaggcgggagaattgaaactgggaagtggaggttgcagtgagccaagattgtgccactgcactccagcctgggtgacagagcgagactctggctcaaaaaaaacgcaaaactagttaatgtcctacagtgcaatgaaaacaaaagcttaaaggttttcttttctaccagacagaaatgattttaacttaacaattttctgcaggctaacatctaactttacagaatgggagccttaatcggtagtaaatagaaagtcaaacaaggtgatggttccatagagcatcagataacttttaggcaggcagcttagacagtgctgtagtatamctttttttttttttttttgagtcaggggtcttgctctgttgttccaggcttkagtacagtggtacagtcgtggctcactgcagccttgaactctggcctcaagtgatcctcccacctcagcctcccaagtagctgggactacaggcatgtgccacgaggcctgaccaagtttttttattttttagagagatggggtctcactattttgtccaggctggaatgcagtagcatgatcatgcctcactgcagcctcaaactcctggccttaagtgatcctcctgccttagcctcctgagtaactggaattttagtataactttaaagaggcatataacgtttttttttggtcttatttccaagttttagttaatttttctttcctgttttcttgagacatggtcttggtctgtcacccaggttggagtacagtggcacaaactctgctcactgcaaccttcacctcccaggcttaagcaatcctcccacctcagcctgccgagtagctgggcctacaggtgcgtgccaccatgccccctgctaaagtttgtattttttgtagagatggagtctcgctatgttgcccaagctggtctcaaactcctgaacttgagcgatctggccacctcagcctctcaaagtgctgggattacaggcatgtgccaccacacctggccaataattttctttaacaaaataaatcacaattgagttcaagaactaaaagatgactagatcatctgaggtggaaaagagtccctggtaaaagtaattttaaatagttttgaagtagaattgtgaaattcagagtttggagaaaggaagagggtggtsacaagtagaaaagagaagacatggcacttacattcaaagaaagattgccctaccccacccctcaaaggcatgtgcagaagagggagtgagtacttttccagggtggatgatgaactaaagtgggtgggaagtgaaaacctttggaacagaagggagcagttcataggaagcttggaagcttgtgttaaagaatttgatttgattaagggccgggcacggannnnnnnnnnnnnnnnnnnnatttgattaagggccgggcacggtggcttatgcctataatcccagcactttgggaggctgaggcaggtggatcacctaaggtcaggagttcaagaccagcctggccaacacgaagtctctactaaaaatacaaaaattagctgggcgtggtggcaggcggctgtaatcccggctacatgggaggctgagacaggagagttgcttgaacctgggagacagaagttgcagtgagctgagatcatgccactgcactccagcctgggcaacagagcaagactctgtctcaaaaaaaaaaaaaaaagaatttgatttgatttaaaaggctgttggatgaacaagatactcaaagaagatgttcgtcactgggtaggaggctatggttgaaattaaggcagagtgtggacgggagtgaagaggtaaatccatgatgctaaggaaggagacttgagtgaacttaaggcaggaggaaaaagaaagagcaatggaaagtggagctgcagatccctctcctgttcaaactatgagagctggctcaggtcccctgctatagtgggccagaaaagcctggacttccactgctttttcctgcagagctgagtccctccagggctgccatgagaggcggggagagagagcactagacagagaagaccagaagaccatttgagaattcctttgggtttccttcatgattcctttttcttctcattctgaattgttttattttattatgtaatattcggtatatgcaaaggaatatatgacacctttgtgtgtattacaaaacaagcatttgagaatccgcacctctccacccaatttttctttgtggtttctttgccagtaaaagagttcactcatctgttgcttaaaatataggatgcttgagtcaccagcttgccatcctgtgtcattcaacacctcctccagactcttcgcagraaggtgacccagaaaccccttgaaggacatgatacygtccctgtgctctgatgtgccccctggtgtttgagtggagtgatttttagatagcggtttgcctgttaaaaccttccctttgttccctatattattgcttgcattttagggcttctcagttgaaggatgtggttgaaagagcccagttcctcagctgctcctctgggtgactagagtgtgggtaactgatgttttaggtcctggagaaagcagtgatgatcacaaatagtagaatggagaaatggttatctcatattgatcttcaggtttgttactagtctacatttggttttttaaataattattagaaaaaaacattgtgggtggggagataggatcattatgatgaaacagttctgtacattcaatcaggatacttgttgggaattagattttgcatttacctccctcactggtgtggtccatctcattttcagtggcctacacacatcacacaccattattatttccatgttcttgtacttgttgggcagctctaatatgaaagataaaatgaacgaaaagtacaaatgaagaaagtttaggtgactattcctctgatcttgaggatgarggtttttcttaagcgttacacagaagccatgtaatttcactatacaatgtaaaaatggtgtatagtcagttctgctatagttcatcatgtgcatttctaaaaatcatgccatgcgaaatcatgcagtaaaaaacacggagtgggcatgttggctcatgcttgtaatcaggaggctaaggtgggaggatcgcatgaggcagggagttcaagaccagcctgggcaacaaagcaagacccagtctctcttacaaataaaaaataaaaattatctggacatggtggtgtgtgcctgtactcccagctacccaagaggctgcagtggaggatcccttaagcccaggaggtagaggccacagtgagctatgatcacatcactgcactccagcctgggtgacagagtaagaccctgtctctaaaacagaaacccagaacttactgtgaaatggagggttaaggatcacaacaataaaaaatctcataggtgaccaaaaaaaggaaaagatttattttttaaaaaagatagggacctgccgggcacagtggctcacacctgtaatcccagcactttggaaggctgaggcgggtggatcacgaggtcaggggttcgagaccagcctgaccaacatggtgaaaccccgtctctactgggcktggtggcgggcgcctgtaatcccagctactcaggaggctgaggcaggagaagtgcttgaacccaggaggtggaggttgcagtgagccgagatcccgccactgcactccagcctgggcgacagagcaagactccgtctcaaaaaaaaaaaaaaaagtggggggacctaataaaacagtcacacagttttatagaccagaaaaactaagaaatatataaataccacaatgaaaaggcactttggcttgaaaaacacctgaggtttgcttgtgggaagtaagtgtcattaggttacagcttgggagttatcaggaagtggtggaaggagggctgtctgaagtccaatggaaagttctgacatcaatgtgatgaatgtgattcataacacatgcagtgacctgatgaagctggtagatgtttaaggtgcctgtgtatgtgtgtgcacattttgtgcattcctgcatggctcatttcagccgaatatggttttctgcacttcctagtgtttttctcatgcataagcaaatgcaaaatttatrttatgctcagattgtttctggatgtatctgatgcatttgaacaaattcacattttcaaagtaagagttaaagcaaaagtgtcaaaaaaaaaaaacccactatgaataatgtgtactagctaatactaagtgccaggcatggtgccatagattccacatgagttatctcatcaatccgtgagttagctgtaattgttagccacaatgtacagttgagaaaaactgcagctgaaagaggtaaaacttgccccaggttccaaggctaggatatggtgattctttttttttttttttttttttttttttttgagacggagtctcgctctgtcacccaggctggagtgcagtggcgcaatctcggtgcaagctccgcctcccaggttctcgccattctcctgcctcaaccgcccaagtagctgggactacaggcgcccgccaccacgcccagctaattttttatatttttagtagagacggggtttcaccgtgttagccaggatggtctcgatctcctgacctcatgatccgcccgcctcggcctcccaaagtgctgggattacaggygtgagccaccgcgccaggccgacatggtgattcttaattgctatgtcattctttttttctgaacatattaaaagagaaataacaaagtgggggaagtacttgcagacatttaagaagaataagtatctataatatctggaagttttttaaatcagtgaaaaaaaaaaaaagacaaaatagcctgatagcaaaaatggacgaaggtcaagagcaggcggtttacaaaggaagaaatgcaaatgctcaataaaattgggactttagaaaaaaaaaagactttcagcctcagttagtactcagtcatgcaagacaaaacaattccatgttggttttttccactatcagattgacagaaatggctgtgaggaaacactagcaggagcatagatttttgaaacctttccaaagcatgtatagtggtcctttgacccagccatctaacttctaggaatttatcctaagaaaatagagaagtgggggaacaaaagagttgttaataatgccgaataacttgctgggtgtggtggcacacgcctgtaatcccagcactttgggaggccaagtcaagaggatcgcttgagcccaggagtttgagaccagcttagacaacatagggagactctgtctccacaaaaaaaagatttctttaaagttagccaggtttggtgatgcatgcttgtagtcccagctactcaggagtctgaggtgggaggattgcttaagcacaggaggtagaggctgcattgagccccaccactgccttccagcctgggcaagagagcaagaccctgtctcaaaaaaataaaaaaaaaagataaggctgaaaaatttaaagcaatttttcatcattaagttaaacaaattttaatacactggtacagtacaatggcacacagaatgataccgtgggactctgaaaaggatgatgttacgtctgtaatggttgacactgaatgttcttcatatttattaaccaaagggaacagggtgcaaagtagcatgttcagtgtgatctcatttttgtaaaacaatttgcatgcatgtgcatgcttaagtgtgcaagcaagccttgtagaggaagaaatctggaagggcacacattaaaacattgacaatgggccgggcgctgtggctcacgcctgtaatcccagcactttgggaggccgaggcaggtggatcacaaggtcagcagttcgagacgagcctgtccattgtggtgaaaccccctctctactaaaaatacaaaaattagctgggcatggtggcacgcacctgtaatcccacctactcagtgggattacaccgggaggctgaggcaggagaattgcttgaacctgggatgtggaggttgtggtgagccaagatcatgccactgcactctagcctgggcaactgagtaagactccatttaaaaaaaaaaaaattgacaatggatgactcaagaatagtggaactgctggatgatttttatttttgttcttttcatttatatgctttctaaatttttctttagtgaatatattacttttatgattttaacaaattattaaaaacagggccaggcgcagtggctcacacctgtaatcctagcactttgagaggccgaggtaggcggatcatctgaggtcaggagttcgagaccagcctggccaacatggtgaaaccctgtctctactaaaaatacaaaaattagcagggcgtggtggtgtgtgcctgtagccccagctacttgggaggctgaggcagaagaatcacttgaacccaggaggtggaggttgcagtgagccgagattgcaccactgcacgcctgggcaacagagcgagactttgtctcaaaaaaaaaaaaaattattaaaaacattgtctaacacaaggtgcataataaatacaaaatataagaataaatgacctttgtaaactaggtttcccagcccctaatagggctgggtaacaaatacctrttaaaggattattgactgaatctgtaatttggagaaactgtaaccctatttggaggcttcacattctttattcttgaccagaattaatttaaccagatttcaggttacctcattctcaggtagatgctgaaggctgagctgagcaaagtgatatttatgttacctccaagccacaagctccataaagttcatgtgaactcagggtctctttgtgagtcatggggctgcttgcaatgcacggatgataacaggaacctctaattttggttatttgcttttagagaccagaacccagatacagtttcctggggcctcacctactttgttaagcaacttagctataagtttacaaagcagctaaaaacaggagcaggggagtgagatgagcttgagcgtgccagcctagctcgtgggaggcctgtctctggccctgagctttgtggcctgccgtaggaactggagcttcattttcaaagctccataaaactcgccttctcccgggcctcccttttctgagtttcatggctctctgtggaaatgacagcctgtgtaatcacagaatgtgaatgatcagagcagggaacagtgaggagccattaggacattcccatgggtgtagctcacagttacaaagcacaactacaccctggttctccaggcctcctctttcctggcaccgcagaccagatggggtcctggagaggctctgcgtgcccttctggagcttcccatcactcctttctgcagatgttcatcttaacagcccctctgtgccactcagcccagtacccggctgcccggctgactggagatggctccactggagctttttgtgtgtgggttgaaagggacttttttattttaatttaagtagtctcattccatctgcctacacactcttacgcttcgtgaactaagctttctgacctgtgtaggttacttcaccacaccagcccatatctttcccacaaaagggtttcaagagtacttgacaaaatgagatcagtgcacccacatgcctgtgtagtgggtgctctggaagtaccgcyaacattgacctgcataagggtctacccttcaccaagcacttcggataaattatcttattaatcctcagggcaaagaggccaagtgtgtattttcaaagcagccttttgtagtgaggaaaccaaggcttaaagagaagtatcttgcccacgctcacaccactgattaggtgggcctccagagactcacacctaggcctgactaccaccaaagcctgtgcgcatctatgaggccaccctggccttctgccctccttagctttccatggatggaaactgtcggccagtgtgtgatattcttctggctctgtgttacagccctctgtattgatttcttacagagttgggattttgggggaattctaaaaggttcaacaaattcttagatttctcttagtcattttcttaaagcattttataatcttgtacttggagtgtgtcagcactaaattatgttttgtttaaatgtactgaatttgaggacatttctcagtttaatcatgtcacggaattggaattggttagtacaagctgcaatatctgtagcaatctgcccatttctccctcgcacaaggctgagtgaggacagagcttagtgtcaagatgttggtaaataataccactatgtaggaatgtagtctggtgagatgctgtttttcccagcaggtttaactgactgaatacttaaggtgcccagattgaaatgcaaagctccagttatcccatatggagactacactagaaagccccagcagctttatttatttacatttatttatttatctatctatttatttatttattttttgggacggagtcttgctctgttccctaggctggagtacagtgacgcagtcatctcggcttactgcaacctctgcctcctgggttcaagcgattctcctgcctcagcctcccgagtagctgggattacaggcacccaccaccatgcctggctaatttttgtagtagacaggggttttcaccatgtttgtcaggctggtctcgaactcctgacttcaggtgatccacctgccttggcctcccaaagtgctgggattacaagcataagccaccacccctggcctatttacatttaattatgatttatttttcctatccttctgcaagcatatatatatatatatatatatatatatatatatatacacacacacacacacacacacaaaatatcaaaatatatatatatatgtatatatatatatatttttttttttttttgagactgagtctcgctctgttgcccaggctggagtgcagtggcacgatctctgctcactgcaagctctgcctcccgggttcactccattctcctgactcagcctcccgagtagcttggactacaggcgcccaccaccacgcccagctaattttttgtatttttagtagagacggggtttcaccgtgttagccaggatggtctcgatctcctgaccttgtgatccgcacgccttggcctcccaaagtgctgggattataggcgtgagtcaccgcgcccggcccaaaaaatctttgtgtttttttgtttgtttgttttgtgttcagagaagggatctggctaggtgccctggctcatgcctgtagtcccagcactttgggaggccaaaccgagaggttgcttttcaggagtttgagaccagcctgggcaacatggtgaaatctcgtctctacagaaaatacaaaaattagccgggcatggttggcgcacacctgtggtcccagctactcaggaggctgatgtggaaggatcgcttgagcctgggaggtggaggctgcagtgagctgaaattgcaacactgcactccaacctgggtgacagagcaataccctatctcaaaaaaaagagagasagagtctcgctgtgttgcccaggctgttctcaaactcctgacctcaagtgaccctcccaccttggcctcacaatgcactgggattacaggcatgagccaccacaaccggtctcagcagctttctgtttgtcagatatacaaatataccccaggctccaggcccccacatcccccaaaaaacacacacacacacacacacacagcatcagagacctgagaaggacatcttggtggaggtttgggggaatggagatggttccttttatttttttatagtggtggtgtggtggtttttgttgttttggtgtctaaatcagagcatcacatggccttgaaggtttggaaaggaggggccatagttcaagaacaagcagtagcttcttgggaacgtattggagagagaaaagagaaaagaatatggacaatgtagagaattgtaggtctgaaactatctgggacaaagctgaggctcctgacttctatagggaccagtcatatgaaaaagaagggagtcgtgagagatgatggggtagttgtgggttaagttgggttttggaaagcctttgggaagattgaccagggaagaggccctggaagtaggcttgagaccctttgggctgggaatttaagggtcccagctacttggaacatgatctagaaagggaagcgaggtctccaggtggacaaatccctttggacccaagactccttgcccagagaaaaggggcacaaccagacaagggctagcatgggccctgggaagcacggagttcagggtggggcaggcttgctgtgtcctggcctggcaacatacctgcactgtgttgtggtagaagaacacaaagctgggaggcagagaactggttctaatcctagctgtaccctgacaagctgtgtgaccttggccaagttactttcctctcctggacttcatatatggtttttccattctttgcatccctgaagctccatgacttaggggccatcaacttggttgtccctgagtgtttccaagaataccaacagtgcccagggttttactcagcttggagaggaggcctagagcctccctgtggtgaggaggaaagaggttagagcaagtttgggtctgcagtgctaggattagaggtggcctcacaagccaaaaccgctatactcacagccttaggacagtgactccctrctcgctgcctcagtgtttccagctgtaaaaaaggacccttggtaccttcgacagaacagcacccatctagtacaaaggtagttccttttatgatcaaaacaatcaggaaaaagagagaggctgggtgcggtggctcacacctgtaatcccagcactttgggaggctgaggtgggtggatcacctaaggtcaggagttcgagacccacctatcaatatggtgaaaccctgtctctactaaaattacaaaaattagccgggcatggtgccgtgcacctgtagtcccagctactcrggaggctgaggcgggagaatcgcttgaacccaggaggcagaggttgaagtaagacaagttcgcgccactgcactccatccagcgtgggcgatagaggaagactccgtctcaaaaagaaaaaagaaagaaaatgagagaaagggcctggaggtgagtgtgaggagggaaaagaacatcaaacagataaagtcctgtcctgttgtcctgggaccttgggcagccatcttggcccagatgatccccacaagaaagaggtaagggtttcctgacccatttctgccatggtcttaggaaagtcattgagttttcatgccttagtttcttaagcaagtttgaaagttcactttttggatagcaataaaattactccttttcttttgttcacagagatgctgcaatttgtcagtaatcaagtgggagagttccctgacttgttttcagaacagctgtgtagctcctttcctggcagtggtggtagtggtagcagcagcggcagcagtggcagcagcagcagcagcagcaatggcaggggcmgcagcagcggagctgtggacccttcagtgcaacggtcattcacccaggtcacattaccttccttctctccctcggcggcctccccacaggctccaactctgcaagtcaaggtttctcccacctcagttccmaccacacccagggcaactcctattcttcagccccgcccccagccccagcctcaacctcaaactcagctgcaacaacagacggtaatgatcacgccaacattcagcaccactccgcagacgaggatcatccagcagcctttgatataccagaatgcagctactagctttcaaggtgattcagaagttagaatggtagtggttggttggttccaatgtttatgtgccagtttgcagacactgtaaatatttctgtcgtcttcaggaatggcaggtatatcaatatggtcctgtctgaatgaggttctggtaactggcaataagaactggtacaggagcatgtcacattctgcagcttcaaataccttaatatctattgcgcctaattcaaaaatacttggttaaaaaatccagcaagcggccgggcgcggtggctcacgcctgtaatcccagcactttgggaggccaaggcgggcggatcacgaggtcaggagattgagaccatcctggctaactcagtgaaaccccatctctactaaaaaatagaaaaaattagccgggcatggtggcgggcgcctgtagtcccagctactcgggaggctgaggcaggagaatggcgtgaacccgggaggcagagcttgcagtgagcagagatcgtgccactgcactccagcctaggcaacagagcgagactcccatcttaaaaagaaaaaaaaaaatccagcaagcatagtagacacagggccattctgataactagtggtggagacttgaataaggcttgaaattggctaggcggcagccagatctcagctgccacagttgagaactattcattcagcaaacatctgagcatccactatggtgatgaatatgacttttaatataggtgcagcagcttcaagtagcaagcctcatgctgggcccttagtatgtgttgagggaatggatgactgaaaggggcctgttctttctgtgatgtgctgcatcccagtgccttttcatcatatttccctctgactctgtggggagcccagggtaagattagtattgctttgaatttcaaagaatcttatagttcttcaatggagttcaagaattgggacaggtgggggaatgtaaaggcaaaaagctgagacagtcctcccaaagtgcacttkccgtccagaaaggatggaagaaaatgaagccccagggagttgttgattctcaacatctgttaactcccttgctgggtgcagtcatttgctgattagcttccctttcccccaccctggcacccagagtaataaaacaatttgtactcgttccctcagaaattgatgcagcccttatgggatgttcttgttgtctaagccaccttgtaaatggctgtgcacatcatcttcagcagtaggtggggagttggaatcattatgagatactccatcctcaggtttctgctgcagctgcagtgacagaatgcattcctcatctctgtgccttctttctcctcttctcccaagtccttcagcctcaagtccaaagcctggtgacatcctcccaggtacagccggtcaccattcagcagcaggtgcagacagtacaggcccagcgggtgctgacacaaacggccaatggcacgctgcagacccttgccccggctacggtgcagacagttgctgcrccacaggtgcagcaggtcccggtaagtggctggaaaggattcagggaggcactggttggggctgttaactggtccttggttgaagatgtggtctacatactaagaaggaccaaccagagtgtacacaaagcagcttgtagggcgccaggatgcacctgtgagcagcgtatagtgacctggctgagtccatatctgtagatagacactggcactcaggaaaggctggtgcagtcacttacgtacacatgtaatgggcataaaactggaaagaaatgtgctaaattggtatttcccagataattttctttttcatagttttgtgttgtgtttttttgttgttgttgttgttttgagacggagtctcattctgttgcccaagctggagtggagtggtgtggtctcagctcactataacctccgcctcccgggttcaagcagttctgctgcttcagcctcccgagtagctgggactacaggcatgtgccaccacacccggctaatttttatatttttagtagagacgggatgttggccaggctggcttgaacttctgaccttgtgatccacccgcctcggcctcccaaagtgctgggattacagacgtgagccactgcccttggctttcatagttttctgttctccatattttctgctrtggatcctgaacatatattgggttggggggagggggggcatgtattattaatcttttttttaattttttttttttggagacagttttgctcttgttgcccaggttggagtgcagtggcgtgatcttggctccctgcaacccccgcctaccaggttcaagcgattctcctgcctcagcctcccaagtagctgggattacaagcacctgccactgcacctggctagttttttgtatttttagtagagatggggtttctccaggttggccaggctggttttgaactcctggcctcaaacagtgcatcgatctcggcctcccaaagtgctgagactacaggtgggagccactgtgcccagctgggggacgtgtattatttttataatcacaaaaaacgtctttatgttatatatcatcgtggactatatcctcttttttctttttttttttttgagagtcttgctctgtcgcccaggctggagtgcagtggcacgatctcggctcactgtgcaacctcagcctcctgggttcaagcaattctcctgcctcggcctcccgagtagctgggattccaggcacgcgccatcacgcccagctaatttttgtatttttagtagagacagggtttcaccatgttggttaggctggtctcaaactcctgacctcatgatccacctgccttggtctcccaaagtgctgggattacaagcatgagccaccacatctggcctatattttcttactaacaatttatcttaaaaaaatcaggtttattatttttgcttctcagccatgtgtctggctttcctgagtcttttctctcctctctgccatccaccctacccatctctgctctgctcctgctgggccactggcaccaccctcttgaaagtctttcaacctaaaaacccatgacctggctgagcaccatggctcacgcctgtaatctcagcactttgggaggctgaggcaggtggatttcttgaacccaaaagttcaggaccagcctgggcaacatggtgaaaccctgtctctacaaaaaaatacaaacaattagccaggcatggtggcacacacctgtagtcccagctactcaggaggctgaggcagcaggatcacttgagcccgggaggtcaaggctgcagtgagctgagattgcaccactgcactccagcctgggcaacagagagcaaccctgtctcagcaaaaaaaaaaaaaaaaaaaaaaagccaggaccctcattagctagcccctctttctccacctgaacccggtattcaggctgtacaaaatagccggcttttgaaatggcctctatgaaatttcctgttcatttttttattctcaatttcataaaaattatatcatttctcattctttcttggaaggtctatgcagtaagaaaggaatgcataacagaaggataatgctatcatccttttacttttcttccttcttcatccaggtcctggtccagcctcagatcatcaagacagattcccttgttttgaccacactgaagacagatggcagccctgttatggctgcggtccagaacccggccctcacygccctcaccacccctatccagacggctgcccttcaagtaccagtaagagctgccttctcccccaccctcctccctccccctttattcctggaggtgttagtcttcagagatgttaaatctctatatgctgagtaggtatgggagggtctatagcacaaatcagtcaaattgtaaatgtcacccctcttagttgtttttcgctcgaaaaagtattagcaatgtgtgttcgatgtgggagtactggagtctacaaggaggtagaaaagaatagcagaaggaccctctattcttggctaatagctccacacaagaccattcacctcttagatcctgctgatgacttctgaaggaccctagggccaccaggcagggaagggctccaaggtgaagaacatggaaggtaccccatccttcagttgtaggttcttagccactttcagcatcctatagcatgagaatctgatagagtaaatggtgattaaaatttagaagcactagctttattcataaaatccaagaactggaagcaactcaaatgtccatccacaggaaaataagcacattgtgatatattcatacaatgaaattatgcctagcaattaaaaaamagaactgctgacaggcayggtggctcacgcctgtaatctcagcactttgggaggccaagaggggtggatcacctgaggtcaggagtttgagaccagcctggccaacacggtgaaaccccatttctactaaaaatacaaaaattagctgggtatggtggtgcatggtgcatgcctgtaatcccagctactcaggaggctgaggcaggagaattgcttgaacctgagaggtggaagctgcagtgagccgagatcgcaccactgcactccagcctggatgacagaacgagactgactctcaaaaaaaaaaaaaaaagctactgatgcatgaaacaacatggggctgtccctcagaaatagtgtgtcaagccaccgggcgcagtggctcacacctgtaatcccagcactttgggaggccgaggtgggtagatcatgaggtcaggagatcgagaccatcctggctaccatggtgaaaccccgtctctgctaaaaatacaaaaaattagccgggcatggtggcgggcacctgtagtcctagctactcgggaggccgaggtaggagaatgtcgtgaacctgggaggtggagcttgcagtgagccaagattgcgccactgcactccagcccgggcgacagagcaaatctccrtctcaaaaaaaaaaaaaaagaaatagtgtgtcaagccaaaggagttcatgctaatgagtccatttatatgaagtttaaaaagaggcaaaatgaagctatggtgctggaattcagagcggtggtgacaaggaggggaggggcatgcggggactttctgagctggtagaaatgggctatatcttggtctgggtggttatatacattgtgtacatatgtaaaattcatcaagctataaacttaagatttgtggtttttattgtgcatgacgtacttattggcaactaatgaaattgggcacctttttatttatttattggctgattagatattgaggccattatttaagaaattaaactaaaattggtccaggcccagtggctcacgcctgtattcccagcattttgggaggctgaggtgggcagatcacctgaggtcagtagtttgagatcagcctggccaacatgatgaaatyccatctctactaaaaatacaaaaatgagccaggtgtggtggtgggtgcctgtattcccagctactcaggaggctgaggcaggagaatcacttgaaccaggggggtgcaggttgtagtaagctgtgatcacgccactgcactccagcttttgggcaacagagtgagactttgtctcaaaaaaaaaaacaaaaacaaaaaaacaggacgtggtggctcacgcctgtaatcccagcactttgggaggccaaggcgggtggatcacctgaggtcagcagtttgagaccagcctgaccaacatggagaaaccccgtctctactaaaaatacaaaattagccaggcatggtggcgcatgcctgtaatccaagctactcgggaggctgaggcagcagaatcacttgaagctgggaggcagagtttgtggtgagccgagatcacaccattgcattccagcctgggcaacaagagcgaaactccgtctcaaaaaaaataaaataaaataaaataaagttagaaaaaataagaggagaaaacagagatgaagaataaaaaggggagacctccatggttggcctatttacttaatcaaatggctcttattgagagtgtcacttctgcccttgagctttttgatggcaaaattgtataaagaaatgcagtaatttgcttaattgtcatttgagaggaaaaaatgtgtcatacactaggagaaagttttctctggtgccaactcgtggttcaccgtgtacaactttagaagtggttaacagtttgacagcaaagcagaaatcatatgacttgtttctggcataygtagatcaaaacttaaaacatatttagccatgttaatcctcttgtggtgtagtttatcagcagtgattcttgaagggaggtagtaaccaaggttcygtggctcctgagacttcttggggcctgatttgattaacccaggaagagtctcagacctcatgaagtactgccaggtctggcagcacttggccaaagcgggcaggtctgtgttgaggttgctttatgcagactaacaaagggatcattctgctgtgtacctgtccctattctagaccctggtgggcagcagtgggaccattctgaccacaatgcctgtaatgatggggcaagagaaagtgcccattaagcaggtacctgggggagtcaagcagcttgagccccccaaagaaggagaaaggcggacaacccataatatcattgagaaacgatatcgctcctccatcaatgacaaaatcatcgaattgaaagacctggtcatggggacagacgccaaggtgggtgccaagcaaaattgtgttttatgttccaccatctcccctctacctgtttttgcctcaggagcctagagaagtcccaggctcaaggtaagtgaatacaagaccgagttagaggtgcttttttattaaagcatcttggtgtcatgtcaagattataaaatattaaaaaacataagggactggtgagggttgataaggcagtgacccgctgagacctttgactcctttggctatgctctgcagtgatggggactccactgtcagaggcagagaaagatgcctgccactcagtagttccagatacaggactgtgtgtaccttggagtcagctgatggcatagttttagctgtgtttaggggttaccttttaaggaaaagaaagaaaaaagaggttgagtctttgaccagcaacacatagaggaaactgatgttccaaatgtttctggtgtttcagtgtatgtgtcttctagaaagtaggagattttatttttaaaacctatctatgtttaaaccctattttgaaagaaaatttcattttccttgcctacaaatctgaaagctgtacatcctaagtaaaaatctatgccttaagataactgtccaggctaggcactgtggcttacgcctgtaatcccagcactttgggaggctgaggcgggtggatcacgaggccaggagttmaagaccagcctggccaacatggtgaaaccccgtctctactaaaaatacaaaaaattagccgggcgtgctggcaggtgcctgtaatcccagctacttggaaggctgaggcaggagaattgtttgaacctgggaggcagaggttgcagtgatctgagatcgcgccattgcactccatcctgggcaacaagagtgaaactctgtcttggaaaaaagaaaaaaaaaaagataactgtccaacaatgctgtggttgtttttttcatttgttttcgttaaagtttgttatggtgctaggattattataagaagtgggaacaatagctaatatttattgagtgtcaactatttgccaggctcagggctaagccctttacactcattatctcatttagccctgctgcaagcctgtgattcacgcgctttcattatctctgtgctaatgaggaggaaagtgaggttctgaggtatggaataacttctcccgagtggcacagctaatcattgggaggaccagcatctgaacttggtttctcctctcacagagccatgctgtcatcccaagtgctagggctctgctcttttcacactgtagcctgcactggtctcactgtgttttcactcatcttcctacccagatgcacaagtctggcgttctgaggaaggccattgattacatcaaatacttgcagcaggtcaatcataaactgcgccaggagaacatggtgctgaagctggcaaatcaaaagaacagtaagtgtgctgagaaaaggcttgtcagccctggcccaggtggggctttgtaaaagcagatcattttcaccaggtggggttttctttgcagagcttctaaagggcatcgacctaggcagtctggtggacaatgaggtggacctgaagatcgaggactttaatcagaatgtccttctgatgtcccccccagcctctgactcagggtcccaggctggcttctctccctactccattgactctgagccaggaagccctctattggatgatgcaaaggtacagacttttgaaatctcctgatccctggaatctttcccatttcccctaagaagatagctgggaggtcacagttatgaggccaggccgcatgttaagagggcctagcctggagaaaaacaggaattctgtgaaattagccaggtcctggagaataaagaaagaaaaaactgactccggggggaaacagtccctcaggtttaactggtccttgccgataggccccgtcagagaggaatgagtgccagatccagaacgagaatgcagagtagctgttgtgggggcgttgggagctgctggaggcacctcattgcttcactctgcctttaatgggcctggcaagaccactttgggaggctgatcagttggtttaggatgaggctgcctctgggtcctcttttcagaaatgattacaatttgcagtctaacagataacattttacctatgggcctttaatcgtcaaagcccctggcaatggtagtttaatggaattacttaagagacgctctgagcctaatgatcttcctgggaacctgtagagaccactgggttttgtactgtattttgacttcggcagtttctgactctgaaagcacaaagttccctcctagtgtttgtttttgactaagctgtttattgtatcatatacttaattttactaaggaagctccatttttgaaatattcttataaatgtggttctgtttggcaacaacaggctgtttgacatataaattgaattagctgggcttctgagtcatcagaagaaaatcttaaatggttttaaaatattgaaaagaaatgacatgctatatacacattggggcgcaggggagatctggcttcagccctcctgctgtaaaatggagagtggggtgggtgtagacaatgatacagttttagaacaggtaaaatcctttagatagattcacactaaatacggtctttgatcaacttcattgaggtgtaatttaaatgcaataaaatatacctactttaaaagtacagtaccaagagttttaacataatgtacagtgctatgtaactgtcactgtaatcaagatatagaacatttccatcaccccaaaaagctcttttgtacacctttgcaggtagtttcccacacccctctccagcctcagacaatgactgattcattggtttcctgttactttagattcattttgcctgttctggaattatacagaaacagaatcatacagtgtgttctcttttgtggtagatttctattttaaaagaaaatctcttctacctttgttctttggaacatgtacttttctcagttagcaagcaggtgaatgtgccaatgtttgagcagcagttagtgaattataggcttctcagttcccatctggccttagtcctgagttaatcgacttgaatttaaacctcataaccatttctcaatatatatatatgtatttataaagtgctgtaaaaacctatgcagtatttattccaacctcgaggccttgttttgaaggtcaaagatgagccagactctcctcctgtggcgctgggcatggtagaccgctcacggattcttctgtgtgtcctcaccttcctgtgcctctcctttaaccccctgacttccctgctgcagtggggaggggcccacgactctgaccagcacccacactcaggctctggccgcagtgtcctgtcattcgagtcaggtaggtggaggccccttgccccacctgggcatggctrgaccactatggcaggagaaggaccctgtgtacaaacttcttggcttggctaccaggtcccaaagggcttttatagtgggcccccacctgcttgcttctgatagggactggcataagttccattttagaagtaacaaggcaagcccaagttcagtcagaatgagcaaaacaaatcagggacccacactactctaaataccctggggtggaggggtggtacctatttgaaggaggatatcgtgttttttatctgaggttgcaaaaccaatgcctcaaccctttcaaaacaaagatttttatggcactcagctccataatgagaagggctacagtcattagccctgtttagattatagaattatttgccctttcttctgaaaatgaggtagaagactctttcctgtgatagtgctggggtctgtcaggtgcctggctgctccgcaaggcctttcctagcagactctgctgagacgctccttcttaggttctgggggctggtttgactggatgatgcctactcttctcttatggctggtaaatggtgtgattgtcctgagcgtctttgtgaagctkctggttcatggggagccagtgatccggccacactcgcgctcctcggtcaccttctggaggcaccggaaacaggcagatctggatctcgccagagtgagttctgtgtccgcccttccccatcctcccccagacttgacaaataattcagcaactcgtgtcaaagaaagtcctatgatagatgcttgtggtgagaggaaaaagggaccctgctgctgaatagtcacagggcagtggagtgggcgcctctgcatarataattaattccagggacatgagatgatctatgtctccggtatgacaggaataatgaagttgagttctgagggaggggttctagggcttgagcggggctgccaagagtaggaaggaagggcagaggtggcagaaggaccttccaacccgaacacatgaatggacaggctgtttggagactggcaggttccagggtgtgttgagtgtaggttatgtcagagagagttgaaggcaaaggctggtagtgtgtctaggcccaaattggagagggctttcactaggaactgatttggggctttattcccaattctctatagaaccaggaaaggtttttgagcaggaaaactagctgaaagttttcatttgaaatcaacagggagtttacggaaaaaaatctggggcaactcacagcattgaggaagagttaaacatccacatttcaagaggaacaagaaccagaacactcctcagcagcagtgagccatgggcctgccctccccacctctgcaagctgcagggccattagtgagaatctgattggccatcctggatctgtcagccttgctggggctatgggtctcagaatatagatgtgattttgagaggcctgttccttgagtataacatcccaagatgtatatcctagaggcaggttcaggtgtgtgttttacaagcatcattatggtggctgtgaaggataggtaggagggagatgtgaaatgcatggaacatggcaacaagttagggtgctcttttttaagtaaagacaaggtctcactgtgttgcctggctggtcctgaactcctaggctcaagtgatcctctcaccttgacgtcccaaagtgttaggattacaggcatgagccaccacgcctggctgagtcagggggctctatgaaatagactgagtaagagatgatggcaaggacctggaattaaaaggaaaggtttgaactgaataagtatttgaaatgtaatatttggaagggaagtgattagtgacgttgactcaaggataagagaggctccaagatggagtggactccatctaggccatgttgcctggaaaagctggaagaggcccctgtagagtgagcagtgattgagaggcaggccatggggactgagcaggggcggggccagagtgtttgggaagcatgtctgtcagcagagggttcttagggagaattggactggggagtcaggaggggtaagagccaaagactgggacttgggaatagcccatctttgagggaaaggcaggggaggagccagggaacacctgcctcctttggaatctgcaaatgcaggtccttctggctggaaagatagaggcaccttagagactgttgctgtgaggacatcttttcttttcccttgtccagtcctgtaatgatgtgggaaacaaagcacagatagtgtaccagctgcccaatagaggaaaataggagaatttactttcatttcccaagactatatagcctgtcctctagtttccagcagtgagagagagaaagcgagcggtctccagtacagtgccgtagactctccattagaccctctcaggttgacaaagattagttcatctgaatcctagagtagggtagtttagctgtgagtttgcctaaaaccatggttctcaaacttcagcaggcatgaagccgggtgctgtggctcacactgaggtggggggattgcttgagcccaggagttcaagaccagcctgggcaacatagcaaaacccccatctctaaaaatgaaaagaaacgctttagcagacatggcatgagaatcacctagagggctgcaataccagagattctgattcagtagccctggggtaaggtccaagtgcttgcatttctaacaagctcctaagagctgatgctactggcctctgggggccacactttgagaccctgaaagcctaaaggatcatgcagttcatctaaatctgtgtcaccaccttatgtctaaaagctactgctggccgggcatggtggctcacgcctgtaatcccaacactttggaaggccgaggcaggtagatcacttgaggtcaggagttcgagaccagcctgaccaacatggtgaaaccctgtctctactaaaaatacaaaaaaaaaaaaaaaaaaagtgctactctgagggaactctgaccagcatttgctcatagaacaaacgcacgcagtacaatctcaatcgagtaaaaagtctgtaaggaaatacctcagaatgtcagcagggattcttcctgggggatgagattataggtggttttgttttactttcttgtagctttctgaagtttccctcgtttttatgagtgtgcactaattcctctgataattgggggcagggggagtagaagtctatatcaaaacaaaaagccggagcaaggccagtgaccattaacaccttttgatactttgtagggagattttgcagctgctgccgscaacctacaaacctgcctggcagttttgggccgggcactgcccacctcccgcctggacctggcctgcagcctctcctggaacrtgatccgctacagcctgcagaagctacgcctggtgcgctggctgctcaagaaagtcttccagtgccrgcgggccacgccagccactgaggcaggctttgaagacgaagctaagaccagcgcccgggatgcggctctggcctatcaccggctgcaccagctgcacatcacaggtgagggggcagctgctgctgcctggcttgctgcaaggcatctcatgctacctctcctccttagcttgatttgccagttctgcaccctagctgaagtccctttaacgctactcttttagagtggctagaccaagcttctacctgttttcacagctgtaaggttggctctttgctttagctcatcagttctcagatgcacatgttttcacaataacatcactatactcaggatgtgtcctataaacagtggcacattgtagataagttggcagtgtttttctttagtgatacttaaattaatggtgagacttaaaattgctgacatcttakagtcaatgaaatatgatcatctgtttcattcagtaagctcctgctataataggcagagaggtcaacaaatgaatgacagttcagcgtgagtatgttagacttagcagaaggaacatgttttcgttgggagggagtgggtacccgtttggagggtttcaagaaaggttttctggggaagtagagtcttggctttgcatggaaggatgcatagaggtcaccagctctgcaggagatgagcctctgggcagagggatgttcccaaggaggagccccacctggggtggctcttgagaataagccttcagtggtcctagagggagccagggcacaaaggcagtactcagaccatgaaggatttggatgccaggctgaggatcttgtagtgtatcagtaggattcagtgaagagcattaggaaaatagtgatatgatcaggtttgtgcttctcaagtttagaagagtcaggctgggcatggtagctggctcacacctgtagtcccagcactttgggagactgaggcaggaggatcacttgcactcaggagttcgagaccagcctggacaacgtggcaaaaccccatttctacaaaaaatacaaaaattagccaggcttggtgatgcacacctgtaatcccagctacccaggaggctgatgtgggagaatcactggagcctgggagatcaaggctccagtgagccaagattgcaccatagcactccaaaaaaaaaagtttagaagattcactctgatggcagataaggagtggatcccagaggatcaaggctagagctagagaggccaaatagaagctgatgcagattaaagatgagagttgctgaaaggacagatgagaggaaattagaaggtggaattgactggactggggactcattggactgatggatggggacagtagtcagctaagacggttccctggttcttccttgggagtttgggtgagcgatggtgccaccaacaaaggtaaagaaaatagaaggaagagcaactttccaggaaaagggtggtgagttcccttttggacacttgcctgtgagatgtggaggtgagctggacatgcaggatctacagcccaaagaagactacaggtgagagtgaaaagcaagggagcctatgagagtggataggtgaaaaggagaccctcagggccattcagaagaacaccctcatctaaagaacagataggccatcgcggtggctcacacctgtaatcccagcactytgggaggccaaggcaggtggatcacctgaggtcaggagttcgagacctgcctggccaacatggcaaaaccctgtctctactaaaaatacaaaaattagccgggtgtggtggcacgtgcctataatcccagttactcgagaggctaaggcaggagaatcacttgaacccaggaggtggaggttgcagtgagccaagatggcaccactgcattccagcctgggcaacaagagcaaaactccatctcaaaaagaaaggataaaggctggcacagcagttcacatctgtaatctcagaactttgggaggtcaaggaaggaaggtcgcttgagcccaggagtttcccatcagcctgggaaacacggggagactccatctctccaaaaaaaattcaaaaaattagctggtttttgtggtgtgtgtctgtggttccagctacttgagaggccaaggtgggaggatcacttgagcctgggaggtagatcgaggctgcagcgagctgtgattgtgccactgcacatgcatgcagagatgaacagatagaggatggggagtcaggggcagaggctgcctgagaggagcagttggagaggtctgaggagacactgagatgctaagtgttggaggagcaaggtcagagagttgaggaggggagattgttgctgggacacccagtaagatgagggccaggaataacagtaggatgtggtaactggaaggtgttagataccttgatggcagtaaggagcttcagccaaaagtggaacagagccaggcaagtgatgtaggagtgaccaggagatgagacagtggggccattgtgcagctttaatatgtgggctcatggtagaattttagcagaaggtccctatctgcaaatttgccccgctgttatcttgtctgttcctcagtgtgcccttgggacagaataagcccatactcasgtctctgatcaggctgtgtcctccttgctgccaaattctggagaattccagctgagaagctttacgtcactcattccttccatactcactggcattccctgtgtgaggcactgaggggacagaggtaactacagtatggttgccacrctgccctctcacctcccttcctgtgtctcctgcaggaggaacacctgaggccagtacagaatggagtgtggaggctgagatctccctaggctgataaaaagacagggaggcaaggcagcccaggagggggaacacagggctggatgagcacgggaagcctggctttgccactgtctgcaccttgacatgggcacttcctcccctgaggcaaggagactgcttgcccttgtagtgaggaccaaagccagcaacagtatgaaagcctcacgagagctgtgatgggcccttgtgcctgtgcaaggatactttgttccctgattaggggatcagccccagatgggccactgtgcacctctcataggggagggtgtggtaagccttcctggcctcccacccactaacccaacatgtgttcagctgtccttgctcagtttacgtcacttccccctcaaacgggtatgtgtttgtgtattgtgaaggcgggtttttttttggcttttttgggggacagagtctcgctctgttgcccaggctggagtgcagtggtgcgatctcagctcactgcaacctccgcatcgcaggctcaagcaattcttctgcctcagccttccaagtagctgcaattacaggcgtgtgccaccacgtccagctaattttttctatttttagtagagatggggtttcactgtgtttgccaggctggtctcraactcctgatcttaagtgatccgccggccttggcctcccaaagtgctgggattacaggtgtgagccactggcacccagccacattgtgaaggttttttaatgaaaataaattcaaatcagttcatctaaaaaaaatttcattacctctgttgaatgtttggaaacacacagtgtggctgtgctgctgacattgttatgttgcactgtgcgcctctgagtcctatacaacaacctgcaattgtgacagctctgggtgygacagaaatgggtgccatgttcccagctaccctgtgaggtagacaggaacacacagccagtatatcacagagcctggcatcccatcctgtgatcaggcctgtctgatcacaaagttcacctcgcttctcccctggttcctctcttactttgatcgtgctggagagagcaggaaaaagtttggttttggggctccatcaacaatagtgtctgtttctgcccaccctagggaagcttcctgcaggatccgcctgttccgatgtacacatggcgttgtgtgccgtgaacctggctgaatgtgcagaggagaagatcccaccgagcacactggttgagatccatctgactgctgccatggggctcaagacccggtgtggaggcaagctgggcttcctggccgtgagtacccttcggttcccttctgtaaacctcccctgagcacttacctagccaggagttaagatgcagaagcagttatgaacccccttccccatcaggtgctgcccacctggaggggtaggcaggcattcatkcagtcgctcatttcaccaggactcccagcaaccgataaaacagaccaaaattcctccccttgtggccttaataccataagccttgtaggcaggacattttggtccmctgaggtaatatgaggtaatatgaagattggttcagcartagcagagctactgtacttgggggttaatatgcaacttttctgttcttcaagtggtcataaaaattcttagaatcccctggttatgtctcatggttctttcatttactcagaaggtatttattgggcatcttgtrttgatcacagcactgtgaatccagaaataaaagccagtgcctttgccaagctacagagttaaagaaaagaaaaatgaaatgaataaaagtaaaagaaaacctgtgcctgtctacaaggagctcaggtcagacgagggcagggattgtggctatcaagyacctcccatatgcctagctaggagccaggcttgggaactctcaaatgggtaattcccggtccttgttatcagctagctcacaacatgctgacctcaggctttctcttactctagcagaaacaggtatgttttactttgtgtcccactatggatagactgctgaatacatcaggtatgttcaagcattaccacatctctatttgtttccgtatctcagtaacagcagagatgagctgagaatgaatcagaacgtgccctgtagtgacattgatatatttcctgaggtacatcacgatagtctaggggacaaagggcgcagggaagcccagtgtactctttatgtctacacttgatcttagccagaaggctgagaagtgatactttttatgtcttacctctgtttctggtgactacagataagagactcatcccttgattcactcattcagcaaatatgactgagcaccgtctctaagcaggacatttgccttgtcctcagggagcatagttggcaaggaatctagacagcagcccttcttgagcttgacattgatcttctcatgaggaggactgggctccaggtggggaaagaaccccatcctcacttgtgggctagacgacctgggagtccacagacactgaagacacatcattcttcctattcatttcaaccttccctcgacagatcttcctgggaccaggtcttcaggacagtgtgagctagggtgagctcctgagctggtcttgggggaagtcagggtgggctttctggggaaggtgaatctaggctgacagcaggaggcattgatgagatctctctccttttcagtttattgaagtgctctgggctgatgtcattacatttgtaacttccatgccccccaaaaatgttttgaagacattcattttatcaaaatacaacatacatgcagaaaaatgcccacattttaacttacggcttgaagtgaagttacccatgcaacacccacccacatcaagaagtagaacattcccagcacccccagaagccttcttgaggccctccctgctcttcctgccccaaccaaggtaaccactcttctgaattctgtcactggagtttaatctgtctattgttcatcatttcagtaaacttatcaaagtacatgcttagaagtctggctgggagggccgggcacggtggcttacccctgtaatcccggcactttgggaggccaaggcgagcagatcacctgaggtcaggagttcaagaccagcctgaccaatatgatgaaaccctgtctctactaaaaatacaaaaattagccaggcgtggtggcatgtgcctataatctcagctacttgggaggctgagacaggagaatcacttgaacccaggaggtggagggtgcattgagcggagatcacgccattgcactccagcctgggcaacagagcaagactccatctcaaaataaatacatacgtacatacaaacaaaaattagctggatgtggtggtgcacacctgtaatcccagctacttgggaggctgaggcaggagaatcgcctgaacctgggaagtggaggttgtaatgagccaagattgcaccactgcactccagcctgggtgacagagtgagtgagactccgtctcaagaaaaaaaaaaaagattacaatatgcatgtcaaaaagtatacaaatcataaatacacagttcagtgactccacagagtaaacacacccttatagccagcagacagatcaaagtacagaaccaagaccccagaaacttctcttgggccctttgcaatcactaacctgccccttcccccaagccttccagccttccaagggtaaccaccatcctagtcacctcagatgctttgcctctgtttaaactatattaatataaggagagtcttgcagtatacactgttttgtgtctgacttattttgctcaatatcatgtgtaagaatcatkwtgttgttatgtagaattatagattgttcgttctcatatttatagtgttccattgtatgactagattattgcagatgaactttttagttgttttctggctttggttattatgaagggtgctgctgtgaacctccttgtacacacatctttcaggaaacrtgactgcatttttaggaatggcatcgctgggtcagaggttgtgcgtatttccaaattgttggccattctccactccatcagcagtgaacaagacttctagttctacatccttaccgaacacatataatgtcaatttttttaagcccttctagtgtatctcattgtagttttcatttgtacttcccaggtgattaatgagattgagcacctcttcttacatttattggcaatttggatagtctgtttcgttacattcaattcaagtcttacctctttttcatttggactatctgtcgtctcattgattagaggaattctttattctggagattacccctttattggatatatgcttttcagataccttctcccactctggggcttgcctgttctgtcttaatggtgtctagtgagagcacaagctcttaatttcagtgaaatccagattattagtcttttcctttacagttagacattttaagtcctgttcaataaatctttgtcctacctcaaagtcatgaagatattctcctatgttgtctgctagacgytttattttttactctttacacatatgtacctaatccacctggaattaatttttataagagttggaggtaggagtgcaagatctgtttttctccataaggatatctacctgacgcagaacctgttattttaaaaactatccttcccctgctgcaccaagtggcacctttttttcataaatcaaggatccgtgtaccgtgggtctgcctccagatctagtctgttccactgcaccatcaccacccaaccctaacggctgagttttctcttacgtcttgatgtctggaagtgttggtcttccagatttagtgactaacgatgaatcttgggtgtttctttgtagcctcttcattctacagaggtacttgatgctgctgatggacatttgggttgtttccagtatttgccgttataaacagtgctttagggaacatttttgtccattgtcttcatgcacctccataagagtttcctcagaccaaatctgtagagatggtgatgctgtgtcaaaggatataaatatttgaaacttaatagtattaccaaatttgcatattcagtaagatggaaaaaggagaactgtcatctttaaagtaactgctcttctctgtttacttctcttgagagaggataaagagactcagacagtactttcttataaaggaagaagctttgaatttggtgagatatatttagctacaaatgagccagttgttgggggcaagtggagggctggcctctgtgaaaatggtttagactagaggttcccaaacttgctcaactcatgactcaagattcccaaacwttctctactcactatgtctcagtaaatttttcatggcatcccttagccaaaagaaatacctaacggttctggttttcgttttttgaaacagtgtcttgctctgttgcccaggctggagtgcagtggtgcaatcacggcacactctagcctcaacctctctgggctcaagtgatcatcccacctcaccctcccgagtagctgggactgcaggtatacaccaccacaccgagcttatttttgtattttttgtaaagtcagggttttgctatgttgctcaggctggtctcgaactcctgggcttaagcgatctgcccacctcagcctctcaaagtgctgggattataggcatgcaccaccgcgcctggcctctgttaagtagttaagtttgaacatcctaataggtatttaaattgtcttaacagcttagtggtcatttgaaaaaatcatatgtcaagttgaaagaagaaataatattttttgctaggagtggtagcacacacctgtggtcccagctcctcaggagactgaggtaggagaatctcctgaaaccacgagtttgaggctgcagttagctatggtcacacctgtgaatagagccactccactccagcctggacaacatagtgagaccatgtctctattaaaaaaaaaaaaaagaggttgggcacggtggctcatacctgtaatcccagcacttaaggaggctgaggcgggtggatcacctaaggtcaggagtttgagaccagcctggccaacatgatgaaactccgtgtctactaaaaatacaaaaattagccagggatcgtagcacgcacctgtaatcccagctactcggaaggctgagacagaatcacttgaacccaggagtcagaggttgccgtgagccgagattgtgccactgcactctgggtgacagagcaagactctgtctcaaaagaaagaaagagagagaatattttggattcttaataatttcttagaaatcatggttattaagaatccaaaatattcttttatttatttatttattttttgagatacagcctcactctgttgcccaggctggagtggaatggctcttcacaagcatggtgtcactgtttcttaccaatacatgaacctgtcaagcactgcacacctcaagctttggaatcagactagcaaccatcactctctctcttttccacattrattttcacacagtactatgacagatatcacatctccaaaggaagctagtgtggtctcaatgctgaggctgcatgctctccccatctagtcacttacagtgcccagctgatgttgagcatcactgttttcctcgaaagtttaaaatagccagtggctcccttgatcacttgctgtggcacctcagactgccttggcacacgatttgagagccatggggttagaccgatgttaggggacacaacctggggttgggactggcccagggatactgagtggctctcaggatctaaacagttgtggggttcttgccacagcctctttcacatcaggcaattagcagatgagttacagggggaggctcctaggccccagttggggaagattctggtgtctataaaatttaggaaamcttaaaaaaaaatttttttttttttggcttgggattacaagccaagccaccagcgtggccaagatggtgaaaccctgtctctactaaaaatataaaaattagctgggtgcggtggcgggtgcctataatcccagctacttgggaggctgaggcaggagaattgctagaacccaggaggcggaggttgcagtgagccaagatcacaccactgcactccagcctgggtgacagagcaagactctgtctttaaaaaaaaaaagaaaagaaaagaattaagcttaaaatacatttttacttagtgatttccacatttgcctttctggttcctcttgccgtatgacctggactaggctttgcttctacttgtaacatttgggccctcgtgagggaccagttggtcctcagtttctcctggagcagccaccaggctcccttgctgattggacatgtggaattggctgttcttggaaagagagttggagtcaaccgttcaaatgttctgggacctccgaagcccaggaatcacgccaccaccccccaatctccctccctgctcagctcctcaactgctattctcccaccattgcagttatcagctcagattcagtgagtgctttgtggaaggttggcagagggtcgcgagggtcctctacatttgttctccagtatccagtatcaacactggttaccaaagaggaaggacggactattggtgcccctggtcccagtgattagaaatgtaagtgaaacaccccacctcatctcataagctgctttgagattatgagtrtgtgtctatagaacaggttgttttctctcagactcaggcagtgtctccaggttccccctggagagagatagtcttctctgtctgtgtcctcgagtggcactctgacagtgctatttctgaccctggcattcaagtcttctgaagccgttacattcgctgatggctacttagagcccagtaaaggtcagaaccatcagactgaaccagaccatgaaacagcgctgctcctgtgggggcgagggctggggtgtggaagcgatgtctgcgggcctcggcctggcagccccgcccctgggctccctgggctttctatcttatgcttctccctccctcctgtcttctgtcctcagttcctcactcaccctggcctgtttcggggagtggttatgggttggaagtcatgggtgttagtgtgaaaataccctcactcaaaaagtgacagaactgaaaacgtggtagatggtattgtccctgcagttcttgtcagtggggtcctggaatgatgttatcccggcaagtggaggaggggcccagtgaccggggccctggctctttgaattgtcccacaaagaggctttccaggttccccctctgttctttctcgcaggctggtgttcacatcaggggctcatgcaggggtgccatggggtttctgtagggggccgcccttgcagggccagctttgtggggggagtctctcaaccacctgcacacagatacttgcctgtacagggcctgggctgtcctcccagctgccccttcactccagtgccatctgatgtgaccctgacggctggccatgtgccgagcactgttctaaactttacacgcaaagtaaaagtaaaagaaaaattagtcaaagcagaataattttgcctaaaatagtctaaaagatatgtaattaaaatgacatgatgggccaggcacggtggctcacgcctgtaatcccagcactttgggaggccgagacgggcggatcacgaggtcaagagatcgagaccatcctggctaacacggtgaaaccccgtctctactaaaaatacaaaaattagccgggcatggtggcgcgcgcctgtagtcccagctacacgggaggctgaggcaggagaatggcgtgaacccgggaggcagagcttgcagtgagtcgagatcgcgccactgcactccagcctgggcgacagagcgaaactccgtctcaaaaaaaaaaaaaaaaaaaaatgacatgataaaaagtcccaggatagaaggggctgcctggcttggcactctcggggccgaggggaaagtacagcagccagggggcccctgagacccctccttgggaaaccgccttcctagtttaccctgcaggttgaatgccagtaggatcaggcagccccagcaggacaggatgcagcaggggccccacgcgtgccttgtggctgctccctgccctcctgctgggatgtggacctagtcagcaagtccagcacactctactggtgggcttgccctagtttccatggtgggctttactttcaggtacctgtgggagtcctatccctgtgctgatctttcccagtctcccccaaagcccacctccaccatggtgctttctgcaccccacagtggctgcagccagcattctgccaccttggtgttrcccctggtccttgtccttccacagagctacttcctcagccgagcccagagcctgtgtggccccgagcacagtgctgttcctgactccctgcgctggctctgccaccccctgggccagaagtttttcatggagcggagctggtctgtgaagtcagctgccaaggagagtctatactgtgcccagaggaacccaggtgagaataccttggagccattcagaattggagaaagccatgcaaaccgccggtactacagagtcactgcaccagacacgcggagacacgggttgtctcttaatcttgttgagtccgtttgtttgtttgtttgtttgtttgtttgaaccaaagctcagggaggttgagtaacttgcttaaggtcacaagcctgatcagaaattgtcagtgrctaagctgggtgtgcagctctgctctctctaacattcagagcccatggtccttacatcacacagcaataaattgtgattaagctccaagggtactcttagcccttgttttgggcactttggagacacaaaggatgtgtgaggcttgctttccctggcctccaggtctctcccattgggagagcagacagacataaatggagagtttgggaacaataggtggcaggcagtcatcaactgctcagagtggtgacagggacgaggcttcaggcattggaaggaggtgctggctttctgtccctggcatttgatagtgattggagttgactcgcccggccttggagcagtagaggctggtcaggattgacttagaccttgagtgctcagtggctgtctgctttctgctgtacttttcctcccctctcagaattggagtctgtggggagagtaaggttctacaggtataggggtgtgtgtcacacattgggggagttcactgtccttttcttttttaaataataactgtattgctcaacgtgagaattgtgtgcaacaccaaaatataaaggatgaaagcaaaagcaatcctaaatctttctaccccacccctgctggctaaacatggacttctcagtggctttgtcatctctggcagtctctggctccaggccttgttacttggaatgtgttcataagtgtccctcctcctggtcattagatcgaggcccacatatctgccacatgtgaggagagagaaggggctggtgatttgaggcctgccagtaaagaaacttgctggtgacagtcagctatccaagcattgcaaggccccgtgtctagccagttcagacaggtcactgctgatggcacgttccatgacaaggctctggaaaaaccggagcatgttcttcgttgtcatgagcgtggcagcagctaccacctttttttccttgcctggtggttctccttagccacatggagaagagaaatcctctgagacattccattttctgttttctgatccaactccacctgacagctcccaaccttagagtactgagcactgtgccaggagacacagcaccctcccccacaccccctccccaccggagctcatccagaactagtcttgagctcttcaggctgggagtgaacactctcccccatcctccaactgtttagcacagtagttctgggctttggtggagaaggggcatctgatccccattcacaaggcatggctgtgtttggagtttctctccgtaaagacaaagtgggctcataaatgagctccatttaaccccccttgcctgtctcttttccagctgaccccattgcgcaggtccaccaggccttctgcaagaacctgctggagcgagctatagagtccttggtgaaacctcaggccaagaagaaggctggagaccaggaagaagagagctggtaaagtccccagaccagtccccctgccttaggacctgtccacgcaggcaactccaggacagcctgaaggcctgcactcctggagggaaacaagcctggcatcgggttggcagggcaatcaaatggttcctttgtatttaatttctcaaaaatgagagccctatgttaactctgacctggcctttcctcctagaccaagtgcgttttttttttttttttggagacggagtctcgctctgtcactcaggttggagtgcagtggcgcaatcttggcacactgcaagctctgcctcctgggttcacgccattcttctgtgtcagcctcctgagtagctgggactacaggcgcctgccaccatgcccggctaattttttgtatttttagtagagacgaggtttcaccatgttagccaggatggtctcgacctcgtgatccgcctgcctcagcctcccaaagtgctgggattacaggcgtgagccaccatgcccaggcctttttttttttttttttttttgagatggagtttcgctcttgttgcccaggctggagtgcaatggaccagtctcagctcactgcaacctctgcctcccgggttcaagtgattcttctgccttagcctcccaagtagctgggattacaggcgcccaccaccatgcctggctaatttttgtacttttagtagagatgaggtttcaccatgtcattcaggctggtcttgaactcctgatctcgggcaatccgcctgcctcggcctcccaaagtgctgggattacaggcatgagccaccacgcctggcaggtgcacccatttttatgtatccctttaccaagcggagtcagtacttggaccaagtcagggatttcattagcttgctctgctttttggggtagggagcaggggcctgttgaaaggggatgggggctgggtgcagtggctcacgtctgtaatcccagcactttgggtgggaggccaaggtgggcagatcacgaggtcaggagatcgagaccatcctggctaacacggtgaaaccccgtctactaaaaatacaaaaaattagccaggcgtggtggcgggcgcctgtggtcccagctattccggaggctgaggcaggagaatggcatgaatccgggaggcggagcttgcagtgagccaagattgcgccactgcactccagcctgggtgacagagctagactctgtctcaaaaaaaaaaaaagaaaggggatgggaatgaaatgtgacgagctcagcagaaggcagacacatctggcctggacatcttggggacccagcccctcatggaatgtgccgggcaatttttctctctgacatacttactgagcacagtccttctttcacagagtaagacctgagaggcagataggtgccaaagtcacttttgttttttgttatttttgtttgttttttggggggttttttgagacagtgtctcactctgtcacccaggctggaatgtagtggtacagtcttggctcactgcaacctctgcctcctgggttcaagcggttctcctgcctcagcctcccaagtagctggaattacaggcacgcgccaccatgcccgactcatttttgtatttcttggtagaggcagagtttcaccattggtcaggctggtctggaactcctgacctcaagtgatctgcctgccttggcctcccaaagtgctgggattacaggcgtgagccaccgtgcccggccccaaagtcactttcctacaaggcccagatcctgattagggtgcacctgaggagagggggagggggcagttctgcctgggagataagaaaacttttgggaggagatgacactggacttggggcttaaggagaggagtgagggtaggctgtgggggatgctagggaaaggcccccagtagagggaagagtgtcagtgacagcccagagacacggaggaaggatgcctgaggaatayaaagggtacacatagacagcgcttgcrtgtgcctgggatgacaggaaagggacagaaatggccattgggtcttagagctggagagctgaacagctaggccatgaggtgggccttgtgtatatgttttgatgtacatgggaccctttcttttcttcctagtgaattctccagtgctctggagtacttgaaattacttcattcttttgtggactctgtgggggttatgagccccccactctccagsagctccgtgctcaagtccgccctgggtaagcacctgcgggtggcccacagtctcagggtgctcagttcaggtcttcacagtgcttttgccccaggggtccagggcgttaggagtgtagatgccagcatcttctctggatcccaggttcatacctgtggctccagttcacagtcaccccctcccaaacagcactcagaggcaggaaactatggttttcagagaagtagggcaatgagtaattgaatgtcttcctcaagccctagctgtgtgacccaggtgaggacccttcttaatgcccagaagaacaagcaatgagtggcccaggcaccagggatggtggggagtcacctttcagatgcacagtggcccctgaggcagctcttgggccttatgctctttgctgaagagacttttcatctgggcctctctaccactcctcagcccctcatcacatcagtgtcacagcacagcccactgactggattgacatcatgacatttctttgcttctgtccctaaactgccatcaggatgatagcacatcagctgccaactcttgggcttctgtggccaccctggaagatgggggtaccaagctaccgctggtcactctccctagggagggagggatcccagaaaatcagccaccctatcatgatccctgacctgtggcctctgttttcaagtttagggaagcatgaccatccccgctggttttgtgggatcactactgtcatcattttgcagttgagaaaactaaggctgagagaggagaagacttaaaatattctaacaggagcctgttccagatactttgaagataccattctttatggctattgaaagcttaggttgtatccatctttttatttaaaaacaacactgcagtcaaatatgtgttaaacttttttctctctaagccagtttcattatgacagactgccaaaaatgggattactagcttaacgggagtgaacttttttattttttttgagacggagtcttactcttgttgcccaggctggagtgcaatggcacgatctcggctcactgcaacctccgcccgcaccgaggttcaagcgattctcttgcctcagcctccctagtagctgggattacagtcacccgccaccatgcccagctaatttttttgtgtatttttagtagagagggggtttcaccatgttggccaggctggtctcaaactcctgacctcaggtgatccacctgcctcagcctcccaaaatgctgggattacaggcgtgagccaccgcggccaaccaggaatgaacatttttaaggctcttgatatatattgccaaacactttccaagattgtgctggtctattcccctcccccagaatcctgggtgtgggagcccagaggctgctggcccgttcccagcaggcaaagatgttacccatctcctaggaaggaagtgtagcagcctctgagcgccacaggtctcgtttctgtgggtgctggagtgcgtttggtgctgttctcctctaggtccagacatcatctgtcggtggtggacgtctgcaatcactgtggccatcagctggctccagggagacgatgcagctgtgcgctctcattttaccaaagtggaacgcatccccaaggccctggaagtgacagagtgcgtaaccctccttggcmactcacttgcttctctccaggggaatcttgtttgagttagcaggagcaaactggactgggtgggcgtgttggggtgaagggtcaggactgcatgacaggtgggcggctagaaaagtcgggggtgagggcaccatggagaactcaagttgggccagcaggtcctctgtgcaagtgtcctgctctgcacaacacgacagttgtcccagcarctgtcagcactgtgtccgggtcctcctccctgcagccttcatggcgccacaggctgaaaagaagagacgagagcagtgtggcccccagcatcttcagaagctttgtggtggaggcaggcactggtggttcacaatcagtgcagagaggccactgttgcccccaaaactcatgtgcactggagcatcttgcccctgtgtgctagcattttatccactttccttccagccacctccasccccaccatcaaccctggcaactttgtcctgtaactaaaatagcctttagcacatggcataaccggagagcttttgacattcctctttggagattcatgtctgcgtcttgggggcattcggcactagtgatgggcagccctgcctgctgactccccggctgtttctaattggatctgagtattctaagagaaactgtaaaatgctccaagacagaaaggccccacgaggtcctatccttagagccaaggctgtagcatttcctatcaagcagacccttaaccggcgcacaggaaggagctgagaagagtgagtatacacaggcttgaagtcctttgttccctgaagtagatgtgacaccctaatttcattgaagtagccccatttgtaagcactctgactaggtaagcacccagcccggtatagcattccacctgtatgtgtgtctcccccagtcgatgtgcctgaggacactgagactcagcaggtaagttgtccaaagtcacctcgctccagagcagcagagcttccatggacagccaagacacccctgcaggcactgctgcctgctggattcacttacccctgggtccctctgcttttcagggactaggatgctatgagaaccctcccccatccctagcctccccttccactcccagtctcctctacagaaagaagctaactaagtatctccagagagtttaataccacatctctgsgggggtggtcccttaaagaacgggtacaacaccttattgtggccactttataggtaaggaaactgaggcacacgttggaatgactatcttgggtggcttcttagcagcagacgtgatggtgaagcctgtgtctctgacttccagcattgaatgaaggtgctaaagggtggggcgctaaccctagctcagggctggcatttcagatctggagctggtggcatggtgccatagtggcagcattggagtcaacagatgcacatgtcatatcagtgtggggcgtggcagtcactggcttgggcccctctgcctgtcacgcaggtgacacatagtgacctgcctctcgactccctgtcactgctgcaggagccccctggtgaaggccatcttccatgcctgcagagccatgcatgcctcactccctgggaaagcagatgggcagcagagttccttctgccattgcgagagggccagtggccacctatggagcagcctcaacgtcagtggggccacctctgaccctgccctcaaccacgtgagtgggagctgagttggcccctgggggaggtgctctgcactggtttasgagaacactcccactcacctcatgctgaccctgcgggtggggccatccgaaagacagagaaaccaggacagcagccccctttcaaaaaagttacggcttattggcctaggtggactcctttttcatcccttttcagcctctgaggcaagtgtgtttctacctgcacctttcttaggctcccagagtcccaggtcctgctggcccatagcctctgtaagcccaggtgcaccccagctggccaggggttcacctgcatttgctccagcggtttgcgtgacttcccaggcctctgcaggcagccttggagtgggttcctgccccctcgggcacacaaacagagctgaagaccaccctgggcacctccttggctggccgcatacctcctggcgggcagctgtggtgcattgtagttgcattgcatgttctggtggtacccatgcaatgtttccacagtgcatcacagaggcctgcctggccctcgagagactgccctgactgaaggccctatcaggtgggggaggggatcctgatagagggcactgctgccactgttggggcccaagtcacagccatcccaggaaacaggagggcacccagctgaaagtggagcatcacctggtctacggggaacatgtccttagctccagagtgggagggaccgggagagtcctggagattcagattctcagccactccctggggcttggtcttagctggctaggctagtacttcaagctagatattgtcagtggacctgggcactgggatgaacccaggacagcgtggcagcccctacagggacaggcaatgtgcagaaaaggcccaaactggctggacgcggtggctcacacctgtaatcccagcactttgggaagctgaggtgggcagatcacctgaggtcaggagttcgagaccagcctgaccaacatggtgaaaccccgtttgtactaaaaatacaaaaataagccaggtgtggtggcatgtatctgtaatcccagctactcaggaggctgaggcagaagaatcacttgaacccaggaggtagaggttgcagtgagtcgagattgcaccactgcactccagcctgggcaacagagcgagactccatctttaaaaaaaagctggtgggggtgcccaaatgccctgggctgccaagaccaaaggcagatggtgagccacatttcaccttctcttttgggctttccattagtctcttccgtatttgtcttcatgagagaaccaaacagtacaggctcagtttggggaatgagaggcttgcagccaccctttggactggggttccttggtagcagctctgtggtaggaaagtgagcctagaagacaacgccatgcagcctgatggccctcggagggcagaatccagacataggcctgctgcctccatgcccacaggtgcttctgcagcatgcacagcttagaagtgccaggttttgaggagagggatccttttccacatccccttgaagcacacaacagccagaaaacagtgtaggcaaggatcaaggccttgtgcagggacagggcagggtcttcctcaggcccagtgtcctgggaaggaggaaagccagggctgggtgagatgaggctcagcctgagggagttcatcaggaccggagggctgcttgcggcccatctcaacaaggactcctcactgctcggtgtcgtgcaggtgtgccactgcgagccgggtgggcagcccagccccataggtcgtaggcagagagtatgcatggcccacatgcagtaccttctcatatgatacaacagccctgtgatggtgccatttacatttttttgaatgaagaaactgaggctcagagagactaagtcctatgccagggtcatgtagctagtaagtggcaaagccgggtcagtaggcctagtccccaagcactaaggcactctgtggttctgtcttctgagacacctgtctccctctcccactcctcctcctccttcccccagccccatcgacaggctctgctgccacttcaggcttttccttggtaccttgtgggtatctcagcctcctagccagccatggtgggactcccatggggtggaagaacctgcgccttcaacccacaagggttttatttctgcccctrccacctgcctgtgctgtattccctatacaagctgctgtccctgtcagagccttgctttctcacctgcagaatggggagggcttgtctcccacytcctggggccatggaaggaactggttctcccctgagctgttccctcacgtcctgcggagttcaccagactctggggctctccacttcctcccagagctgctgagtgttggtctggggagaggcctggtaggtgctargatccttgcctcagggatgggccagtcacctgtctcccctctctcgtggctgaccccacaggtggtccagctgctcacctgtgacctgctactgtcgctacggacagcgctctggcaaaaacaggccagtgccagccaggctgtgggggagacctaccacgcgtcaggcgctgaactggcgggcttccaacgggacctgggcagcctgcgcaggctggcacacagcttccgcccagcataccgcaaggtgaggcccagctggctggtggggcagggcagattggagcctgtggggcctgagcccagaacccagcatgggcaccagcatgtggttgtggagttggccctctgaggtcagcctggtgacctgtcgagcacctgcttggctcgtgcccaacactgggctaggcgccatgtgtccctgtgttcagcacacattggttgagtgcctgctgtatgcctggccctggagctcagcagggagcaggccacactttgctgccacagacaggggccagcagggagctgtgcctccccaggcacatgctgggtgggagggctctgagggcaatggtggcaagtcagggctcctggcctggtcccgagctccacgttgactttcattctttttcacagtagctagaggcttcggttctgctgctgggtaacatccccttggcagtggccacgtgatctgaactaagtcacggaggaaagttctatgactgggcttgccaggctccagctatttccttttttgtttatttgtattgctatataatgtattcaacatatttgtacctgtatttttttctaaaaatttgagtgagatgactcaagtgtcattgagggggcacgggctgggctggaagaaggcctcagagcgaggctgctgccgtggagcttgggattcagcccccacacccatcaccctgaggtgctgcggggcccacccagggttgcactgtggccactgtgtgcagcaagccaagacagacacaacagacagtatcatcggagagccattccttactgtggagaagagggcatgtaccccaggcctggagcggcacccctgcctcctggagcccactctggtcagctctctggtctgctcacagcatggctggcatcagtggcctttttttcataatagatggggtcttgctatgtggcccaggctggtctcaaacccctagcctcaagctgtcctcctgcctcggcctcccaaagtgctgggattacaggtgtgagccacctcgcctggtccaaaggcctcctcttaaataccatttccattctgctgctccctgctgagagcccatcagcggctccccattgcctaccaggaccagaatccacttggcagcactgaagaccctccctgaagactgagatataaaggcatcaaaaagagcttgagattttaagaaatgacagacctcagccttgcccttcacccaccagtggctcatacctaagcgctgcagactttacccgcacacctctagactctcttcctttctaaagatacggaaagaggataccaaacctctctggtaccagcccaactgtccctcctcacccctctgtccctgtcacacctgtccttttgtcaaactgcaggcagcctccagggccttggggcttcacccagggcacttgtctaccagccccacgaggtgcgtccagggctttcttgtcaccagttgggaaaagcaggccttttgcctctctctcctctcatcctgctcctgctgttcagccaggtttcctgcctggctcagggtcagagtaygggacaacagaggttgcttttcaggggtgagcaaggcagggtggtgtgggaagggatgtcatgaggtggcaggcgagatggctcagggagagctaccctgggcatagatgggtggggaccaggggtgtgatggatgtcaccccggcacctccccaggtgttcctgcatgaagccaccgtgcgcctgatggcaggagccagccccacccgcacccaccagctgctggaacacagcctgmggcggcgcaccacgcagagcaccaagcacggtgagtccacccctccccagctcacaggctgggccrggccctgcgccctaggaagagaggagaagaggggccagcccagctcccacatctggcattggtgcccagcacacctctcgcctctctgagaatgaaagaagcccgaggccgcccttggygggttgcaggggttggggtggtcatgggtcatgctgtgatcagggaaggagggttggggtggcgtcccagcacaggtgcaggcatagaagcagaagctcgagccaggtcatgtgggcccatctcagccccaccacgggctggccgtgagaggctggacaagttcacttcttttccgtggattgggtggggcagcagacyccacctcccaggatggatgtgagcgttcagtgaatgagtccaggtaacgccaaggaactgcaccaacttcatggtagattctcggttgtgacacacatctccttcccacaggagaggtggatgcctggcccggccagcgagagcgggccaccgccatcctgctggcctgccgccacctgcccctctccttcctctcctccccgggccagcgggcagtgctgctggccgaagctgcccgcaccctggagaaggtgggcgaccggcgctcctgcaacgactgccagcagatgattgttaagctgggtggtggcactgccattgccgcctcctgaccaccaggctcagcccacccctccacctctctctcgatttctctctcyccccctcagcatcttcccgctgagagtggtggggargagccttgtcttcttagctgtcacctgccgaggcttctgggccactcaggccagtgcacccctgggcagagccccttaaagctgctgtcactagatgcccatggtccagggcctggtgggcgtgagaggataggtggcagggcagaaactgggcagccctgacttgatagcagcagggggagctcccaagctgcyaagcccctgcctccagccttcctgagtttctctctcctgaaccctactctctcctttttgcttcctcagtttttatcaggctttctctgggggacagcagtctctgagcaccagggagcagttgccctcaggcctgtgcccagcatgccctcccctttttatacgaatgttttctaccagtgtgcttgggtttgccatgatgcgaggctgagttgctgtagcgtcttgattctctccctgggtctgcgttccctcccctgggcctgactgagcctgctcattgtttttccctttattacacaggacagccaggggaggaggggggcccagccctgggaggctggtgggaggcagggggcaggcctgcggatgcatgaaataatgttggcattattttttaattttttaaaaaataaatggtatcttatttaattgtcctgttccttcccactccccgcctcctaggatgttagcccaagctcagggtaggcccagggggctgggagaaatgaagccacccatggggactggggaccaggggccttcagcatggcttctaggttccctcctccccctaccccatctcctacctccacagtacagactgtccccaacttaacagtggttcaacttaaaccatgtttcaactttacaattggtctgttggggtattaaatgaatttgtgacttaggatattttcatttatgatgggtttatcargaagtaaccccatggtaagttgaggcatatctgtatatatttaaacctaattaattcttgagctgaaaataaataaaccaggatggcagggaccaacccctaatccctccccagcggcaagcccctcttttcagagtgggcagagggttgcctatggtgggcactaggaatgaggtcccctgcctcgatgcgggtcctaggagaaaaagtcctacttttctgggtccccaggtgcagcacctcccrgagactgtttctcccatggcctcctgagtgatgggccctgcctccctgtgcctcatcctcaggctggttggagcagagggtgggcaggagccccagcacagactggggggtgctcacagcagggccaccttgatgcaggctggaatgttatccctggggtgtgcttggaccccacctgctttctttctctcctgcccctcccctactctcactgtaatttatggaccctgcccgcctgcgtgttgtgtgtatgtcctgtgccttttctcactattgtttgggtgtgggagggggtggtttttcactgaaaaggggggtacacctatagctttcttgatgttcaatcaatcagtcactgtgtcccagacatattcaataaacacagattggtaccacccagcacgaggtgtgtgagggtctgtagtgcgactgctgtggtgcccagccaaggggctgcgtgacttggcaggcaatgggccagggactgagggcagccccccaactgctgagagggcccctggcttcagtctaatgggcctcccttgtccaccttccttccggtgcctggcgcaccctccagcctgggataaaagggctgtgggtggcactttgggggtcagaggtcactgtatccaggttccagcttgttccctggatgtaatgcaggctggctgacagatttggggtgctgaccctctcccccactgggtaaactgctccttagtttctccctccctgaagtcagtgatcctctgagccaggaggctcactggcccacaagtcagatccaagtccaggtcctgtgcttcccagctgggtcacctggggtgggacctggcctcagtctccacttccacgtgtgcagaattgggaagctaagctcagccatgaactgcagctccaaaggcttgtctgccaggactgagtgatgggatgcaagtttacagcgagtgccttgtgtggctggtgaggccaggcttggcgtaagacacaccaggggacaggaccacagactgggatgggagtgctgggcctcgtcgcaagaggagtcaggatgtgactgagcatgtggctgaatccctcagctatgagccacatccttctctgaagggtagtcacagcaggctaccctgagaccagagcagcccggtgaggcccaattgcagctggtcccgtgcacagctccatcattttcagggatggccactgcccacagcctcagcctggctccactgggatggagatccagggcccttggaactgagaatgagcagggggaattgcccactcttggcacagcccagcagggggtgggaggtggggtgagaagcaaccagattcctttgtgagtctgtgtaggctccatgcctcagcccccaccctcctccagctctgcacagctgtgggacaggggcaggaccgtgggcccagagctctgtcctggtgcttctaggccttggtttccttaacagcctaaagggacagggaggtggaccctttgtggcaggagcggagaccgggcctggtgggttctggggcctcagggcagcccaaccagcagaaggaaagctccagactgtttatatataccctgggaacagggacccctccctaccaaccctcagaaccctccctcccagccaaactgcctgttgcttgccattccagccgattcacagcaattcgggagagtcctaacctgggagtctgctgggtgaccttgggcaagctacttaggtttcaaaacccaaatttcctcctctgtaaagacacacccacttgaggcgcttgtggatttcctgagaaaggccaacaaatggtggccattgttcttaaaacagtacaccacacttcaggtactcaggagggaaacagacccacctgggtggctttgctgaggtcacacacctcaaccagccacagccctggcccctagcctccccacatcacacacctcaaccagccacagccctggcccctagcctccccacatcacacacctcaaccagccacagccctgacccctagcctccccagtgttacctggcggagaggaactctgtggaagatgcacgcagactgctagcagtgctctggaccacagccaggtgcaggaagccctcccggagggacactgccagggaccctgctccagcttttcccccatttccttcagagaagctcctgggaggaggcgcccccatccggagcaccagatgtccacacggcccacacccattaaggggggtagcccggggccaatctggccaagcgacctgcaggccaggggctggcccacagccagtggtcagtgagcatcagccaggttcagccaactcaagctgcagagtggcggctggagggggctcaccttcagtacagggcatggaccccccactgggccttggacccaacagccctctctcctgtgcccgggcctttctatggctgaagtctaactgttccctctctcccagggctcccacgggggtgggcattaaccctgacattcaaccctggcccccctctccagccacttccccctggctctggccggtgcactggagcagtcctccaaccttgcactcgccgtgccctctgcctgcactgccatctgtacagtcagtgaccaatggtgcctcgcagccacgctggggcttctttattctcaggggcaggaaccacataaaagggcttatttacaagacgaacccgcggcctgcaggctccaagacaccactgccgttgaggcagacagaagagctggccttacggcaggcgctcctctccctgtggcctgaggctccgacgggcagacaggaccccagcccatgcctcgagggcaccgcggccccgcttcacacggtgacctcggtcttgctattggtccttaggtaccgggacccgcggcccgcgctgccgtaaaggccggggagctgcgggttgaaggtctcaggcatcttcacactgaactggcgccgggccgcgtgcccgggtcgccggggtacctggaaggcccgagccgtcgggtggctgagcggggcgggccgggccgggcgactggaggtccaggcggcataggggcccggcgcggcagggggcgcgtagaccggcggggcccaggggcaggcgtccagcggcgcaggcaagtccggggatggtcgcggagcccgcgccgggggttgccgcggggacggctcgagggcggggaaacgctgacagaagtcccgcggggcggcctctgcggggacagggcagggaagagtgacgccgcgccgagcacccaagctcaggactggacaaggggtcccggccggggactgggacggggaccgggccggggcgggccgggggcggggcccgctggggcgagggagccgattggccgagcggcgggcgcgcggaactgggaatttggcgcttggagctgcggccccgcgcttcgcagtccgggagctcgtgcgcccaggtgccctgacgctgcccgcacccgccactcacctgcggccttgagcgcggcggccttgaacgtggcgtacttggcgtagtctggctgcagcgtcaggctgccgccgccctgcagccgcgggccgcgcgggggccccggggcggccgacccccggggcgcgttgttgaggcgcttcttgtctggagcgaggagtgagacgcggctcggtccgatgccccggttcactccgccctcgctgtcacctctccgtagtcctctccccgaggccgttcggtgagaacctgggggaccgttctccgggcgaggctgcgagccaagcctgtcttcgccgcagcctccagcgcctggaacagggcctggctccgagtcacgcgcagcggcggcggcagccagcccggggggtgccaccctcatgaacggctcgcccggaggcgacgctcgagccaggcgcggagtcctgggacctgctcccgccgagacgggggatgtctgaggaacagaacccagacggggcgtgggggctgccaagcctgcctgcctctcgagagacccagggggaggctctggagcccgagcctcagatcacagccccggccagcaaatcctgcatctggaaccttcctcacacatcacagccccccagactcgaggccgcaggacccgtggggggtccctttccaccctggcgagctggctggccggtcgggcccctcacccgcagaggccgcggctcatttccaccggggaagcctctatgccccagccgagggaccgcctctcggcctctcacgcccctccgcgtgctccgccgccgctcagccccgcccgccaccgactcacctgcgctgttgtggggggagccccgggggaggccgtcccccatctgcacctggacacagccacccaggggtgggcccagggtgggaggcagtggctcctgggggcccggctgcttcagaagctctgtcagcgccctgcggggacagcagtcaggggtggccctctgtctcccacctcatcaaaagccagccccggccaccaccgtctcaccgtgtggccctgggcagttctttcggcctctccaggccgtcctctccggtgctcgaaatcacgcacgagtttcccctcccaggcagtatctgccagcctcacctgtggccccaagacagctgcttcccagagcaggtcaggaaactctaatgaggctccccttccctcccctcccctccctggagcccactctcagggaccttccccaggtgagcctcccctcccaatgcgagctttctctgctttcctgcctcttctcccaaaaaactgctactcattcttcagaccccatcagcggcctcctccaggaatccttttttttaatttttttatcttttgaagcagagtctcgctctgttgtccaggctggagtgcaatggcrcaatcttggctcactgcaacctccacctccccggttcaagtgattctccagcctcagcttccctagtagctgggattataaggtgcctgccaccacacctagctaatttttgtatttttagtagagacggggtttcaccatgttggccaggctggtctccaactccgccggtctcggcctcccaaagtgctgagatgacaggtgtgagccaccgcgcccggcccaggatgccttatttacctgcctgcctaactgcccctgcagccgcggcttctgctgggacctgggataaagctgccatcacgggcatgaaggacagatgggtgacggaatggggatgttgggagaccccctggtggcagcccaggacccacaggctgtgtgaccttggacagccacctccttggacccaacacccagcccccacccagctgtgatgtgacagtgtctgcagcccagctgccttcagaacccggaacccatgattttctcccactcagcctgaccctccttccggggctagagcctcaaatggctgattcgtgaaggtcattcaggaggcaggacaccagggatggccgaggtttggcttcaggtttggtggcagggtctgaaaccatcctagtacctgcctgggctgaccttcctgccctgccctctccccagaggctcacctctgtggcctcatctctgggcaagcacctcaagctcctgtctccctgacagctgagtaaccaccacgcctctgggcctttgcacaaactctttccagatgccccgcccaagccctctgagaagccttccctggccttcaaccccaacacagcagaatgaagggtgagactcgaggggaggacagggactcaggacacacccacacacaagcctacgtcccattccaggtctccccagcagagaaaagggagttggggccatgggagcctgaagcccagaaaggagaagggactggcctacaccacacagcacagcaagggtgggcatggctttcctgcggcatcaccaaacctgctgccccatccccagcaggtgcagggagttcaggatgaacatgtcagctgggctgctgcagccacccctcaccatcgcagccctaagttcctttttccccgcccctgtcaaagacatatccaggcctcttccaagctaccctcacccatcatgggggacccccaaatttgggcagcccagcccctacccctgcagcatccagaagccaggccaggaggctccacctcctgaaggcagtgcagaagctgagggtggaggccagggtgccagcccgggcttcccttagagctccctgggagaaagtgggctacgtggtttcgggagcgaggggtgctgaagtgccaaggaagccctcaccccctgcctctgaggcccaggagggggaagtgtccacatctggcctgccagggtatgaaggcttctctatggtcacttttaaataccagcctgtcacattcggtgtcagcagcccac

SEQ ID NO: 5703 - DNA, 40987 bp, Homo sapiens
  misc_feature (1)...(40987): n = A,T,C or G, or insertion/deletion polymorphism (see Tables 1-2)
cactgcaagctccgcctcccgggttcgcgccattctcctgcctcagcctcccgagtagctgggactacaggcgcccaccaccacacccagctaatttttttgtatttttagtcgagacggggtttcactgtgttagccaggatggtctcgatttcctgacctcatgatccacccgcctcggcctcccaaagtgctgtgattacaggcgtgagccaccgcgcccagcccagattctttttttaaaaagcttcccaggtgattctaacgtgactgctcagttaagaaccactgcctcagaagaacacgggaccaaggaaacccaagaaattatttcacactctacaattacattgatatttaagagacaataaaaactttctttactttctagattgtataactctggattagttcaaactaagtaagatagaacaactttatactagtctctataaataaacaattccgtaagagtgttcaaagtatggaaattatgttgactacattaaatgaacaaatataaacaactgtaattctaattgtaaccttaaaatattggccagattaagaaacaaaagtgctccatggccaggcatggtggctcgctcccagcactttgggaggccgaggcaggtggattacctgaggtcgggagttcgagaccagcctgaccaacatgaagaaaccccgtctctactaaaaatacaaaattagccaggtgtggtggcacatacctataatcccggctactcgggaggctgaggcgggagaatcgcttgaacccaggaggcagaggttgtggtgagctgagattgtgtcattgcactccagtctgggcaacaagagtgaaactccatctcaaaaaaaaaaagaaaaagaaaaaaaagaatcaaaagtgctcctaaactggcaggatgggcatgggtgggggggtggaggaacacactattttcagacttcttttcaaatagtatttaggaaaaagaaatatttactctcttactccattacacctagattggatttcataacacctaaaaatgatacagaaattctaaatctgaaaatactgtttgaggtaaaatctgctgtaattccagacatctgcttattaagatctactgagaatgttagcaaagagggtatggagggggtagatgaaacaggaagagtagttatgctctagaaacctttaatggaactgggaaacgttagtttggggcctcctgcctgttggcagacatagccaacctccaagcacctctaattcccatctaaccaacattacattgtaggatgcctgataaagccaagcacacaagaatactaacaacagtaagcacaaattgttaatagacctttaaaaaaaatcagaacccggagaaagaaaggaaaagattcctctcagtccattaaagacaaaccaaatttctaaaagaaaaaataaggtactcaaaggacaggagaaagatggaaaattataatgctagtacagacctagaatacagtacaggcaagagtaactaaaacttctggatacaagtaaaccaatacttctttcgcaatggaagtatactcccatgaacacactactcaagtgggctaataaaaacctttgcttaaagtgcttggagatttcagaaaaaataaaacatccatgcatgactgatttgtaaccagagaagaaatgaattagaaaaatataaaaaataactgaacactctaagcactttttctcccaataaagcaaaaaaaaaaaaaaaaaaaaaaagagagagagagagagaaagaaaattcctgctagcaaagggaaagcagaacggtaaataaatgcctataatcccagcactttaggaggccgaggagggtggatcacctgaggtcagagttcaagaccagcctggccaatatggtgaaaccgtctctactaaaaatacaaaaattagttgggcgtggtggcagacgtctgtaatcccagctacttgggaggctgaggcagaagaattgccaataagggggaaaaactcaaatgtccatggatagtcaaatggataaagaaaacatggaccaggcacagtggctcacacctataatcccagcactttgggaggccaaggtgggcggatcacttgaggtcaggagttcaagacccgcctggccaacatggcgaaaccctgtctctactaaaaatacaaaaattagccaggtgtggtggcaggcgcctgtaatcccagctactcgggaggctgaagccagagaatcgcttgaatgcaggaggcggaggctgcagtgagctgaaattacaccactgcactccagcctgggtgacagaggtagactctgtctcaaaaaacaaacaaacaaaaaaaaccccagaagtataaaaaaatttaatcaataatcctgaaactgatgtttgttacaaacactttcttcttcctcctctatccctaagcaggttcaagtagcaatatctttcctttttagggagaatactattctggttattttcaaaacctattattataataaatactatatgcgaggccttgtgctaagtgctctatatacactatctcttaaaatcgtcactgtgatgactaatgtattattttcatttccattttacaaatgaggaaaaatcctaagcttaggacacacaatcagcaaatggtataaagtggagataaaaagccaggtctgtctccatagcctgtgctaataaactggagcaatattttcttagctttctcttcttaaaagactgaagttcacatgctatttggaataaatacacagaaaaggggcacaggaagtggtgcagaaagaagcactttataacttatcaagataagagcacctgcactgcttttttaaaacaaggaaaaaccctgcaataatataaaacccccaactcttttctggccctgttattgctaaaatggacaagttggtcaggcaccacctacggaccatagcaaataaatcactttggttcagtggtggggaggacattatgcaacacttcccagcacagccctggccaggatattttacggccaaggcacctcctccccagctagacagcctggctccttcacattcccctcaggagatagggtggaagctcacagctccactttgtaaggcatagagggcagctgaaagtcctgcttggcctctctgggcaaccacaggcgccaataaatcagccacaggcgattctctcattcccttcccggctgaaacaggagcaagatataatgcaaaacagcactgattggacttgagagataagcgatctaggcttaaattctactgcgaatgactgtattaccacagcccaggtaatgagcctgtttcctcaggcttgtaacatgaagacagtaccatctcctttttggtaaagacacaaagttcatctacgaaagcagctagtatgatacttggcccactgcaagtactcagtaaacagcggccaacttgagcagaatccatctctactacatgcaaataagacattcaaggtaggactggacaaaaaaggtgttagcaggttacgtgggttcctttctgttttcttcctgaccacaccttgatatttcactgactgccagctctcagaattaatctgttccatgtcatatcccatcagtgttctgttccctattaaggagttgatgtccgataacggattcacgatttacccttaactaaaatatatccagattgttaaagaagactttgatgccttaacataaggaagcaaccaatgctgcaaataatagagaacagcaatgaaattttcaggggtggctggggggtgtaggcttttagttccaaaaatacaccataggcggcctacctcacctagaaataccatcaaacccacacagtggccatgcctgacttctccataacctgaatcaagccaagtatatataatgacctccgccggatacattctctacaggtgagtggggtaaactggcactgcggtcctggcatggtggagagtgcaatcaccaaggtgtctggagccttggagtcttagctatcaagaggtgtagctagctccagctacatcacgctcttcaggcctggtgtcttctctgtaaaacgagagggatgaaacagattttctataaggcacctctcggctctaaaatttaagattccaaagtgtactttacatacatgacagaatcttgtgagaggatcaacagctctgccaggacttgagtctcaagagaaagaatgccaaatttaatcccttggggtgatgcgggcgctaactgttgaaacatgctaggtgccgtcaggttccaggtactacgttgtgctatgcgctgcctccgcaactggtaacaactgattactccaaatactgagtgccagagaagacggtgataagatgggtcaagcttcaaaaagaaaaaccggatatgcttagaacaagataaacataatttgaagatagaaaagggggggatgtcttcttgccctagaaacgaggtaatcacaagctgggagtggaaacagtagccgcagcgtcctcccagcatctggaaagtcgcccgctcgtaagaggggtcggcgctacccgagggaggccgcaggcctactggggtttcctgctgggggtcgcacccggacccgcggccgggacggctctgcaccttcgcggcaccccgtgtgccaccctgaatcaggccccggcagccgctcctacgagcagcaaagggtggttctgggtattgtcggcccagcgctcactcgcggatgtattttcctcctgtgccctgcctgacatctcaatcggaccaaaaacacccctctccccagctacttgcatctgtcccgcgactggtgcagctgcaggccgccgccctgggtggctcgcggcaggagggactgagcccggggcagcccacaggggcaggaccgcgtcgcttacccagatgccgccgcggcggcaggccgactcctccgtgcaggaggggcgggctcccaagccgcgcactgcaagcagtggcgccggctcacgcacccctcggccgcctctcgcgcggcttcccgcgccggcagcccgcgatggccccacgtgaccgcgtgtctggtagcaggggaaagaggggcgccagggccggggtgtgcgtgcgtgcgtgcgtgcgtacgtgcgcgccctcccgcccgcccgcctcagtggccgggcgggggtcggcccgcgctctgagtgccgccgccacagttcgcagttgtgactctgtaggcggaagcatagggacaagcctgagcgtcacaggctccccacaaacaaccgcgtgacccggggactttccccagggtgtgcaaaagcacaggcaccccctcagttctggggtgaaggtgggggtggggaaggatgcgcccgcgtgttcgctggggaagggatgagggcgcggggccagggaggccgagccgcgggagcctgggtggagaggcggactgggcgaggtggggcatggcgggggaagtgactcagggccagaggcagcaggcccacggaaggtggggtcgggggggcgcggggactgggcgaccctgaaccgacggggcagggcgaggttgccggagcactcgaggcggaccgcgagtgacggcccagctgctgggcccaacgggcaggggtctgacatctggacggagtgggaaagcagcctcgcatcctgccctggggagtcgggaggagcccagttccatccagctgtgcaaacaggaggaggaggaggtcccaagcctacccttgagaggggcaagaggggtggtcaagccgccgccgccgcgacggcccccgcggtgcgggttgcgccagcctcctcggagctcgacgcagaaacttgttgcaacaaacaggcgaccgcgggtgcccctagcagccagcggcagagtgggtgggcgggcgagagggaggggaaggctggcggacgccgcagcgaactggtgggcagacccggagtcgccgcgtaagcggggccggctcagtgcggtgcggcaggcgcggctgtgcggcagcggaagtcctttgttgcagcacagtccctggcagagccagagcctctccgcgcagcccagcccgagcgccgagcgccgcgcgccgccgccactgcagctcgcggccccttcgccttcgcccgcctttcccgcggctgatttgccttaaactccctaaaatctccgcagctctggttcctgttgcggccggtaagtatttgccagttgtggggctatttgcgcaactttggcccaggccggagggcgacgggccgcgggcctggcggastgcggggccggaggggcgccgatccgtgcggggagccggagcgcggcggacgcgctgcgaggacccggtgacgggcggctgccaggccgcctgcttgttgccggcgcgtcaggtcccgggcgtgcggcctccctgagtcggaggcgaagcccctacggagactagttcccaaattagttaccttcttttctttctttctctgcctttatttttttcgaggggggaggggaggtgtagacgggaggcgggagaacccggttgattgacgtgcctagagcccgcttctctcaacttacagctgcggctcggcggcgggtgggaggggaagtgtcccggagcccgaggctgcagacttgggcgcgctccgagggaggaggcgtaagatccgtgcaaattcttgttacgctgtttcccaccccctctcgccggcacacacgctttttgttcagtaaaaagtggaaggtctgagtttgggaattttaagtggaaaagatctgtttcttgggaagggagtgctttcgcttgcagcggtgggcgcttactagaagttcggtaaatgtgttggatgcagatcgggagtcgttactactaaagtatgtaggcagggtctgagctcagccaccccacccagtctccctttctacctaagcaacgcgtgtacatgatctgaagggttgacatgacattttctaaattgggcgaatcaggaagaggttgatgaaaatccttgacgttttctggggataggacatttgtgtgtgataacgttcttaagtcgaatttcagtgtggcagtgcacgcagattcttcattggtgttagtgtatttccatacggtatgtatcagtacaagaaatagtgttccctttgacactcgaacccaaggagtggtccgaggctttttgaggcaacgtaggatcaatgtctctgaagcagatttggtgaaggatgcaggtctcataatttacagagcaatcacagccttctttgaaacggagaaattagattctatgaaattttgtcagtgcagatagatatgatgtggagaaacggggaaaattgagtacaaaaagatgaggcttgaatgatggctggccaacatttgctcagaacctcaaaactttgcttttgaatcacttgctggatatctaataaagtctcaataataactggatgactttgggagctagaaagggggttcctcctcttaaagaaacaggaaactgggccgggcgcagtggctcacgcctgtaatcccaacactttgggaggcygaggcgggtggatcacccgaggtcaggagttcgagaccagcctggccaacatggcgaaaccccatctctactaaaagtacaaaaattagcctggcgtggtggcgggcgcctgtaatcccagctactcaggaggctgaggcaggagaatcgcttgaacctgggaggcggaggttgcagtgagccgaaatggcgccactgcactccagcctgggcaacaagagcgagactctgtctcaaaaaaacaaacaacaacaacaacaaaaacaggaaactgaagcatagtagaggtgaaatgcttttccaaaggttaataaacataacgtctacagtagagtcttcagttaacctcttacattcgttttatgagcaagcaggctttctccattaataccacattttcatggtattgaataactcaggttgaacagtctttcctgaagcctttctattcttcccactcctaatacgatggcctacttttttggggtttttgtggggaagggactggtgtatcattgtcagagaaaagagaaaccatatttaaccagggccttagcagggcatgagcacagtcacagccacttgctcttgaccttgtgctttgatttcagtttaacacttctaaatttttgtactgcttcctcattctcctcttttgccaggctctggggaagatatagttcatcgacctttttaagagtatctcgttttctttgtagcatcatttccctttctaatgtgcaggagaaaagaagtacctgctttcagacttgccctctagccaggaaaagcactaagcctttggtgcaaaggagaggaaactatttggtatagaaatacagaaaaatttccatagatttttgttaataagctgcaatctgttgtcttcccaaaaaaaatgaggtatatttgagaaacatcttcttgagaggtcactttggtctctatagaatgttttctcctgacattttcttctgtgctagtatctcatgctaaaatggtgaaattattttttctcatattcttatgtgaaccaaattaagggttactcgtgtctattttttctcaaaatggaaatgttttttattataaaatccatgctctttgaaaaattcagcctgtattgaagtacataaaatacaaaaatgaaagtcattttgactcccactccccagagataatcaccntgtacagttaattccttgtttaaaacgagagaaggcaacatttgatcacagctgtgtgtgcctcactctgcctggggatggcctrtggtgattcatggactcatgttctctgttcacattactcaggttggtaagaattgccaggtagaggaaaggggagtgttttgcattgggctgatttaaaattatttgattaactgggctgctattttaggtttgtccttattaaatacttactgtatcatggtgggctatttttcatactttgttcatgttaatgttgttgcccagcctctgatggattgatttacagcagccaaacacatgaaaacaaaagcaaaccctcacctttatagagagtttcataatttataattaggaaggagtgggtatacttgccatgaagaccactgccaatatatccctgtgctgatatgggatggggttcctcttgatcagcaccaaagattgcatgctgaacatatggaaaggaaattggacgaaagaagggtcaatgaccgctgttttcagatgtggcatggaagagactgatactggggaggaagcggcagggtctcactccttagccatgtgtatttaagaagaatgaactgtgaagaagttgatgatgatctaaaaacagagccccaaaatagtacatagaaagttaattacaacattggttatttgagagtgttggggacgtgggtggtttttatactactctgtctttgaatttaaaatagttttcaaaataaaatttgaagattaaagaattaaccagattttcttttgtctatatgagatgcatgcagtcgtttttagagatgagttccatccccactttgaatctgaagtattagaagaggcatgctctggtggacagtggggagttagcagatggaaggggatttagggaagggactggacattcttcctgcaagatggagcagtaagagaatgatgagagcttttagattcatgaaaaaggtgactctaggaggcttagaatgttccaaaggggcacttcagctaatagtcatattcagaagagtgttgtctggtttacacaaactgaaacttagggctttgaatcaagagtctcagcttctacttacaagataagcagttttggggaagtcagccactgaacctgtttcttcatttgcaaaatgaggataataaaaatacctatctcagggtggttgtgagatcagttgtataatgtatgggaaaatgctttaaattttaattttaattttaatttccaaccactatataaaagttgccatgattgaaataaacaaaaaattgataagcaaaataaaacttacctgtttaaacatttattcattcaaaaactcatcaagtatcaactaaatgtcagacattcagtaatgactgagatactgccctgatgtcaaggagcttgcagtaaagcaggggagccaaataattgcaatatctgccttaagygtggtaacagagcatcacagttgggatgatgcattattggtaccatattgttgtatgtataggctgttttggcagcacagaagaggcatctgcctcaccctaagatcagaaaaaacttcccaaagaggccaggcacaatgtctctcacctgtaatcccagcaccttgggaggcctaggcagrcggattgtttgatctcaggagtttgagaccagcctggccaacatggcgaaaccctgtctctacaaacaatacaaaagttagctgggcgtggtgccgcatgcctgtagtcccagctattcgagagactgaggtgggaggaacgcttgagcctggaagggcggaggttgcagtgagccgaaattgccccattgcactccagcctggatgacagagccagaccctgtctcaaaaaaaagaaaagaaaaaagaagtcccaaasagagtgagctagacattgaaaaggttctaagcaaaggaacagcatgtgtgaaatggcaaggcttttggtgtgttaggttatttgggatcgggggaatcttaaagcttaaaaatggagttaagtttcttagaatgaacatgcattttatgattttttaaaattggtttcattttgttgaatttcaattatatgattgtgatgttttcaggattttggtttgaattaaacaaaactggagccacaaaattggaaacaatacaattttttttaaaatgtgtaggatctggccgggtgtgtggtggctcacgcttgtaatcccagcactttgggaggccaaggcaggcggatcacgaggtcaggagattgagaccatcctggctaacatggtgaaaccccgtctctactaaaaatacaaaaaaaaaaaattggccgggcgtggtggtgggcgcctgtagtcccagctactctggaggctgaggcaggagaatggcgtgaacctgggaggcggagcttgcagtgagccgagattgtgccactgcactccagcctgggtgacagagcgagactccgtctcaattaaaaaaaaaaaaaaaagtgtaggatctgctcaaagaaggaaactgggtaatccctcccatcatcatagagctgtctcaccagttattcattcagtaacacttactgaatacttaatattccagagaaatgaaaaagccaaagtcctcgccttaaagttgctcacaatctcatgggggagaccaacacataattataaccaattcttatttagcacttactccatgagagatatacttaacaataattcttcagaggtagaaaggattaccatcccttcttagagaattgaagcacaaattgactaagcaaccttctcaaggtcacacacttaataagtggcagagccagaatttraacccaggcagtctggttagtttgtgctttaacacctactttatgtagctgttctgattattaaaatacagtgtaaaaagtgcaaaataaagaggtaatacacaatgagatcaaaacctaaaatagtgggagaggaaggtgttacagaggctttctgcaggaggtgataaactgatttttaaatgatatctgggaggttcagacccaaagaaccaatcggcatgagtaaaactgcaggggaagtaagaaatttatgaagtatactggatgtgtgtggaggagggtgaaggtggtgatgagcagttttatgttgcttgaacatgaagtttgaagcaggcagtaactaaacatgtaagactagatgggtgggcatggagggctttgtatgcctcaataatgattttatactttagtctgaagatatgtgaggggaaccatggtagaatagtgtgatatgatttttcttcttcatgaatcatcttcaaaacagcattgctctgggaagaaaaagattacctgagagtgaaggatttgagagactggttgagcctattttaataactcaggagtgataacagaggccttgcaagagcaggaaaggtagggatggagtagatgggcagatttgagaaatatttaatgggaaaattggcaacacttaatggttgattatgagggagaagttmtaggtagctcccaagtagtctaggtgattggtacatagtggtggcagctgagacaaaatacagggaggggcatttttaagtgggttccagacaaaatctgagtccacagaattagtactttgaaatagaagtcctacaaaacgaaccctaagaatatgaatgccatgtgcaataagggatttcctggtgaagcgtttttagctgagaaaagcctactgtttacacagtgccctctggtggtcagaagatgctgtgctgtctcgttaggatgaatggattaaaatgtacttttcctcctctgcttctggagagggagagaggaatattccagaagccactgtgttccttctgctttctgtgtgggtaagttcatttcttagaatataatgcaactgaactacaggaacatctcacttatttgtaagttatttggttggcaacctcagctatccagtgccttggcctgatgcaaaagaggaaggaaatatgatcgcctgtcagcaaaattcaggaattaaaactttacatcttatgagcatttccctagatcttcagaagatgttgtgctccctctttaggatgaatggatatgtagattcaattttcaatgagtttttgtctaatttcacagccaagaagagattgaaatggtgggccacaggagatcagcacacctttcagaagtgacagttgttggcttgcaagtaaagagacagaaaaatactaactagccaacaaagcccaatctccaaaagcataacagtctgaggccattttgtgtaggtgcaaacccttgcaaatttgaacaactactatgtttcagcaaaacataattgtttcagaggagaaaacagccagccgggtgatgctatatgtgtaggctgcagttagagtagtatgaagagccctagaccaggattgaggagaccaaggtcttatcctgacagccactaaaactaaatgtgactttgaacataccacttaacctcttagggcctcagtttgctttttgatctataaagcagtgggttgaacttgatcatttcataaaattctataaactgtaattatgacattaattttttttaaattgtactgtgcttggattgaaaaggcaaaggaacatttgtcatctctaatttatttaagagtcctctgagaagtatgattatcccaattttatagatgagaaaattgggcttaaagaagttcccgcatagctaaactagtggtagagtttgtattcaaacaaacagtatatgctctctggcttcttttttaattccttcacttgacaagcacatattaagtgtcaactatgtgggaagagtgtgctaggcacaaggaaaacaaaggccattaagccttgtccctgtctttgaggcttcagtacagtaggcattgctgtatcacactgctccttggatctcttgtcagtgctaatgatacaagtaatactactgcactgttaggcttaatatatagctccattatgtctttagggtgtgggtataaaactaagccaccatttatattattgtttctatgggaatatgtgtttcaagttccaaataaattaaaaataaagttttaggatataacccagttataattgcagaacttcctgtactaagtactgaatttggagtctaatgcacagccaccagtgcagatagtgcataaaattttctaaacttgatcgtgtttgtcacttaagtgcgttgaaataaaacctcttatctttgggagcctctacaactggttattcctggaagtttcaagragaaacctagagaatgtaatagagattggaccctataccctgcaagatggtattctaggaaagaattttgccaatgtgacattatttttatagatggcagaatctttaaggtcatgatcttgggcttagagtcatattgcctgtgttctaatcccatgaagtcctctctttgtgatattacaaaggttatataacactgtatgcctctgttatttaatcttgaaaatgagtcttatagcagcatctactttgtagggtttgttacgaggattaaatgctaaaatgatacttatatatgcatacatacacataaaatgatacctatatatggatacatacacagatatgcacacatacacacatacatgtatatacatacatgtatatatgcaatatatgtgtgcatatctcacacatatatattgcatatatccatatatatccatatgtgtatatgtgtaatgtatctgtgagagatatatatacatctccctatacatctgcctggaatagagcctggcatayagtgagacataacaaatgttagctattcatattattattgtattacagttgtcatttactctactttgataaccttcatctaccagtccagtaaagcaaatctaccttctgtcctgttacatttccagccaagctgctgtgtaccctcctcaattatttacatacacatctatataaatactcgaaatgcctcacccttgctttctgtttatcctactcattcatcaaggctttactcaaatcctacatccttcctaaagcctactattttggtataattaacgcttttcttctaaactcttgctgaactttattcaatatagtttatttttatttttatttttatgtttgagatggagtcttgctctgttgcccaggctggagtgcagtggctcaatctcagttcactgcaacctctgcctccaggttcaagcgattctcctgcctcagccccccaagtagctgggaytacaggcatccactatcatgcccggctgatttttgtatttttgtagagacagagtttcaccatgttggtcaggctggtcttgaactcctgacctcaggtgatccacccacctcagcctcccaaagtgctgggattacaggtatgagccaccgcaccggcctcaatatagtttattaaactcctcaaattgtttcttggtttcaaatttaatccctcatatacagttatctctattgtacaccatccttctccaccctccatttcaatgctctatccagtgttaggaacattatgagtattcaatagattctgatattctgatgttaaaatgtaagaatcctttcattacattttagacttttaaaatactctgtaatcctcaaatccatatgcatacatacattcaacctataagacatagaaataggtaaaaggaaacatatatacataaatcttccttgagatccagaggtaattgtaagtcagagattggggtgctgaattgggactgtgatgctaggctctctagactttcactgaggctaagcgaatcatcttcaaatgcctcattggtgctgcaagtctgtgacacaatttagagggtgattatttgcctcacagaaacactttaaaattcctttaagttacttctttattcattggatatgcttatttatagacccttaaattatcatttaccaaggctggagcaagagaaacttccagcaaaactgttatttccaatttgagagatctagcaatggaggaaaaatatttctgaaatcttactatgtcagtgagaaatttactgaaatagcttacacagtataacttagggaacacatctattgaataagactagattgacatgtatggataaagccacattacagataaagaattcagattggggtaatcacttgctcaatagcatccaaccaacaaaccctgtattaaggactcatgccctgtccttgtttagtgttctttccggaagaccatactgtatagtaccaaggaagtgccatatatagaggttattactatctgggtggtcaggagtccttagtcctagtatgtgcttcagcacagttaactataccctgatacattaaaaaccatgtatctttgccttctatggaataagaatgttagactagattagatctctctaagctctaaaaatgtatgattaaattacttaatatgcttaatgtgcttggtgactgtttttaaacttgagatgagccgttaaactttttcagactaaaattttaaaaatccagtataaaactttttggatcacctaactccttaattcttgctagagttctgcacagtgggtatccttctagccttagtgtaactcttggcattatatagcttgttttccttatccaaatgacattaagtcctttgagtcacattggaggttctgctctcagacctgagcccttgacttctagttgtgctaaacttgtcctaccagtgatgcagctagtagtacaaacaaaagcaatcacagatttcagtcgtaaaaacaagaacagctgaaatacaagctgtccatttacttaaaaccttttataggctttactagaacataaagttcattaactttttttggcagcattaataaagaggtcaaaaaaatgaaaaaagagcaaactcctcttggaatttgagtgaaattataatttaatgaaagtgaatgcctcataattttttttttttttttttgagatggagtcttgctctgtcgcccaggctggagtgcagtggcacagtcttggctcactgtaagctccgcctcccgrgttcccgccattctcccgcctcagcctcccaagtagctgggaatacaggtgcctgccaccacgcccggctaattttttgtatttttagtagagacagggtttcactgtgttagccaggatggctcgatttcctgaccttgtgatccacccgcctccgcctcccaaagtgctgggattacaggcgtgagccacggtgcccggcctcaaaaatttttaatgaaaaaattatcttcaagagataagctaaaagtctcacaggaatttagatcyctcctcccctgccgcatactcctctacctgtttttggtgtagtaatccttcttaaagcttttctgggctaggcacagtggtttatacctgtaatctcagcactttgggaggctgaggtgggaggattgcttgagcccaggaattcgagaccagcctgggcaacatagcaagacctcatcactacaaaaaatatacaaaaattagccagtcatggtggcgtatgcctgtagtgctagctattcagaaggtgtgaggtggaaggattgcttggagaatgagtacccatattaaagcaggaacagaatgctattgaggacattctgagctatgatggcaygccagcctgggtaacagagtaagaccctgtctcaaaaaaataataattaaaatttaagaaaaaagcttttctgaatgaggtgtaacaaggacagagtttctggtactaatgtgtcaatgattgctattataagttactgtgcctaaaatcagttttactcagaacttggacatttgcataataatgttacttaaactacaattctaggtcagcctaaaaactgttgtgttaggattaaaaattagacacagcatttgttcagcttccatttgttcagcttccagctctatagggggaatataggagtataaacatggatgcagtgggattcacactgtgatccgtctgactgagagcacttgttctttctactacagcatgatgccttcttctgtagagtgggcgctttgcagaatacgtgttgaatgaaatcactgatctaggaaaagtaaaaattcctcaaatgaatacagaatacttgtgctactgctgatgatcaacactttatacagtgcctggtataccaaaggtagtcartaaatgtttgttgaatgaataaatgtgcattaaaatgctataagtgctcttatttaaatgtyttagtgttttatgttaataaaagaatatgtatttttactcagttgaattgtgactatagctatagatgtgcctatcatattgatcttctatgtagttgtattaattttggttgctgatgataaaactgctgctcatctagataagaaagggtctttggaacttctgtgctctttatatcattatttcaagcctggactatttaatacttgaaagtttttatagattaactactggctttctaatggactgttatttggaaggaaattttaaggttatcaactcaaacttacctgatgcttaaataagcatcaccaccattacaacatccactattactttcattattacatgccaagcacgatgcattttacacattgcctctgtgaatcctcatatatgatactgtatttgaggtattatccctaccttttcagttcaggaaacttagggtcaatgaggataagcaagttcccaaaagtggcaaagctagataagaagccaggtctgtctgatcctaggcccatgctcttttcacttattatactgtcctcaatagcattctgttcctgctttaatatgggtactcattctccaaacaagtttgtttcattcttgaattactcttattaatagaaagtttggttttttagaaataatacctatccctctgcctcttactctatagtttattatttattaaatgtctctctgaatcctagaaaaatgactatagacatagaaatttcatcctacttaaaacgggcttgggtcaacatttttgtgtatttttttcatcttttttccccccaccttttgaataaggttgtggcgtggatttgttttatataattctaacataattatgtatcctgtgtttrtttatttggctctccatcttgaacatttttcccacttctgtagttgccatttagaaatatatatatatatatatatatatatwtttttttttttttttttttgagacagtcttgctctgtcagccaggctggagtacagtggcatgatctcgactcactgcaacctccctcagccaggctggagtacagtggcatgatctcggctcactgcaacctccctctcccaggcgcaagcaattctcttgcctcagcctcccgagtagctgggtttacaggcatgtgccaccacgcccggctaatttttatatattttttagtagagatggggtttcaccatgttggccaggctgatcttgaactcctgacctcaggtaatccgcccaccttggcctcccaaagtgctgggattacaggcatgagccactgcgcctggcccagaaatacaatttttaattcactgccacatgacagtgaattctggggcgtagatttaccttaagactcctttttttactaggcattcaaatgagaagtaactcattaatgactatctttgtgcatacattgctttttgtatttagatacatactgaacatgattcctcacagctttttacagatacctgagttacagaggtttgaaatattgtacttacttgaaacttgatctggcttccagaaaaggtgcagtggttgcaattttaagaaggcagcaggtttcatcataagccatcttcatttcaccagtcctgtatctctggctatggaactttatgtcttagaggtggcaggatgggcatataggtagtaaaaggggcgtatgacccatatgtgatcgctgaggaatggataaaaagcaaatagaagtaygtaaacgtagatacccttaattactactacagagcttgaagagtgaacattttatttctctaaacagcttgttacatgttctttttaagttcagtcaaattgcataggaacttatttttaagtagaagatagattctgaagctttatgtatacggattaaaaattgaggctaaaatttgatcttattttaactttataatatgataggatttctagtgcttttaatacttcctctcctttcttccttatccaaagtcagctccctacactaaaaatacttaaatgcccactaatattgtctaatgttaaatgaagaaaactagttgcagagaggtatatatatatatatatatatatatatatatagtatgataccatttaggttaaaaaacacaacaaaagcaaaactatgtgcctggcatctcataggtactcaatatgctaactatgtacatgtgcatctcaacaaatctgaaggtatataatccagagtgtttggaggggttacctctgaaaagaggtgtgtgatctgaggtgtgtttttattctatatgcctctatgtttgaattttttgctacttttttttttttttttgagatggagtctcgttcttgtcacccaggctggagtgtagtggcacaatctctgctccctgcaacctccgccttctgggttcaagcgattctcccgcctcagcctcccgagtagctgggattacaggcgcccgctatcacgactggctaactttttttatttttagtagagacaggttttcaccgtgttggccaggctggtctcgaactcctgacctcagcctcacccttccaaagtgctgggattacaggcatgagccaccgcgctcagccttacttttttcttttaacaattaaaaaaaaaaaaaaatagaagaggccaggtgcagtggctcacacccacaatcccagcactttggaagcccgaggcaggaggatcgcttgaactcaggagttcaagaccagcctggacaacatagcaagaccttgtctttactaaaatattaaaaaaaaaaaaacaaaaaaaaactgaatgtggtggcatgtgcctacagtcccagctactctggatgctgtggcgggaggattgcttgagcatgggagattgaggctgcagttagctatgatcatgccactgcactccagcctaggtaacagagcgagaccctgcctcaaaaaaaaaaaaaggaagaaaactttacactctaaggataaataaaataccttctcaaataaacccactgcttctttataccctgaaatgcatgttgagcaacatgagacacattctaactctatagaattattgcttctttgataattcaagaaaagacaaaggcactgatcaaacttgtttggtgccatttctatataatctaataaggttgttgttgttgttgttgttgttgttgttttgaaayggagtctcgctctgtcgcccaggctggagtgcagtggtgcgatctcggctcactgcaagctccgcctcccaggttcatgccagtctcccgcctcagcctcctgagtagctgggaatacaggcgcccaccaccacgcctggctaattttttttgtatttttagtagagacaaggtttcactgtgttagccaggatggtttcgatctcctgacctcgtgatccgcccgcctcggcctcccaaagtgctgggattacaggtgtgagccaccacacccagccctaataaggttttttwaaatttttatttttgggatagagtctcactctgtcacacaagctagagtacagtggcgtgatcatggctcaccacaacctcaaaatcctgggctcaagccatcctcctgcatcagtctcccgagtagttgggactgcaggtgcatcatcatgcctggctaatgtttttttgttttgttttgttttgtttttaaggcgagatcttgctatgttgcccaggcttaatagggtttttaaaatagattattttaacaacacatggccaatcttgtatcatctattgctccccacacccaccccatttatttttaagcatatctcagatgtatcatttcatctgtaaatactaaagtatatatatccaaaagataaggattctttttaacacaatcaaaatacctttctcacacttaaaaaatgagcaatagctccttagtattaatcatttaataagtttttcatactttacaatctaattgttaactttcagtttaagttgctgttttatttactttcattactcatatccttcaagagttgttttctttttttttttttcttttgagacagagtcttgctctgtcatccagactggagtgcagtggcgtgacrcaactcactacagcctctacctgtcgggctcaagtgatccacccactttagcctcccaagtaactgggactacaggtgatgccaccacacctggttaattttttaaacttttttgtagagaagaggtctcacactattgcccaggctggtctcaaactcccgagctcaagcaatcctcctgcctcggtctcccaaagtgttaggattacaggcgtgagccactgcactcggcctccttcaagtatttttaaattaatgtctttttttctgttcaaatttagtgtacatgttccccccaagagttgtaatgaaactaaaactgtcttttgcttttgatgcctttgttcaatatgaaaagcctgaataaatggctggatgtcttcatcttcaaatttaaaaaatgattcaagtatatattattgagttttattagaatggaaagctcttaatttcttgattgtaatagcagtcatgcaagtcacaaatcatgataaaagttaattttgtcaagtgcttttctatatcttgtttgactttaatatttttgttttacataggtctctaattaacagaagatggcaaagcccagccacagcagctatgtccttcagcagctaaacaaccaaagagartggggttttctctgtgactgctgtattgcaattgatgacatttactttcaagcacacaaggcagttctagctgcctgtagctcctattttagaatgtttttcatgaaccatcagcatagtactgcacaactgaatctcagcaacatgaaaattagtgcagaatgttttgatctcattttgcagtttatgtatttaggaaaaattatgacagctccctccagttttgagcagtttaaagtggcaatgaactacctacagctatacaatgttcctgactgtttagaagacatccaggatgcagattgttctagttcaaaatgttcctcttctgcttccagcaaacagaacagcaaaatgatatttggggtaagaatgtatgaagatactgtggctcgaaatggcaatgaagccaacaggtggtgtgcagagccaagttcaacggtaaatacaccacataatagagaggctgatgaagagtctttacaattaggtaattttcctgagccrctatttgatgtatgtaaaaaaagttccgtgtccaaattatctactccaaaagaacgtgtgtcaagacgctttgggcggagttttacctgtgatagctgtggatttggctttagctgtgaaaaattattagatgagcaygtgctaacctgtactaacagacatttataccaaaacacaagatcttaccatagaatagtagatattagagatggaaaagacagtaacatcaaagctgaatttggtgaaaaagattcttccaaaacattttctgcacagacggacaaatacagaggagacacaagccaggctgctgatgattcagcttcaaccactggaagcagaaaaagtagcacagtggagtctgaaatagcaagcgaagagaaaagcagagctgctgagaggaaaaggattattattaagatggagccagaagatattcctacagatgaactgaaagactttaacattattaaagttactgataaagactgtaatgaatccactgacaatgatgaattagaagatgaacctgaagagccattttatagatactatgttgaagaagatgtcagcataaaaaaaagtggtaggaaaactctaaaacctcgaatgtcagtaagtgctgatgaaagaggtggtttagagaatatgaggccccctaacaacagcagtccagtacaagaggatgctgaaaatgcatcttgtgagctgtgtggacttacaataaccgaggaggacctgtcatctcattacttagccaaacacattgaaaatatctgtgcatgtggtaaatgtggacaaatacttgtaaagggtaggcagcttcaggaacatgctcaacgatgtggcgagccccaagatctgaccatgaatgggttaggaaatactgaggagaaaatggacttggaagagaatcctgatgagcagtccgaaataagagatatgtttgttgaaatgctggatgattttagggacaatcattaccagataaacagtatccaaaaaaagcagttatttaaacattctgcctgcccttttcgatgtcctaattgtggccagcgttttgaaactgaaaatctagtggttgaacatatgtctagctgcttagatcaagatatgtttaagagtgccatcatggaagaaaatgaaagagatcacagacgaaagcatttttgtaatctgtgtggaaaaggattttatcagcggtgtcacttaagagaacactatactgttcatactaaggaaaaacagtttgtttgtcaaacatgtggaaagcagtttttaagagagcgtcagttgcgactgcacaatgatatgcacaaaggcatggccaggtatgtctgttccatttgtgatcaaggaaacttcagaaaacatgaccatgtacggcatatgatttctcatttatctgctggtgagactatatgccaggtctgctttcagatattcccaaataatgaacagttggagcagcacatggatgttcatctgtatacatgtggaatatgtggagcaaaatttaatttgaggaaagatatgagatcacattataatgccaagcatttgaaaagaacctgagtgattttctactgtactaatgtttagatgatagcagataaaacaccaaagcaaaggatatgagctatttaggaattgattatataagatgatttgttagaaacaaatttcaaggcccttttaactttaatatttttgtttaggattttaagtatctacatttaggtattaaatgtttatcatttttgttgtttcttaatagaattatttgtttttagtttttyttagctatgattaaaatttttaaatgtagactacaagyggttgttacccattcaatgactattaaactttagtttttcatcaataaggtgatgacttcactatttctatgtgtttttttttttttaaggttatcctgtgaaattttaaacccagaatcattggccatttctgtttaaattttaaaaattccttaagtaattatttgaaactatcccgtttgcttttagtgagttaactactctttattcccccttattaatgaaattcatattcttaaattgacaagcttattaggcaagttaggtgcactgaatctaacctttaaggttgacatgggctcaaacttggcctaaaaagattgatgaacctgaggaaatttttataaatgaatatttcctataattgataaaatattatcatttaattatcacatttaaaacttatattaagtgtaaattccagtggctttacctcacttgaaaaattagtggggataagccattttgttttgtgatattaaatttaactatgatagttaattaaaaagacatatcttgtattcattaaaaatattttaatttaaaatattctgatttctaaagtgtgttagcttatcaattatttttgtttataaatagactttaatagctctctaagaatatgacctctaaaggaaaagatgattttttacaatacatacttctggaactttgagatttgagaaagcttccatgtatattgataaatctaataaaataaagagatcaattataaacctggttgttctataaaagtagagtgcacaaaaaaatgtcttgtgttttatactgtctaagatttggaggaaatgtggcaaattgcagtttatcgccatattttattatcatttttttctgtaaaagactataaaacttgaggattataaaataatcacagagtatatcaatggaaacagtttatcattttttcagttaaagtagtagtattgttagttgttgctgacacagggtctacataattacatgtgaattaaaacattggcaaaactgacccaccaataaacacatctattgaatagaatgccttttaatgtgaattacttgcaatgtagtacccttttcataatgaaagggattttaattaactcctaattttaaaaatataaatttgtgattctgaacactaatagcattgctctttttgttcacatcatatttaaaatatgcaaatcatattttgtatacaatttacataaaagaacaagttgccaaaagaactgagagacatactggtgagtacagatttagttgaaagcattagagcaccatgtgagctcagatttgtggggatatgttgaagtgttaagtaaggataggaacagcacaggaaccaagtgcagaattcaaataacgggaagtaggcaggggacgggtagaatacacacaaaaattaaaaatttaacagcaaaagcaggaaaagtgattcatcttacccttacttagatacaatagtttatcaagtaattaaatttgaaatccaacttaaaatgaaatgtggtatgtatattactgataggaaccagataaaagttctctaacccagagaccatcagagagtggtataaagagatcagataaaccaagtttccaaactacagtatatagtatcataatggacataatttatttgagatcacttttttcgtgactcatcaaaatttttcttgcagtggctttccccattgttaaagaatagggctttttctaaatactaccactttttgaagaaacgattatctattccattaggaagggggcttaatttagtcttttgatatgtactaacagctaacaattagcaagcaaatatataaactttactctctaattttacatgactgagatgtttatagttttagaaagccatacctcaacttattttttattttatttatttatttttcttttttgagacggagtcttactcttgcccaggctggagtgcagtggtacaatcttggctcactgcaacctccacctcccagaatcaagcagttgtctgcctcagcctcctcagtagctgggattacaggcgcatgccaccacgcccggctaatttttgtatttttagtggagacagggtttcaccgtcttggccaggctggtgttgaactcctgacctcgtgatccaccggcttcagcctcccaaagtgctgggattacaggcatgagccaccgtgcccggccacctcaatttttttttctgagtttcatgttacacagaacatacctttttgttttggagctagctacagggaagcacaggcttctctagagtggaatgtacaattcttatcaaggcaaaaagttaaagactacttgctttttaaaattagggagaatgaaaaatatccagcacttttccccagcccagttccctaatatctccttcctctcctggggcagagctgcagagctgtcattccttgctgttgcttcttgccctccctgggtgtgaaggtaatgaaacaagtgtgttgaagctgccagatcttctgcctttgtaacttaggtgttcaggttccaaatctaaaaatgaaaggagaatctacacagatatatagtggaatcaaattctctttctgtctcatgaacaccatgagactcttttgctttggcccttttattctacacagcaagaaaacccagaggaatggttagcaagcttgccatcaactatagtacaatacaacttgcatgttctacgattccttagtaaacaggactaagaatctcagaaattaatagagcacaaccaaggcagcagtagattaggactcagaaatgcgtcttcatctcccccatgtttttaaggtaaaaatattcagaggccaggtgtggtggtttgcatctgtagttccggctactcgggaggctgaggcaagaggattgcttgagtccaggagttccagaccagcctgggcaacataacaagaccctatctctaaaaaaaaaatttgtttaattagcagggcatggtggcatgcagctgtagtccccagctactcaggaggctgaggtgggaggatcaatagagcctaggagttcaagggagcagtgagctatgatcatgccattacactccagcctgggtgacagagtgagactccatctctgaaaaaaattagaaatgacgcacatgggttaaatggtatatggcaaactaacagtttgagtatggacaaaaattcaattagaagaaaggatcccagaggggctaataattwaaaaaaaaaaaaagtttgctagagcagtcaggacactaattaaaaggaaaagtagaggctgggcaccagcaccttgggaggccaaggtgggtggatcacctgaggtcaagagttcgagaccagcctggccaacatggcaaaaccccacctctactaaaaatacaaaagttaggccaggcgcagtggctcaagcctgtaatcccagcactttgggaggctgaggtgggtggattgcgaggtcaggagttcaagaccagcctggccaacatggtgaaaccccatctctactaaaaatacaaaaaaattagccaggcatgttggcacaagcctgtaatcccagctacttaggaggctgaggcaggagaattgcttgaacccaggagatggaggttgcagtgagccaagatcacaccactgcgctccagcctgagtgacagagcgagactccatctcaaaaaaaaaaaattagccaggcgtggtggcgcgcacctgtaatcccagctacttgggaggccaaggcaggagaatctcttgaacttggaaggtggaggttgcagtgaactgagatcatgccacagcactccagcctgggcaacagagcaagactccatctcaaaaaaagataataatacacacgaaaaatcatgttttactgtagctgaaaaatatatgaacaggatataaaaattgaataaaaaacatttgaaaattataggtgagatgagtagggattaaaaataatatgactataattatagaatgcctatggaacaattttatgaacatgccaaggatatgcctaaataattgagatttttgtaagtaatgatgagagaggaaaaagtaattgagatattatcttttatattctaaaaaaaagtaggaagagaagctggtggtggttgacaactttttccctggttaaacaatactcatttctctaagtcagtagttaaggaactttgtatttaataaatttctggaaaatcttccccaaaaccagtttagccattgtaatatttaaattaaacataaaacttgtgtcgttgttaacaaaaagccaaatcactaccaaaagaaaaaaatctgagtgtatgtgcacacatggttaagaataaagaaatctggtatacctaattttaactgggtttttatcatgaattaaaagttaaaacatttttcttttcttttttttttttttttttttgccattcatctattttgatcagttagttcctcaactttccttactactcccatctcctttgtaacatatacttctcagtaataaatggccagtgctctccagacatcctagcatcaacaacttctgggattgcagggtaccaaaaagctctgggggaacatacccttgtagaatccctcccacatccttgataacctgaggtgcagtaaactggggatgataggatgaatgccaggaaactaaaacaagtagggttatatttggtgttaagaacttgaaattgcatcccatatttggaaacccatgatccatccatcctagggctctcacttaataaccccagcatccatttatttagcactctctatactctgcaaagtgctctacatacataattttaattaatccccacagccttatgaggtaagtatcatactaattttccagatgggggactgaggttcagagagattatttttcctaaatcacacagaaactatgtatcttagaactggagtttgaacctaggtttctgacttctacattcctgtactccacctatcaagaagtacaaagaagggccttttcagcctagaaacacatgtgataaarctcctatgagattgtgctccttgttcatctgtcatctgctgtgctggtaaggtggctagtaatagtgggtacccaattaacatgctgaataatgtgaaaacgtgagtggaaaacaaaactttatttaaatggttgattcagaatgatgttttagaaataaatattaaatgctgttatgttttgattttccttcatttaaacttaaaacagttagtggtactgtcagcctttttgaggggcccatagtaggtgggctcaattaaaaattaatttgaattcaacttccacatttctatgtctgtgaccttttcttcctttatttcccctattcctgtcctttatgttttaatctctcccgccaatctccatttccttttattggttataagactgttgagttgaaggactcaaatcatttgaaaataaatattcccaagaaaaagcaggataacagaataaccagtttcctctttttgccttaacagattatgtggataagaaattcatcatcttagccaggcacagtagctcatacccataatcccagcactttgagagactgagttgggaggattgcttgagcccaggagtttgagactagccctggcaacacagcgaaaccccatctctacaaaaatttaaaaattagccgggcatggtggtgcatgcctgtagtcccagttacttgggaggctgtggtcagagaattgcttgagcctgagaggtcaaggctgcagtgagccgtggttgtgtcactgcactccagcctgggcaacagagcgagaccctgtckcaaaaaataaaaacaaataaattcatcatatctttgactaataaacagaagaacccccttccccagttaccataggtgattgatttgattaagatttatagagcaatctaagtttgcctaaaaacaaatgttggttagtctagccacttataattcaatttcccaaaatacctatggatttttagggtaaacttatagagacagttttactcataaaacaaatgaaagataatttcaggaaatgacacatagctgcataaccaccctaacctagcagcaaactttaaaaaaggttatttaatggtttaagtgaaacaatctccctcaatctaatattattttaactttatgcgtctattaccttatttctatactactatgttaaacctactactttaatgatctggctaccgtctgccaaatgtcacttttcaagtgagaacagaagaatgagatwgtgaagattcygtggacaatgtctatataatcatttaagtgttaaatataaactaaatgacaatagcagcttgtaaattaatgctaattctggctgggagcagtggctcaggtggctcatgcctgtaatcccagcactttgagaggccgaggcaggtgaatcagctgaggtcaggagttcgagaccagcctggctaacatgatgaaacctctctactaaaaatacaaaaaattagccgggagtggtggcacatgcctgtagtctcagctactctggaggctgaggcgggagaaccgcttgaacctgggagatggaggttgcactgagctgatatcgtgccactgtactccagcctgggagacagactccgtctcaaaaaaaaaaaaaattaatgttaattttgaacaaacttaatatcacttacatttatatgcacacaattggttgaatttagcattaagaagtttaaatcttacttaagttgttctcttattcaggagaaccaaatcactgaagtcaattagtagtgtcaaaattgctcattctttccatcaaaatctaccacagatcactaagggacagaaagccattataatttctcattatccatctcaattgctgaccaaaaaagatagtatgaagattacaattaaatacttggctctgaactgaacatatcaatgtactaatcattattgtattaagtgaaaacacaggaatgtctagggccaagggatgaccaaaatttaaaagattatttcatatcagagtcagggatattaataattttatgtgagaaaatttgcagtttgttttctcctatttgaggaaggaacagttaattatacagcttaaaaagcccctacttacttaaaaagttaacatgtttttattctccttaaactaactgctcatatcaaacacaatcaggagagctcatttttagatgatagaaacattaattctaagcatccagattatgaaccatcttttttttcaaatgcttatgtttaaaaaattttaaaaaaattaaggatcttattatgagggaaaagcactgttgccaaaaatataattttactcagaatcactagggcagattaggaggcttataagcctaggaatttgcaggaaaacccctcctcttcttttgtgcgtgtatgtgtgtgtgygtgtatgcttcattttcatttgcagagtggctgaagacagtaaaaagaatatgaactttaaaaaaattgttagatttatgtttcaatcagagatttgtcattaacaagttaaagtacattgtaaaatcattttatttgaaggaaaacacttcttaactgcttccttcctccctactttcctctatttgtctgacccctatctttttttatgttatatatttatatgtcctgctgatagattaataagaacatcttatatttgaatggtacgagttacattcgggaaataattaaatttaaattctaggggctatgcttgtgtttctattctctrttctgttaacagtgtgttggcctagtgccaaagccaagaaattctgatctaagaattatgttgtatcttgtagagcagtcaacttgtaatattatttttcttgagttttgtctttttctgtgtggcagtggtgaaatagggccttctaaacctgtggagaagtgagagatctgaatttggagaggacatggggaagaatcaatcttcaacagataatctttaagtacagacccaggaatatcagatctgaagtggcaccatcttttctgtcttcctgacaaacttccatcaacccaaaaagttccagttgcaaagatccaagaaaactcagtaaagatcactttggaatcactttgttgtaacaaaattgattcatggtgactctaatatttgtgtaaatctgctgaagaaaagtaactagaaaattcatacaacatcagtggttacagctatactaaaataaaactttatatgctaattatcttcaagggtctttctaaaataaaaggggttgttaggctactgcaaatataaagagacataatcacaaatctatttatatagatataaataattctaaacttaaaatcactagaattatagcttaaatattatgaaatgtacttagtcaacttaaaaacttacaccaaaaatctgtagtttagagtgtaagaagtaatgggtacagagaaaaaaaatttaagaccaatattttaacaggataatttggttattactcactatagtaaaacacttgcccttcttccttttccactgtatatgccagtcacaatcttgatcatttatatgaatgaaactcccttttaaacctgttaacttgaaggagaacagaaatggtattacttcaatagtggtagatttccacaaatcagacacattattttcttctgaacttggcaatataacctaataaggcagaataagtttctgttaaaatacttattctcaatatttatgtataaaccatgcttctcagctttcaaatttcaagataaaatttaagtattcagtaaaatgatggttaacatgttttaaaaaatctttaatggagaagttaaatatttggtgagattttagtctggctataaatgctttgtttgatatatatatgtgcacatatatatattacttaaccatatgaattttatttccttattctgaatatacttgtagttttacttctttctgtttatgtacccaattccttatgattattttgtttcttctgcaatatcaagatgttatttattttgagaaatgcttatttttatgactatttattccaatgttttaacaagaagcacagagatttatagtattcttaatagtatgtgcagaagttacatcatttaaaaaacccttgctgtaaagtaggataacttgaatattcattctaataattagactaagtgaaaatctgagaaagagttaattgcaatgtgatagtgggtagaaaggagagaaaaacccactgaagggttcaaatacatgtgaattctactgctttaagagaaataaaacaaataagcctagggaaatattagagtctaaaaaaccctagagttamtctcttttgggaacataaggaggtatacagaactgcagacctctaaacataagtaggaaaaagaaaaataaaagaatattaccaataattaaaggtgccagatcaaaatagtaataaatcaacaaataatttttgattgactggtggaattagatttactaaataaaaatggcttaaattttgactgtactaactataaatgtaatgaattataataattataaatggtataaatgcattctacaatgtgattattttctgtattttagtatatagtataaaatggaattattgggttaaagtacttttattacatttcttaatccattgtttttacctaataaaatttcctcctctatattccaaagttaaattgtctgtatattacttttatttatactgtattttttccaatctggccatttaaaaaaattattagtttgaaaattattaactccttccatcctctaataccacaataataaagtatctgatatagctaattatgatgttctcaggtagcttaagatgtgcacaaagagaattagctaaaattcttattgccagatcctgatttctttcaatatagaagaatgatctgttactcagcctggaaagtagtgccaagattatagctcactgtaacctcagacttctgggctcaagggatcctcccaccttagccaccctagtagctaggactatagattcccaccacgatgcctgctaatttttaaaattttttgtagagatggggtctccctgtgttgcccaggttagtcttgaactcctgggctcgagtgatcctcctgcctttgtctcccaagtgctgggattacaggtatgagccactgcatctggcctggatttccttcttaatacacaaagaaataattatttataaatatccattgataaagtgtttagctctttcagaggcttaattcatttttcaagtaaacacaatttactgtcagagaaataactactttgccagtataattcatttttttttcagtttaagaattaaataagtattaacaataattgcatattgaatctgattctccaagtataggacagcctcacttcttccagattatttcaatctattccacaagggtctataaggttagcactaaaagttgaagtaggtataatttgtctgctgttgtcatagattaacttctcttttggaaaaagccttccaggttcaggtctcttacccttccataccaggcatggaaatgtcttaccccagcctactgtgtatctacagcttaagtgtaacttcaagactgaattttttaagactcaaagaaacaaatggcaagttttttcctgtagtgataggtgaagaaatattttaggacacagcactttgtaagaattataaaatggcagtatttatagagatcttaaagataatcattagttgaatttcagtttgctcaagggccctcaaattagaggctgttattccatcttttcttcaggccaacattatctccttaagataatctacaacccttgtgaaggttgttcctgggtagagactgagaggattttaggaaaattcacgagttggggtttttttccctagtaattctgcaaaaatgtattattgctcagtctccttagggcaggtctaacacccaggcacatagttttaggccgtatcttattcacctttgtatctctagtacaaatattttcagatatgaatttgtttcaacttttggtctctgcagtgtcatttagtacagaaatataagaggtaggcagtgtatcttcctactataaagaaaaaaactaaattttttttttgttaaataatgtgtctcaggtcacttttaataaatactaagctagtgatttactactgctttccaggcactcttctgggtgctaggaattaattacagaggatttgacatatgttaaagctcttgttttttccaccatttaatctgtggagccttagtctttggattttaaaaatactttgaaacaccctagtatttataatctgccaaagagagagttcacttgttgaaaatcagcaataatttctatgtaagactaatagactttgtttcaactgttgatatggtttggctgtgtccccacccaaatctcaccttgaattgtagctcccataattcccatgtgttgtggtgaaagataattgaatcatgggggcggtttctcccatactattctcgtggtagtaagagctgatggttttataaggggaaaccccttttgcttggttctcattctctcttgcctgctgccatgtaactggtggtagtgagtaagatctgatttttttttcagcatccaaaatctttttattaagagggtaggatccaaggttagtttttgtagcctcggctggcctgtcggcctctgatgcactcgaacttccagcccttggagcagacatagggtttggtgtggctgtgcggggttcccgggccttgctgaaatgctggtacacctttcggcccttgcaaatactggagagcaggacagtaccgcagccctcgggggagtccaccccttttgcttggttctcattctctcttgcctgccgccatgtgcctttcgccttctgccgtgattgtgaggcctccccagccatatggaagtgtgagtccactaaacctttttttcccttatagattacccagtctcgggtgtctttatcagcggcgtgaaaatggactaatgtagctgttaatagtcaagttctcaaaatcaattgtaaaagcacagtaaggaaacttagaaaaattactgataattctaccttctagataaccaattttgatgcattttaaatctatattagattatcctacatataagaagatacaagtttcatatattttattcacttaattataccaagaacatttttccgtgtcattaaaaatcttgtaaaccatttttacggctgcgtaagaattcatcatatgcatgtactataatttaggtaatctcttatttttggatatttaaaccatttcctttctattatcattaacataaataatactacctgcattttctattatttccttagaataaatcccacaatgagtaatgctaaataaaaggcatgatcatatttaatgtaaagaaaaaatattggccaggtgtggtggctcactactgtaatcccagcactttgggaggctgagactggtggagagcttgagctaaggagttcgagaccagactgaccaacatggcaaaactccatctctacaaaaatacaaaaattagccgggcttggtggtgcatgcctgtagtcctaactactccggaggctgaagtgggaggatcgcttgtgcaagctgtgagcctgccactgcattccagcctgggtgacacagcaagtccctgtctcttaaaacaaacaaacaaatttttaaaaacccaaaatacaaatacagtgtcttttttgggaaaagcttaggatgcctcttaaactatggaacatacaaaacacaagttagggcagaaaaaaatatacatggctaatgaaaatgtgggtataattgctactgtggtttcagaaacctgtgttaaagatgaatgtggtggtcagattgcaagatgtgtttgtaatatctgggcacagaggtagcacagttattgtgcaaaagaaactattcctctgaagctctaattttagtgattctatgtgagaactctggcctgcttgctcttttgcaatcttggtttgcttgaggtgtgttgagggctgactgaatgcaagagatttaaagaatttgtgtttctcacattctttgtttcagttgtagctgagactgtatctctaagtcatatatcatcagttctacaaagaatatgcattgcttccagcccactaattcccttttctaaaaaaacaaagaaaagaaaagaaagaaagaaagaaaaagaaggaaagaaagaaagaaagagaaagaaaagaaaagagagaagaaaaactcaggcctgtaatcccagcacgttgggaggccaagatgggcagacaatttgaagtcaggggttcgagaacagcctggcaaacatggtgaaaccctgtctctaccaaaaatataaaaattagatggacgtgctggtgcacataagtaacccagctatctggaaggctgaggcacgacaatctcttggaccaaggaggcagaggttgcagtgagccactgcactccagcctggcgacagaacaagactctgtctcaaaaaaaaccaaacaaataccccccacccccaaactacacaaaagacaagaatttccaagaataaaatcaagagatctgtactcacaatttatgacagtttcaattagaaaagtctgggttttatccttgttttcctaatattttcttttctttttctttttttttttagacagagtcttgctctgtcgcccaggctggagtgcagtggcgtgatctcagctcactgcaacctctgcctcccggattcaagcaatcctctgcctcagcctcccaagtagctgggattacaggcgcccaccaccaggcccggctaatttttgtatttttagtagagacagggtttcaccatcttggccaggctggtcttgaacttctgacctcgtgatccacgcgcctcggcctcccaaagtgctgggattacaggcatgagccaccgcgtccagcctttctaatattttctttaaaacgtcccctttttcaaaattttttcaaattcatggaaaagaggataggaattatggttaaaattagtactaactgatgacattaaccgattaataaccaattatgttcttaaaaactggaaatgatatacaccactagataaaataatcttaaatgttcattgactttatagaattctctcaacattactttttggtcacagataacttctgggttgacaaaagcttttctccagcgccatttcatacagcttttacatggctgcacatcactagcctgctttaaaggacggtgctcccagcccaaagcctcaggaaaaagaccatggctcaaaaagctctgagatgtatcctatccacctgaagagcctattgcttgcctgtatccctcccttctagtgacactaatcttctgtacagaaatcctagtccagcaaacattgctctcatcttcgcccatacacaatctatgtaaagaatggctttcctactctttgctggcgaacttcagctcccggattaggcatgccacctcttccaggtagctctcagcaacgcacttttccatcagcctgggtgtgcccctctgtgttcccatggcgctttgctttcagcgcttctcccaaattatgtttacctgtttattagactctccacctctgaagaccaggccatttcatttggctttttactgccacgtagtaggtacctgttcaagcttgatggaaggacttccccagcctccccacacatattatgtaaagtgatcgctgtctttgcttcctcctggagaccatttattttatttttttgagacggagtctcgttctgtcgcccaggctggagtgcagtgtcgcaatctcgactgactgcaacctctgcctctcgagtagctgggactacaggcgcgcgccaccacgcccggctaatttttgtatttttagtagagacggggtttcaccatgttggccaggctggcctcgaacttctgacagcaagtgatccacctaccgcggcctttcaaagtgctgaaactacaggcatgagcctccacacccgtccaggagcccatttatatgggagcctgcttctaaagattattacctggtgccagggtattttccagacctgtcctcacattcctgttaaacaggaggaagtgaatcgcgctccttttcatctaccttctcggagggtttatgcctccaatattaacctcagcacagccaaagaaaatcattccattccattgagcggagtcagaaacatgactaggtcacgatcacaaccccgtgtgtgccagggtgaccgagactgggtgactttatggtgtttcaacgtgtgggttttgactgattatattatgggttttccagtcaaaaactcaaagcagtggataaagcacttgcgacctaaaataagcaatggaatgaacaggaaggcgaaaccagagtttaaagcggcaggacaaacaggaaaaaggaagagtgaggcaggaagggtttaaatgcaggctcctcggaggacaagtcgccgccacacccctgtctgccgtcccgccagccgccctcacgcggcgcgggaaaacggtcggcctcgccctgggctcaggttctctccgcccgccaggcagtggggtttttttttg

SEQ ID NO: 5704 - DNA, 67088 bp, Homo sapiens
  misc_feature (1)...(67088): n = A,T,C or G, or insertion/deletion polymorphism (see Tables 1-2)
tacataaagtaggtgttaaagcacaaactaaccagactgcctgggtttaaattctggctctgccacttattaagtgtgtgaccttgagaaggttgcttagtcaatttgtgcttcaattctctaagaagggatggtaatcctttctacctctgaagaattattgttaagtatatctctcatggagtaagtgctaaataagaattggttataattatgtgttggtctcccccatgagattgtgagcaactttaaggcgaggactttggctttttcatttctctggaatattaagtattcagtaagtgttactgaatgaataactggtgagacagctctatgatgatgggagggattacccagtttccttctttgagcagatcctacacttttttttttttttttaattgagacggagtctcgctctgtcacccaggctggagtgcagtggcacaatctcggctcactgcaagctccgcctcccaggttcacgccattctcctgcctcagcctccagagtagctgggactacaggcgcccaccaccacgcccggccaattttttttttttgtatttttagtagagacggggtttcaccatgttagccaggatggtctcaatctcctgacctcgtgatccgcctgccttggcctcccaaagtgctgggattacaagcgtgagccaccacacacccggccagatcctacacattttaaaaaaaattgtattgtttccaattttgtggctccagttttgtttaattcaaaccaaaatcctgaaaacatcacaatcatataattgaaattcaacaaaatgaaaccaattttaaaaaatcataaaatgcatgttcattctaagaaacttaactccatttttaagctttaagattcccccgatcccaaataacctaacacaccaaaagccttgccatttcacacatgctgttcctttgcttagaaccttttcaatgtctagctcactctgtttgggacttcttttttcttttcttttttttgagacagggtctggctctgtcatccaggctggagtgcaatggggcaatttcggctcactgcaacctccgcccttccaggctcaagcgttcctcccacctcagtctctcgaatagctgggactacaggcatgcggcaccacgcccagctaacttttgtattgtttgtagagacagggtttcgccatgttggccaggctggtctcaaactcctgagatcaaacaatccgcctgcctaggcctcccaaggtgctgggattacaggtgagagacattgtgcctggcctctttgggaagttttttctgatcttagggtgaggcagatgcctcttctgtgctgccaaaacagcctatacatacaacaatatggtaccaataatgcatcatcccaactgtgatgctctgttaccacacttaaggcagatattgcaattatttggctcccctgctttactgcaagctccttgacatcagggcagtatctcagtcattactgaatgtctgacatttagttgatacttgatgagtttttgaatgaataaatgtttaaacaggtaagttttattttgcttatcaattttttgtttatttcaatcatggcaacttttatatagtggttggaaattaaaattaaaattaaaatttaaagcattttcccatacattatacaactgatctcacaaccaccctgagataggtatttttattatcctcattttgcaaatgaagaaacaggttcagtggctgacttccccaaaactgcttatcttgtaagtagaagctgagactcttgattcaaagccctaagtttcagtttgtgtaaaccagacaacactcttctgaatatgactattagctgaagtgcccctttggaacattctaagcctcctagagtcacctttttcatgaatctaaaagctctcatcattctcttactgctccatcttgcaggaagaatgtccagtcccttccctaaatccccttccatctgctaactccccactgtccaccagagcatgcctcttctaatacttcagattcaaagtggggatggaactcatctctaaaaacgactgcatgcatctcatatagacaaaagaaaatctggttaattctttaatcttcaaattttattttgaaaactattttaaattcaaagacagagtagtataaaaaccacccacgtccccaacactctcaaataaccaatgttgtaattaactttctatgtactattttggggctctgtttttagatcatcatcaacttcttcacagttcattcttcttaaatacacatggctaaggagtgagaccctgccgcttcctccccagtatcagtctcttccatgccacatctgaaaacagcggtcattgacccttctttcgtccaatttcctttccatatgttcagcatgcaatctttggtgctgatcaagaggaaccccatcccatatcagcacagggatatattggcagtggtcttcatggcaagtatacccactccttcctaattataaattatgaaactctctataaaggtgagggtttgcttttgttttcatgtgtttggctgctgtaaatcaatccatcagaggctgggcaacaacattaacatgaacaaagtatgaaaaatagcccaccatgatacagtaagtatttaataaggacaaacctaaaatagcagcccagttaatcaaataattttaaatcagcccaatgcaaaacactcccctttcctctacctggcaattcttaccaacctgagtaatgtgaacagagaacatgagtccatgaatcaccayaggccatccccaggcagagtgaggcacacacagctgtgatcaaatgttgccttctctcgttttaaacaaggaattaactgtacanggtgattatctctggggagtgggagtcaaaatgactttcatttttgtattttatgtacttcaatacaggctgaatttttcaaagagcatggattttataataaaaaacatttccattttgagaaaaaatagacacgagtaacccttaatttggttcacataagaatatgagaaaaaataatttcaccattttagcatgagatactagcacagaagaaaatgtcaggagaaaacattctatagagaccaaagtgacctctcaagaagatgtttctcaaatatacctcattttttttgggaagacaacagattgcagcttattaacaaaaatctatggaaatttttctgtatttctataccaaatagtttcctctcctttgcaccaaaggcttagtgcttttcctggctagagggcaagtctgaaagcaggtacttcttttctcctgcacattagaaagggaaatgatgctacaaagaaaacgagatactcttaaaaaggtcgatgaactatatcttccccagagcctggcaaaagaggagaatgaggaagcagtacaaaaatttagaagtgttaaactgaaatcaaagcacaaggtcaagagcaagtggctgtgactgtgctcatgccctgctaaggccctggttaaatatggtttctcttttctctgacaatgatacaccagtcccttccccacaaaaaccccaaaaaagtaggccatcgtattaggagtgggaagaatagaaaggcttcaggaaagactgttcaacctgagttattcaataccatgaaaatgtggtattaatggagaaagcctgcttgctcataaaacgaatgtaagaggttaactgaagactctactgtagacgttatgtttattaacctttggaaaagcatttcacctctactatgcttcagtttcctgtttttgttgttgttgttgtttgtttttttgagacagagtctcgctcttgttgcccaggctggagtgcagtggcgccatttcggctcactgcaacctccgcctcccaggttcaagcgattctcctgcctcagcctcctgagtagctgggattacaggcgcccgccaccacgccaggctaatttttgtacttttagtagagatggggtttcgccatgttggccaggctggtctcgaactcctgacctcgggtgatccacccgcctcggcctcccaaagtgttgggattacaggcgtgagccactgcgcccggcccagtttcctgtttctttaagaggaggaaccccctttctagctcccaaagtcatccagttattattgagactttattagatatccagcaagtgattcaaaagcaaagttttgaggttctgagcaaatgttggccagccatcattcaagcctcatctttttgtactcaattttccccgtttctccacatcatatctatctgcactgacaaaatttcatagaatctaatttctccgtttcaaagaaggctgtgattgctctgtaaattatgagacctgcatccttcaccaaatctgcttcagagacattgatcctacgttgcctcaaaaagcctcggaccactccttgggttcgagtgtcaaagggaacactatttcttgtactgatacataccgtatggaaatacactaacaccaatgaagaatctgcgtgcactgccacactgaaattcgacttaagaacgttatcacacacaaatgtcctatccccagaaaacgtcaaggattttcatcaacctcttcctgattcgcccaatttagaaaatgtcatgtcaacccttcagatcatgtacacgcgttgcttaggtagaaagggagactgggtggggtggctgagctcagaccctgcctacatactttagtagtaacgactcccgatctgcatccaacacatttaccgaacttctagtaagcgcccaccgctgcaagcgaaagcactcccttcccaagaaacagatcttttccacttaaaattcccaaactcagaccttccactttttactgaacaaaaagcgtgtgtgccggcgagagggggtgggaaacagcgtaacaagaatttgcacggatcttacgcctcctccctcggagcgcgcccaagtctgcagcctcgggctccgggacacttcccctcccacccgccgccgagccgcagctgtaagttgagagaagcgggctctaggcacgtcaatcaaccgggttctcccgcctcccgtctacacctcccctcccccctcgaaaaaaataaaggcagagaaagaaagaaaagaaggtaactaatttgggaactagtctccgtaggggcttcgcctccgactcagggaggccgcacgcccgggacctgacgcgccggcaacaagcaggcggcctggcagccgcccgtcaccgggtcctcgcagcgcgtccgccgcgctccggctccccgcacggatcggcgcccctccggccccgcastccgccaggcccgcggcccgtcgccctccggcctgggccaaagttgcgcaaatagccccacaactggcaaatacttaccggccgcaacaggaaccagagctgcggagattttagggagtttaaggcaaatcagccgcgggaaaggcgggcgaaggcgaaggggccgcgagctgcagtggcggcggcgcgcggcgctcggcgctcgggctgggctgcgcggagaggctctggctctgccagggactgtgctgcaacaaaggacttccgctgccgcacagccgcgcctgccgcaccgcactgagccggccccgcttacgcggcgactccgggtctgcccaccagttcgctgcggcgtccgccagccttcccctccctctcgcccgcccacccactctgccgctggctgctaggggcacccgcggtcgcctgtttgttgcaacaagtttctgcgtcgagctccgaggaggctggcgcaacccgcaccgcgggggccgtcgcggcggcggcggcttgaccacccctcttgcccctctcaagggtaggcttgggacctcctcctcctcctgtttgcacagctggatggaactgggctcctcccgactccccagggcaggatgcgaggctgctttcccactccgtccagatgtcagacccctgcccgttgggcccagcagctgggccgtcactcgcggtccgcctcgagtgctccggcaacctcgccctgccccgtcggttcagggtcgcccagtccccgcgcccccccgaccccaccttccgtgggcctgctgcctctggccctgagtcacttcccccgccatgccccacctcgcccagtccgcctctccacccaggctcccgcggctcggcctccctggccccgcgccctcatcccttccccagcgaacacgcgggcgcatccttccccacccccaccttcaccccagaactgagggggtgcctgtgcttttgcacaccctggggaaagtccccgggtcacgcggttgtttgtggggagcctgtgacgctcaggcttgtccctatgcttccgcctacagagtcacaactgckaactgtggcggcrgcactcagagcgcgggccgacccccgcccggccactgaggcgggcgggcgggagggcgcgcacgtacgcacgcacgcacgcacgcacaccccggccctggcgcccctctttcccctgctaccagacacgcggtcacgtggggccatcgcgggctgccggcgcgggaagccgcgcgagaggcggccgaggggtgcgtgagccggcgccactgcttgcagtgcgcggcttgggagcccgcccctcctgcacggaggagtcggcctgccgccgcggcggcatctgggtaagcgacgcggtcctgcccctgtgggctgccccgggctcagtccctcctgccgcgagccacccagggcggcggcctgcagctgcaccagtcgcgggacagatgcaagtagctggggagaggggtgtttttggtccgattgagatgtcaggcagggcacaggaggaaaatacatccgcgagtgagcgctgggccgacaatacccagaaccaccctttgctgctcgtaggagcggctgccggggcctgattcagggtggcacacggggtgccgcgaaggtgcagagccgtcccggccgcgggtccgggtgcgacccccagcaggaaaccccagtaggcctgcggcctccctcgggtagcgccgacccctcttacgagcgggcgactttccagatgctgggaggacgctgcggctactgtttccactcccagcttgtgattacctcgtttctagggcaagaagacatcccccccttttctatcttcaaattatgtttatcttgttctaagcatatccggtttttctttttgaagcttgacccatcttatcaccgtcttctctggcactcagtatttggagtaatcagttgttaccagttgcggaggcagcgcatagcacaacgtagtacctggaacctgacggcacctagcatgtttcaacagttagcgcccgcatcaccccaagggattaaatttggcattctttctcttgagactcaagtcctggcagagctgttgatcctctcacaagattctgtcatgtatgtaaagtacactttggaatcttaaattttagagccgagaggtgccttatagaaaatctgtttcatccctctcgttttacagagaagacaccaggcctgaagagcgtgatgtagctggagctagctacacctcttgatagctaagactccaaggctccagacaccttggtgattgcactctccaccatgccaggaccgcagtgccagtttaccccactcacctgtagagaatgtatccggcggaggtcattatatatacttggcttgattcagkttatggagaagtcaggcatggccactgtgtgggtttgatggtatttctaggtgaggtaggccgcctatggtgtatttttggaactaaaagcctacaccccccagccacccctgaaartttcattgctgttctctattatttgcagcattggttgcttccttatgttaaggcatcaaagtcttctttaacaatctggatatattttagttaagggtaaatcgtgaatccgttatcggacatcaactccttaatagggaacagaacactgatgggatatgacatggaacagattaattctgagagctggcagtcagtgaaatatcaaggtgtggtcaggaagaaaacagaaaggaacccacgtaacctgctaacaccttttttgtccagtcctaccttgaatgtcttatttgcatgtagtagagatggattctgctcaagttggccgctgtttactgagtacttgcagtgggccaagtatcatactagctgctttcgtagatgaactttgtgtctttaccaaaaaggagatggtactgtcttcatgttacaagcctgaggaaacaggctcattacctgggctgtggtaatacagtcattcgcagtagaatttaagcctagatcgcttatctctcaagtccaatcagtgctgttttgcattatatcttgctcctgtttcagccgggaagggaatgagagaatcgcctgtggctgatttattggcgcctgtggttgcccagagaggccaagcaggactttcagctgccctctatgccttacaaagtggagctgtgagcttccaccctatctcctgaggggaatgtgaaggagccaggctgtctagctggggaggaggtgccttggccgtaaaatatcctggccagggctgtgctgggaagtgttgcataatgtcctccccaccactgaaccaaagtgatttatttgctatggtccgtaggtggtgcctgaccaacttgtccattttagcaataacagggccagaaaagagttgggggttttatattattgcagggtttttccttgttttaaaaaagcagtgcaggtgctcttatcttgataagttataaagtgcttctttctgcaccacttcctgtgccccttttctgtgtatttattccaaatagcatgtgaacttcagtcttttaagaagagaaagctaagaaaatattgctccagtttattagcacaggctatggagacagacctggctttttatctccactttataccatttgctgattgtgtgtcctaagcttaggatttttcctcatttgtaaaatggaaatgaaaataatacattagtcatcacagtgacgattttaagagatagtgtatatagagcacttagcacaaggcctcgcatatagtatttattataataataggttttgaaaataaccagaatagtattctccctaaaaaggaaagatattgctacttgaacctgcttagggatagaggaggaagaagaaagtgtttgtaacaaacatcagtttcaggattattgattaaatttttttatacttctggggttttttttgtttgtttgttttttgagacagagtctacctctgtcacccaggctggagtgcagtggtgtaatttcagctcactgcagcctccgcctcctgcattcaagcgattctctggcttcagcctcccgagtagctgggattacaggcgcctgccaccacacctggctaatttttgtatttttagtagagacagggtttcgccatgttggccaggcgggtcttgaactcctgacctcaagtgatccgcccaccttggcctcccaaagtgctgggattataggtgtgagccactgygcctggtccatgttttctttatccatttgactatccatggacatttgagtttttcccccttattggcaattcttctgcctcagcctcccaagtagctgggattacagacgtctgccaccacgcccaactaatttttgtatttttagtagagacrgtttcaccatattggccaggctggtcttgaactctgacctcaggtgatccaccctcctcggcctcctaaagtgctgggattataggcatttatttaccgttctgctttccctttgctagcaggaattttctttctctctctctctctctttttttttttttttttttttkygctttattgggagaaaaagtgcttagagtgttcagttattttttatatttttctaattcatttcttctctggttacaaatcagtcatgcatggatgttttattttttctgaaatctccaagcactttaagcaaaggtttttattagcccacttgagtagtgtgttcatgggagtatacttccattgcgaaagaagtattggtttacttgtatccagaagttttagttactcttgcctgtactgtattctaggtctgtactagcattataattttccatctttctcctgtcctttgagtaccttattttttcttttagaaatttggtttgtctttaatggactgagaggaatcttttcctttctttctccgggttctgattttttttaaaggtctattaacaatttgtgcttactgttgttagtattcttgtgtgcttggctttatcaggcatcctacaatgtaatgttggttagatgggaattagaggtgcttggaggttggctatgtctgccaacaggcaggaggccccaaactaacgtttcccagttccattaaaggtttctagagcataactactcttcctgtttcatctaccccctccataccctctttgctaacattctcagtagatcttaataagcagatgtctggaattacagcagattttacctcaaacagtattttcagatttagaatttctgtatcatttttaggtgttatgaaatccaatctaggtgtaatggagtaagagagtaaatatttctttttcctaaatactatttgaaaagaagtctgaaaatagtgtgttcctccacccccccacccatgcccatcctgccagtttaggagcacttttgattcttttttttctttttctttttttttttgagatggagtttcactcttgttgcccagactggagtgcaatgacacaatctcagctcaccacaacctctgcctcctgggttcaagcgattctcccgcctcagcctcccgagtagccgggattataggtatgtgccaccacacctggctaattttgtatttttagtaragacggggtttcttcatgttggtcaggctggtctcgaactcccgacctcaggtaatccacctgcctcggcctcccaaagtgctgggagcgagccaccatgcctggccatggagcacttttgtttcttaatctggccaatattttaaggttacaattagaattacagttgtttatatttgttcatttaatgtagtcaacataatttccatactttgaacactcttacggaattgtttatttatagagactagtataaagttgttctatcttacttagtttgaactaatccagagttatacaatctagaaagtaaagaaagtttttattgtctcttaaatatcaatgtaattgtagagtgtgaaataatttcttgggtttccttggtcccgtgttcttctgaggcagtggttcttaactgagcagtcacgttagaatcacctgggaagctttttaaaaaaagaatctgggctgggcgcggtggctcacgcctgtaatcacagcactttgggaggccgaggcgggtggatcatgaggtcaggaaatcgagaccatcctggctaacacagtgaaaccccgtctcgactaaaaatacaaaaaaattagctgggtgtggtggtgggcgcctgtagtcccagctactcgggaggctgaggcaggagaatggcgcgaacccgggaggcggagcttgcagtgagccgagatcgtgccactgcactccagcctgggcaacagagtgagactctgtctcaaaaaaataaaaataaaaataaataaacaaataaacaatctggccgggaacagtggcctacgcctgtaatcccagcactttgggaggccaaggcaggcggatcgcctgaggtcaggagttcaagaccagcctggccaacgtggcgaaaccccatctctactaaaaatataaaaattagccaggcgtgatgggcacctgtaatcccagctactcaggaggctgagtccgggagaagcacttgaacccaggaggcggaggttgcattgagccgagatcgcgccattgcactccagcctgcagcctgggcgacagagcgagactctgtctcaaaaaaaaaaaaaaaagaatctgtgcctcacccctagcaattcaattctgtttgggctaagcctgggttgggactcagacatcaatacagctctgcatagaaggttttacagtatagtcagcaataagaacctctgtttcaggataaaatgatttctacaaacattgtttcattctctacataattaaatgtcacacctctacagtcatgtgaaagttccattaaaaagttagtcgctatataaagtcttttatcatatggcacttgaaatattttgcttttgcctttgtatttatagccatgagtaagtagctcaaaaaagatgtacatattcctctgccaactttcctgtctccttgtctgaatgaaaattcatcataaagtctcagtggtaagcattgacagagaaaatacctaagactgttttcctacagaaacagtcgtcttgctctttttgttccttttttattaaggattcttacagcctgagagaatgaagagctgtgtagtccaggatatccggctggctaccatagatctgagagtccagtctagtacagtagatttttctaaatacataagaatcaaagatatgtattgaatatcaagccagctttaaacaaacatagatactagtataaagttgttccatcttaatttgaagtaatccagagttactacaatctagaaggtaaagaaggtttttgtaatctcttaaatatcaatgctaaaactattatgataatgtatcactttgataacagataaaacttttaaaaatgtagcactcatattttgattctggtatttataagtataataaaatactttatttttccataatttctctcacatcttaaaattctcaccagaaattctcaaatgtaacttctaagctctttctgtattcatgggaaactttagctatttcacatactagagaaaataaaatagacagtcaaagaatgatgagcaaaggctatacaaaaagtctagctaataatttgcagagtaggttgtattagaaaatgttctaataactcaatggaatggggctattgatttgaagtaaaatctggtatattacaacatcaaagatctcctattatgcaaaacaagtttgaatgcacctcatgtgtacttggtgttttttttttaatagattttaatttgtttcattttatacacttgaaaagtttactcccttatttgattcaacatatttgcaaaatctgccaacagtgtaaatgttgaaagttctagatggggttttgaagaaagggccctgggtttaaactcagtcttgatgtattatcagcaccatttaatagctagttgtttgacttcaggtatgtttcctgccttctctgagcctgtggtttctcagccataaaatagagctgatagtacctgctctactacctcacaagatttaaaagaaaaaaagatagtgtagggcagtggttctcaaagtgtagtccaaggagccactggaggtttcatgggtcaataaggatctcccttatgtaagaacagattctcaatatacttgaaccaaaacaagagatgacaacagattgaatgcagaatcagataagagagtccagctgtatctgttaaagccagatattaaagaggattgcaaaatgtaaattaatatcacccttctcacttgtttttgaaaaattttttaggaaaaaatatgttaatatgtaatgggtttattgctattttaaatattttaaaatttcttttaattttgaatatagtaaatattgataaatataacctatataaacaacagctcttcacaatctctaatactttttttttgagatggagtctcgctctgtagcccaggctggaatgcagtggtgtgatctcggctcactgcaacctcttcctcccaggtcccrgttcaaacagttctcctgcctcagcctcccgagtagctgggattacaggcacacgccactgtgcccagcttttttttttgtatttttagtagagacggggtttcaccatgttggccaggctggtcttgaactcctgaccttgtgatccgcctgccttggcctcccaaagtgctgggattacaggcgtgagccaccgtgactggtctgtaatactttttagagtgtgagtggatcttgagaccacagctttttagaactgctgataaacagtaatggttgagtagggctgctctgcctatggagtagccattcttttatttattttctaataaattgctttcgtttaaaaagaacacaatgttgggggagggggtaatggttgaatagttcctatcaggacagtttcctgcagataactataaacttgatacactttttttttttttccttttgagatggagtttcgctcttgttgcccaggttggagtgcagtagcgtgatctcagcttaccgcaacctctgcctcccaggttcaagcagttcacctgcctcagcctccagagtagctgggattacaggcatgtgccaccacacccgctaattttgtatttttagtagagatggggtttctccatgttggccaggctggtctcgaactcccgacctcaggtgatctgcccgcctctgcctcccaaagttctgggattacaggcatgagccactacgcccagctgataaaagttttaaaaattaatagatggcatttgagaattacaaaaactagattgaggtctgcaactggaagaggagaacagcaatgaataagcttctgtttttatggcttttagactggcataaggtcccagctggtgatatgaagaggtggctacaactgtaataacaacctgtaatctctcttgaagaaaagaggacagagctcacagtgatcatgcagctggaaagtgcaggagaaaatcctagaaagaatgttggagtggcagaaccccaaacactgtttataaactctgcttgaatttcttgcaaacccctcaactgtacatgtgtggagcagcctccaaacagcacacttaaggctaaaggagcagagatttcagctgctgtccaccataggggaggcagaacttggagtttaagtccagctaaggtaattgtctgcaaaaaacaaaaacacaaacactctttggaagaatattacagaatctagagtgaattgtattaatcacaatacctagactataatccagaaacaatcaccctaatcagtggagactgaccccataattagccaaaggttggatttagcagagaagatttaaagcagcagctattataactatgctcaaggatgtaaagcaaaatgttgtatatgtgaacaaataggaaatctcagcagagaattagaaactttaaaaaagaatgaaatgaaaattttacatctgaaaatacaatatctgaaacaatcttgaatagatttaacagatcagatatgacagataagtcatttaatttgaggatagattaatagaaattatctaatctgaagtagagaaataagttattgtatatgaaagttctctgtaaacttcagtgctctatgtaagtttcagagtttattactccaggttkctttcatatgtaaagggaagaggtatgtttgggtcttctgatctgcagcttccttaatgtcctgtcctgtcatgtctgtgtctaagctttataccctctggtttctttatttttatttttttatttttttttgagacagagtctcgctctgttgcccaggctggagtgcagtggatctcagctcactgcaacctctgcctcctgggttcaagtgattcttctgcctcaacctcccaagtagctgggattacaggcatgtgctaccacacctggctaatttttgtattttgagtagagacggggtctcaccatgttgttcaggttggtctcaaactcctggcctcaagtggtccactcaccttgtcctcccaaagggctgggattacaggcgtgggccactgcgcttggcctagcctctggtttctaatatcccctgcagtcagatatttggcccttgctgctttcctgtactattgtcagaggttaccaggaatcttttggtcagtacactcgacatgtttgtaatgggcctcacccccatgtttctcttcagtgttttgcaccattgccatctcctttctgcaaggtcattgcctttcctcaatgacgatgttttcttttttctcctcctctgtcttattttgtcttttctgttttccaaagattcattcttagcttttttccctcttatttcattctactttttagtctrctttattattttcatacttggttacttcagccttgtcgtttcagaggcctcttctccctctctggctctgctctctctagagccctgtcctgcttcttgtccccgctgatcactaaacatttctacttagatacctggtagacacttggagctcagagtgtctgaagtgaaacccctattcttcttcttcttttttttttttttgaggkggggtctcagaacctcttatcaagacggtttctgtacttcttctctaatgttctgggactctgcctttatatcaacacctagcacatggcagttactctgaaaatgtaatctgaaggaatggatgaattcttccaattacccaagctggaattctgagactcacctttgatttgatctctgtggtgacaagtcatgtcagttttgtgtctgatgtatctcttgtattccttccttcattcccactgcgattactttgataccatagtaggctcctagccagtctttctccatgccttttcccttgctaatattttttatatgttgctgttagagcagtctttactcacgcctaatgatggtgatgatgataatgcctagtatttattaggcactaactgtgggcccactgtttctaagtgcattatatcattaaattcaaataacctataagttagatactgtcattgtccatattttataagtgaaatggaggcccagagagttaagtgtcttgccaagaccacgcagctagtaaatggcagagctaaaattttaagctgtctgattttagttcaagctttaactaccacgctctgttctccctcccacagagtaagttaactgatcatgctgttcttactcaaacatcttacatagttcacttcaaacacgacactactttttagtcttatattctgtatsctttttgarctgaccacatttcattatttctgttactttttttttctatgccaagctgaatccttctgttatctaactattcatattcttcccagtaattttattcattttattttttctgcctggccttgtttcccatcaagttgcctgtgtttatctccctctgatagcatgttctctaactgctctgtgctactgaatgcatttatttcatattataattatggtttgatgttttatctttcctgtgagcctgtaatcttgagtgtagcatcttgtcatttttttctgtctccacgccttgtacaatgcaggcttttacacattttttctttattaaattgctcttcaaaaatatctgttgaataagtgaagaatttaactgttaccaacagaccattaaccataagattcctgtatgggtggcttattagtgtgctatgtctcatttccctatggttcagtagttcaatataatgggaagaactggtgaaaatgtttatgatccgagggtttggttttgttttttttttttgagacaayttatcaggctagtttaagatgcttcaatatgaaccatttcattgattctaagacacgtttttcacatgctgaaattgtcaatacagatttttagtttgttaggccgggcacggtggctcatgcctttaggaggctgaggtgggcagatcacctgaggtcaggagtttgagaccagcctggccaacatggtgaactcccgtctctactaaaaatacaaaaattagctgggcatggtggcgggcacctgtaatgccagctacttgggaggctgaggcaggagaatcgcttaaacccaggaggcggaggttgcagtaagccgagatggagccgttgcactccagcctggtcaacaagagcaaaactccgtctcaaataataataataataataataatwtaacttggggattattccacatcagtacattaaatatgtagttttaatagagtctgccttttttttttttttttttttttgagatagggtcttgctctgtcacccagggtgaagtgcagtggcatgatcatggcttactgtagcctcaatcttcctggctaaagctatcctcctgtcacatccacccaagtagctgggactaaagcatgcaccaccgtgcctggctaatttttgacacataggaagcactataaaatgttagctatatttattatattactgatcacttagctgtctgctgcccaagccactgccaatctttagacggctaaccctgcattacatcactgacctccttagaccttggtctggctggctggtgtggaaacctcattctctttttcagtgtctgctctttcaaaggatgttctcctggccacccaatgatgccctttatactacagctaccttctgcctaaagtaccagggctctctccacagtagggtagagaagatgatgtacagtctgccacctgcctgaaaccagggcacttctgaatgtttttgctgcttatactcggcttcttggccagaattctgcatgttcttcctcatataggcttccccgcagttgttccaccttgccttttacttcctttgggaacctacattataatatgcgtctgaatccagttgagatcagttctttcttttgtgtgtgtgtgtgtgtttttgagacagagtctcactgttgcccaggctggagtgcagtggtgtgatcacagctcactgcagccttgacctcccagkcttaagtgatcctcctgcctcagcccctcaagtagttgggagtacaggtgcatgccaccatacctagctaattgttttattttttgtggagatgacgtttcactatattgctcaggttggtctccaatacctgggctcaagcaaccctcctgcctcatcctcccaaggtgctgggattacaggcatgagccactgcgccagcttaagttctttctcaggaggctcttgggccacaagtaaattggggatgtggcttgacatctattttaagagttcctgagctactgtgatgataagtcccccaaacatttgatgagagttgggaagccagtatcccctgagcaccagwggatccctgaggaggagtgacatctctagctcagccaggataccgtgttatgttattaacatttatagctaacatcgaatagcagtttccattacaacatgattttcacataagttatttaactctgaggcaggaatcagtatctcattttcatttttctaatgaggaaacaagattagaaacattgtgttcacatagatggaaaaggacaggtctgtcttcatgtgtcactcataccaagctatcttcttaccagatgaaaaagggtcatattttatggttcagcagagtttatatcagttgtcataatggaggaatttagtgttagccgtgtttgcagtgaaagtaataggattgaaaacttgaataatttcatttaaatttagatctccttgttactctgtaggtttgtgtgaactgtagacaattttgtattaataaaaaataatgcgtatatacatacwcacctatctacatttatcttgtcctttttttcagaaccacaatggacactgccagccatagccttgttcttctccagcagctgaacatgcagcgagaatttggttttctgtgtgattgcacagttgcaattggagatgtttacttcaaagcccacagagcagtgcttgctgctttttctaactatttcaagatgatatttattcaccaaacaaggtaaggatgtgtttttgtaaataagaatttttaatattgtgatttatataagctttattatagtatcattttggaaattctttgttacggagtcacactaagaagtaaaattataattttttttttttttttttttttttttttttttttggcgacagagtcttgctctgtcacccaggctggagtgcaatggttcagtgtcggctcactgcaacctctgcctcccaggtacaagcgattctcctgcctcagcctcccgagtacctgggattacaggcgcctgccaccacgcccggttaatttttgtatttttagtagaggcagggtttcaccatgttggccaggctgatctcaaactcctgacctcaggtgatccgcctgcctcagcctcccaaagtgctgggattacaggcatgagccaccatgcctggccaaattataataattttttatacattagtaattaaactcagtgtgtaggatccataatggaaaataagaatgaaaataagaatagctaaaattggctgggcgccatggctcacgcctgtaatcccagcactttgggaggccaaggtgggcggatcacaaggtcaggagttcgagaccagcctggccaatatggtgaaaccccgtctctactaaaaatacaaaaattagccaggcatggtggtgggcgcctgtagtcccagctactcgggaggctgagggaggagaattgcgtgtacctatgaggtgaaggttgcagtgagccgagatcgcgccactgcattccagcctgggtgacagagcgagactctgtctcaaaaaaaaaaaaagaaaaaggaaagaatagctaaaatttattgaaggcttatcccatacccaagcactaagtatttgccctataatgtaaattctactgctgtccctatttcaggaaaaagaaaactgagactgagttaagtaacatgcccatgcaggattatacagctaataagttagatgcagatttgtctgaagctatgtctatgcttttagtcactaagctgttaatttttgtttcatataacacttttgttttttttattttttatttttattttttttgagacggagtctagctctgtcacccaggctggagtgcagtggtgcccaggctgaagtgcagtggcatgatctcagctcactgcaacctccgcctcccaggttcaagcaattctcttgcttcagtctccctagtagctaggaccacaggtgtgcgccaccacacccggctaattttttgtaattttagtagagacagggtttcaccatgttggttaggctcctcttgaactcctgacctcagatgatccacctgcctcggcctcccaaagtgctggaattacaggcgtgagccaccgcaccctgctgatttcaataggttctttcagaagttttaagatatctttattgtggctataaacatataaaatttgccattttaaccatttttaattatacaatgcagtggtgataatcacattcgcaatgttgtacaaccattaccactgtctatttccaaaacttttttatcaccccaaacagaaactttgtacccattaagcaataactccccatctcaccctctcaacccccagaaaccgctaatttactttctatctctatgaatttgcctattctagatattttatataatacttgtccttttgtgtctggcttattttacttagcatgatattttctgggttctccatgttgtagcatgtatcagaacttccttctttttatggttgaataatattccattgtgtgtgtaagccatcttgtgtttatccactcatcttttggtgaacactcagcttctttctaccttttggctactgtaagtaatgttgcagtgaacattggcatacaggtatctgtttgagtccctgtttttagttcttttgatcgtttacttgatagactgttaaattccttaagagcaggtacctattttattcatcagttttctaccgctggcatctagtatagtgcatatcacttaggagtcacttgattaatgttgaactattcagaatgtatgtctgtgtttcctaactttaggcagtagattgaatacatgaagactttttgctaggccataaagttggtataaaatgaaagtttaagcctttgttgccatgttttattaaggcagattgctaggttcgaacttcttaggaagaaattgctttagtctcagactatactgttaactgaaaggccagctaggttgtgtttcatttcttgtgggtctgtttttgtttttaacagtgaatgcataaaaatacaaccaactgacatccaacctgacatattcagctatttgttgcacattatgtacacggggaaagggccaaaacagaytgtggatcatagtcgtttggaggaagggattcgatttcttcacgccgactacctttctcacattgcaactgaaatgaatcaagtgttctcaccagagactgtgcagtcctcaaatttatatggcattcagatctcaacaacccaaaaaacagttgtcaaacaaggactggaggtcaaagaagctccttccagtaacagtggaaacagagctgctgtccagggtgaccwcccccagttgcagttgtctcttgctattggtctggatgatggcactgcagaccagcagagggcctgtcctgccacccaggccctggaggagcaccagaagcccccagtttccatcaagcaggagagatgtgacccagaatctgtgatctcccagagccacccctcaccctcatcagargtgacaggccccacttttactgaaaacagtgtcaaaatacacttatgccattactgtggggaacgttttgattcccgtagtaacctaagrcaacatctccatacacatgtgtctggatccctgccattcggtgtccctgcttccattctggaaagtaatgaccttggtgaagtgcatccccttaatgaaaacagcgaggcccttgaatgccgcaggctcagctccttcattgttaaggagaatgaacagcagccagaccacascaaccggggtaccacagagcctttgcagatcagtcaagtatctttgatctccaaagacacagagccagtagaattaaactgtaatttttctttttcaaggaaaagaaaaatgagctgtaccatctgtggtcataaattccctcgaaagagccaattgttggaacacatgtatacacacaaaggtaaatcttacagatataaccgatgccaaaggtttggtaatgcattggcccagagatttcagccatactgtgacagctggtctgatgtctccctgaaaagttctcgcttgtcacaagaacacttagacttgccttgtgccttagagtcagagctcacacaagaaaatgtggatactatcctagttgagtagcagcttctctttcagaatttttataccaattctgaaaaagaaaatttgcrtggcatttttwattcataaattattttcctcctcaagtttcattgactttttttcttcacagcttatccatggttttaaggttgtatatattagatcttctcataagacatattaatatgtggctattaaaatgtaacattcaattactactgtgaacttttcacaaacgaaataacaatttagaaatcagaaatcaatgtagaaatatggaaaccttaaatagttatttatagaattctaagtttttccagttatagaatcagtaaaatcaaattgaatataaagtaaatgaaatctgttttaaagcatattctaaactatcacttctgcytacatttcacatgaattcactcctaccaggattatttttaaatattttcttccatataggaaattaatagttactttaatgcataactgtatgttatacatatgttataatgtataaaaatttattttaagatataccaaatcatgagtagttttattttttaactactagctccacaacatcttacctacatggcttctctttactttttaacattgagtatacctctttttttttttgagacagagtctctctgtgtcgcccaggctggggcgcagtggcgcgatctcggctgactgcaagctccgcctcccgggttcacgccattctcctgcctcagcctcctgagcagctgggactacaggcgcccgccaccacgcccagctaatttttttgtatttttttagtagagacggggtttcaccgtgttagccaggatggtctcgatctcctgacctcgtcatctgcccgccttggcctcccaaagtgctgggattacagatgtggtatatctcatttttaataaaaaaaacagttaaagggagaagagtcagagagacattaaaaaatatttaagaaacagtaagatatacacacatagataaataagcatgcagagacagagactgagctagaactgcattgactaaaaaccccagggttgttaacttggtctagagtgttttcttagacaccttaaaaagtaatttgagattttatgaccagaggtttacatgagttgaaagagaatgatgataaaatataaatcatgtttctaccctcagcgtcaggatttttggggcttcctgggttgattttaattttctaaaaatcactgaaaaagtaatttttcagtggcacagttttcacttttttcctgatccataaaaccagcaaagtggatacattcagtgttctataactacatttaagatccatgatgttagcttttcctytataaatcaacttaactctcttttataatggtgacacttacaaagctaaaaccccaggaaaattaaagttgatgaaakaaataacagattccccggctctatatacctgggaaatagctggttaagcttcaccacaaaggatagatctaaattgtttctraaatgtttaaatttcaaaccccgcatagtcaaggataataraacagactcatctttttttgccctcttgttaaattmtaagcttcacrggcatttgaatacatctaaaaaatttggtttgtgagccttagaatttaaccacttacaaaactcttgagctccctccacttstgaggacgtttcctgacacattcaacagcatcagcgtccaatcagsagggagctcaaagagtaatccagctaattctaaggacacaaaggttttctctaggtaaacagtttaggtaaattacaaagtggtaagtttttcttgaggattgaatgaagaaagctactggatattgtgtaaggcagttgagtttctgccttaaacaagtgagtaaaggctcctatggttaagactgatgtgtgttgagagcacatctaacttgataagatcaattgtattgggagtaattaaaacaaatgtatgttctttggggtcagaactttgtctaatcttaaacttttttctaccaattcacttaagcaactattgaaatttgtactgccctcaaaaatatcatctcattggaagaacacaagtattaacattgattttttgtattttaggctagttaagatatatttcctagccttcttcaattcaaattctattgttcttattaagataatttttctcctctatattcttccctgtttgcctactcattattattatttttttaatttaatttttttttaagatggagtttcacccttgttgcccaggctggagtgcaatggcgtgatctcggctcactgcaatctctgctgcctgggttcaagcgattctcctgccttagcctcccaagtagcttgggattacaggcatgcaccaccatacccagctaattttgtgtttttagcagagacagggtttcacyatcttggtcaggctggtctggaactcctgacctcaggtcatgcaccagcctcggcctcccatagtgctgggattacaggtgtgagccaccgtgccaggcccactcattattctttgacacaggaaatccttgtatatagctaaagggtggaggtagagttgtacatggttggttggataagacagcaagtrcctcagggcagagtttggataaatggtaagagtttgctagcagctgattggccrtgatagacaacactsatttaaagcagaaatatatctgttcgttgagagttaagaaaatagtggttaactgtatttctattcttatagttccttttaatattagaaattcaaagcaaatgctctttccttgttccttaaaacattcattctgtttaggaagtgggaaaatatcaacttcattttatagaaaaaaaatcccaaaagctgaattccagagatgcagtgaatagtggtgtgggactgacccccagtttttgttattgttgttttcatttattctgcaggcttttttttttttttttttttttttttttgagacagtcgtgctgtgtcgccaggctggagtgcagtggtgcaatctcagctcactgcaacctccrcctctcgaattcaagtgattctcctgcctcagcctcctgagcatgtgccaccatgcccagctaatttttgtatttttagtagagacagggtttcaccatgttggccaggatggtctcgagctcctgacctcatgatctgcctgcctcagattacaggcatgagccaccgcgcccgggtctgcaggcattttttaaagtaactgtcatatgcctaacactgtgccctgagtattattttttaaagacatgattgctcactgagaaaatttgctttgtattttaaaagttcttccagctaggccaggcgtggtggctcatgcttgtaatcccagcactttgggaggccgaggcgggcgggtcacgaggtcagaagatccagaccatcctggctaacacagtgaaaccgcgtctctactaaaaatacaaaaaattagccgggtgtggtggcacacacctgtaatcccagctactcgagaggctgaggcagtggaatagcttgaacccgggaggcagaggttgcagtgagcggagatcgcaccactgcactccagcctgggtgacagagcgagactccatctcaaaaaaaaaaaagttcttccagctaaaacctttattttttgactacatctccacaaaatggagctatactgttagccagtatcctaatagtatagtgcagtttgcataatgattaccaagcttgaaactggaaatgtcatatgcactttcgtgtgtatcaggcagatactaaacattttccccttgagtcagcttaaaatttttccttcttttgaaatctcacgcagttgttttctggagaaaaatagagactgttttagtatttgttcttattagcgtatcatcagaactcagcacagtctgccttataagaaaacaaaaaatttttttatttataactcttgagattgttacttcttgctctttctgatttcccatccgtaaagtgggtgtaagcaatacttacctcacaggggtgttgtgaggatttatattaaacgtgttaagttctctcagtattattgattaaaatcaaccatataaacgacatttattctgtagctagacctattaactttagtatttcagcctataaattctaaaatgttcttaaaagcagtaatgtactatctaatattcaataactaattgacagaactcattgttattttttacaaataactagaaacaatactgttgctagaattcctgttctactgtaatttaatcatcactgtttctttttagccttcagtaaggaggatactagttctttggcattattgggaataaaactttgtcaatttcagctttaytgaaagttctcccaaatatattgtttttgtttacacaaaggaaaaggaacaaaaacaataaakaaatacctttgtttttttttcttttttgagacggagtctcgctctgttgcccaggctggagtgcagtggtgcgatctcggctcactgcaacctccgcctcccaggttcaagcgattcttcttcctcagcctcccgagtagctggaactataggcacgcaccaccacacccagctaatttttgtatttttagtagagatggggtttcatcatgttggcaaggctggtttcgaactcctgaccttgtgatctgcctayctcagcctcccaaagtgctgggattacaggtatgggccactgggcccagcctatttttatttctttgatgtaggtgatctaaatagtagatgaggacaggaaatggggtgaaggtaataatagtattattagaaaagtcttcactgaaaattgaaggaaatacatattaatcgtggaaaaagatagtgtgaaaaatgtgtaatttcgttaacatttatttgtacaggcacattcttgatgttgtgagtcagatacttgataaatgtccattttttgtagtaattgatgtaaaaatgggccatgtgaagaattttcataatgtaatttgtgtctttgtatattttgaactacatatagatttgtggcacttaaattattaatttttgatttcttaagagtgaagtctgtaaatgatttctctctgctgtacttctgtgtttgtatggttggwcattttgaaaactggtgagattgcacagtcccaaacctggatgtcttaaatacaaggaattacaaactgtgatttttgtcttgaagacctggaagaattcattgtgcttcagtatgtatttgtactgcacttgattaattagttaagtattggtctggtgcaattgacattaactgtcatcaactcctctattttgtgctaaataaagtcatttagtcagaatggatcaaatataaacttatactttaaaataaacttagattataaaaacttgttcaataaaaaagacccactgaaaaatcttcaaagtacatgtaacacatagctaatacaggagaccaaaatcaataatacattgtgtggctaaactcatccacctaatgtactgtgaatttgcttcagaaacattcttttagaaagttgtgtatctgccgggcatggtgcctcatgcctgtaatcccagcactttgggaggccaaggcccaggagtccgagaccagcctgggcaatatagtgagacctcatctctgccaaaaattttggcyaggggcagtggctcacgcctgtaatcccagcactttgggaggtcgaggtgggcggatcaccagaggtcaggagttcaagatcagcctggctaacatggcgaaaccctgtctctactaaaaatacaaaaataagccaggtgtggtggtgcgcgtctgtagtcccagctacttgggaggctgagacagaatcatttgaacccgggagatggaggttgcagtgagccgagattgcgccattgcactccagcctgggcgacagagtgagactccgtctcaaaaaaaaaaaggcagggtgtggtggctcacacctgtaatcccagcacyttgggaggccaaggcgggcggattatgaagttaggagatcgagaccatcctggacaacatggtgaaaccctgtctctagtaaaacacaaaaaattagctgggtgtggtggcacgtgcctgcagtcccagctactaggggggcagaggcagaggaattgcttgaacccgggaggcggaggttgcagtgagccgagattgcgccactgcactccagcctggcgacagagcaagaaacaatgaatttcatatattttatcaagacaaattaatgtgacttaatcaaaaacaagtttattagcttagcttatagaatgtgttcttattttacatcagtgtttgccaaatgttgtgttcctagtgttgaggcaagtagtctttgtactgggtaacattttggaggtgtgatgcaaaaatgcatttgtggacctaattcttaccaaccataatctgtgttaatcgaaaattgacgtcctaatcaaatgctttccaactgctgtctctggaaagaaaggtagtatttcgtcatttcccagaagtttcttgctttgcttcttcttttttttttttttttttttttttgagatggagtcttgctctgttgcccaggctggagtacagtggagtgatctcggctcactgcaaccttcacatcccaggttcaagctattctcctgcctcagcctcccgagtagctgagattacaggttcccaccactacactcggctaattttttgtatttctagtagagacggagtttcaccatgttggccaggctggtctcgaactcctgaccttgtgattcacctgcctcagcctcccaaagtgctgggattacaggcgtgagccaccgcgcccagctgcttctttcttctctatttacagtctactgtatcgccttttgcccccagtaacatgatccacaatagtagttctcaactgaggtatattagtcaggattctccagaaaaagaaagaaacaacaggtagaactgagagagagaaagagattgattgattataaggaataggttcatgtaattatggaggctgagaagtcccaagatctgcagttgggaggctgagaggctggggagtcagtgatgttccaatctgaatttgaagacctgagaaccaggagagcttatggcataagttccagtccaaaagctggcaggcttgaaactcaagaagagctgatgtttccatttgggtccaaagggaagaaaagaccgataattgcagctcaagcagtcaggccagagaaagtctctttttttattatattctggccttcaactgatggaatgagagccacccacatcagggagggtgatcttctttacgcagtctactgattcagattttgtctccctccagaacaccctcacggacacacccagaataatgtttgactaactattggggcascccatggcccagtcatttggacacataaaattaaacattacacagggctatccccccccatagagacatttgacgatgtggagatgtttttggttgtcacagttgggtgggcgatgagggaggctgctgctggcatctagtaggtggaggccagggatgctgctaaacatctcagtgcagaggacagcctcccgcaatacagaatatgtacctcaaaatgtcattagagctgaggttgaccaacccttctgagaccttaaagtaagttttgtgatggctgtcaggaataaaagaatacaaagaaacccaatttgggggatttctattctagtcatgtttagagcaagtattggagtatgagatgtgttcagaattaaattctatttgtattatccttgatcccagcttttaaaagataaaaatgtgattattagaaataaaaggaaaaaatgtgattattaaaaatcagagatgtattaatcagcaagacagttttgaatctattcatataatgtttgaactaaataattgtctccccaaagaggtctcttcatgaaattgagattgtaggttataatttctgtgaatttttaatctggccaaaaggtggcaccagtgtacctttaaaaaaatgttcattatacttgaattcagcattactattaatagtaaatattatttagggcttagctacttttggatcatgctttatagagtcaagactaatgagaattttcttaaaatttcataaggtactgcaatatcttgacatccctctttaatcaagatgcttctgatttacatgtacatatctcagcagataactttttaaaatatcacattattgtgctacattgagcatttctgaagatttttccaagccattaactgtgaggccttggaatttgggctcttttaatcaggcatcacactcagtttttggtgttctgcctggtcaagacatagattgaaggacatttgagtaaatacgctcccttgctcctttcttgccttttgttcattttttgtacatccacaatctatgaggtatgttacctactgaaatttactttcttttccaactgtggttcaacaactgayyttcttctctcatactttccaacccattccattctgaataagttaagagttttcttaccttcagctcttctcaccttccaatactaagtgaatacagcctgcctcccccttcatttctgattacaatattattctcatcatcctaggactttgtacctaatcaccagttgcttctcctaagtttattttacagctgataagccaacttggaaaatgagcccactctccctcagatacattctcttccgctgtttgaaacgtttttcattgaaacaatttggtgatattgtatcaaaataataaagtattaagctactggaacaccatggtgtcctttcatgtcaaacgtctgaaggaatgacagtcctccaagagagattctctgtacaaatggtgtgttcccactgtcctggaaacaggagaggcttgtgccagggggctggagaagatggctctcacccactgtggtcgtcatcccttgtctggtctgtgttattaacaagtttcaggaggttccgtgtcagatttatgtgcatccagcaggcctttgaggaatgggatcttgtgtatttagcactgccacattttttctatagtggaagccatgtgaaacttagtccaaaccatatgcaggtaattaaaaaaaaatttttttttgaactggcatttatggtaactaccatatagggaggaaaacctgaagaacctggagtggttctgtagaaagtgaagtcacacctgttactttttgaaggtgaaaacatatttgcaaaggcaagggaagaggttttaaaatgcagatcaaagattcgaggggagtgaatctcaacagtattcctagctaaccacttctcatttcccaacattgctcttttttcacatgtgtgctgtctggtggtgtgagctcagtggtttctgtcccctctatcacaatattttaacgtctatgaggaaagacatataaagggaagagtcctttttttaaaatcttaaatatctcctatttcactattaacataccagttttgctgctctctcaaactggtggctatgctcagagccaccatgatggccatgcagacaatgcacaacacagtgctagggggtgcctcgattgaatgaaggcttctcccagagttgtgctgtgccaatggcacagctgtgcgtgacagccttgcctttccttatcctggtttaaacactgggtttaagaagcccttattttgaatttctgcagcaagtagcagttttcactgattagtcaggattaaactaagatagacaagtggtatagaaatcagaataagatttaaaattaccccgaggtgacacaactaatggcttggtcaaaattggtagaacttgtattaaaagggtggattttgctgtatgtaaattataccttaatgagaaaaagattcataccactcagaaaaatataagtcttagagtttgatgaaccctagtgattatcattattcactgttaatccttcaggaaaaacacaacagccagatactgagggttttttaaagaattctaaacaaattcaccctgaaatcaggacaattactgataaggctatttagggaacatttggataaaagatcaaaaactgagtttgacttttttttttacctgaattgagtcgtgaccaattgttttggcattttctgcatctcagccatatagagtacgaggcagttctaacttagtcattctgtcaggaggatagaaatactctagttttgagctgggcgtggtggcttacgcctgtaatcccagcactttgggaggctgaggcaggtgaatcacaaggtcaggtgtttgacaccagtctggccaacatggtgaaaccccgtctttcctaaaaagagaaaaaaattagccgggcatagtggygggcgcctgtaatctcagcggcaggctgaggcaagagaatagcttgaacctgggatgtggaggttgcagtgagccgagatcactccactgcactccggcctaggcaacagaacgagacttcgtctcaaaaacaaaaacagaaatactctagttttggaagacctgtttaaacagaagtgatattctaaagttcttatgttgcaaatggccattccatatggaacctttgcgttgtaatttatatatatttgattagcagcacatgcatgcctgaagctgcattgtgatggtgattttatcacagatgtggtacagaaacccacttgtagtcatactgagcagacctgtgacctgtcagagtagggatttgggaataaaaggttcgggtacaagtgtagaaatgactgcatctgctttggtgtcaccttttgtttcctatctcccaggagtgcagaaatggaaggcctgggtcctaagaccacaagtatagctgtgaaaagtgtataatccttctcccatagtagcactgtcatatcaaggccaaaagttctttttgagtttcaccacaaagcaagtggtggggaaagtgcatctagttttgctaaagtcctgaaactgctggacactgctcccattgttatgataggctggagtttacggagacagttttaaggctgggagtttcccagacgcggcgccacaccatcctctcctcacctaggtttcccttcactgctcattgtgcccacacccagttttgcagaggattttctgtgaatgtgtagtgcacagacacgcatactctctttcctaagctcgggaacttaacccccagtaagcttaagctttcaggaaggaagaaagaaagaaaagtaggtattcacaaaagggttggggactccagacgtcagcattaaaggtaggtctaaaaagggattagcagaattgcctgtgaggacaacttttgtgaagtgtagtgtatctttttttttttttttaaaccaagaagagatttaataaaacttttttttgagacagagtctcgctttgtcgcccaggctggagtgcaatggcatgatgtcggctcactgcaagctctgcctcccgggttcacgccattctcctgcctcagcctccccagtagctgggactacaggcacccgccaccacgcctggctaattttttgtatttttagtagagacggggtttcaccatgttagccaggatggtttccatctcctgaccttgtgatccgcccgcctcggcctcccaacgtgctgggattacaggtgtgagccaccgcgcccggccataaaacttttaaaaatcctgcaaaatgtgaaatattagctaccctattacagtgtttgtacattaagaagacattttgctttgaagccagattcgttttaggacttttaaggtattatcaagttttaaattggttccaagatttggaaagtacagtccttcctagagcctgattgttatcatcgggctgtggttacgaaaagatagagtgttaacattaccaaaatgaaatcagtgtcttagtaaacacagaactttttaaacacccacctttagtatgtaccgtctgaataattctagcattttcacattgattagtcttttgaaaaatcataaagatgaacaattcataggttaatgcagaaaataatgagtatatcaagagatgaaaacagtgtgcttttgtcaaattcacaaatgtcatcaaattcagaactgcccttttggctgaattagttcagcattgtaggtgtttatatttgtcttgctgaaggactgttttaggagtgttgttgtaaaatctctgtccaattcccaattagcagagtagaacttttggtagtgcgaactcagtagttccatcaatgtgatctttacagttataggaaatgaacatagtttgcccacagttcttttaaaagatctgaataaacatgagtcaatataacatttattctgtattaataatcagtacataaattaattcaacttgaaaccttttttctacagagtactatttaatattatcatctgatccatagtaatttagtactaattttaatgagaaaaaatgaaacttttactttcataatagctcatccacttaacatttttacaaagaactactataaatatgtaacactatgcaggcttttttctacacctagtcacaaatcaaaataagcatactgtttatttaaaaacggaacactttcaaactgctgctgtattcagatcaccaccttccccacaccaaattaattgctctctctgtgtactcccctctgtgccactcatgttgcagcattatccatggctctttgccttaacccaacccggtttctgttgtcactgctccctaggttgagttcttggatggcagggagcctgtctcccttatcaaatagtgttaggtatgagttatgcctaatacgtgtgttgaatcaaattgaatttaattaggacacctgaattttatgtagcttccttctaatttttgtaactaaggagcattacaaattttcttttcaaaatgtaccataaaatataccatggattgaaattttgaattatgtataagagagttcatgttacccaataaaacatcataggaatttgaacctaaagaactctaaatcttaaatgaggatttttttttaaatgcacaaatggcaggcagaaaaatcaaatcctgctatattatcagatgaaattagaaagtagactacatatttcaataaagttgacattaaaaggatcttttcaaacagtgggattctaaagcctaacaattattttttaaattctgttgtaaacctcgaaaaacattcttaactataaaaaataaggtaacttgaagttagaaatttatggatgaagttagaaatgtatggatgaagttaatgctggattgcatacagaagccaaatttggtgcctccatgatccatatctttaatgcctttagcaagcctgttcacatatactggtgaaataacaatctctcagaagtaaataaaagagattctaagactccgctgagtagtagaccaagtaagatcatcacaaacttcatgctgtcaaatacattaccttgaaggaaaattatgcagacagcttttctgaacaactccatttatgccacatgcttattattctttgaggtggaggaggtggcagggaacataatttctgtttgaaagttcttttgttttctgctacctttacttaaatgttaccgggtactatttttatatcctataaagtgctttgaaaaaatgttaagtgaatagtgctacataaaatagaggagaattttcacattctctgggttgtaagaagcaaagtgaataatacttgagtcttaaaagaggaatgataatatgctgaaaaagttaacaagtagctaataatccccctccccaacccccagctttgcaaaattctgggttcaaagagaaactgaattttggctaataaataaataaacattcattaaaagcagaatttataccacagcaaatgtaaagaaaattcatgtggtgttcctaataattattttaatgttgttaaatggacatgaattgaaacagaacttatttatattcacttaacgtttgcatataaggtcaaattgcttaaatactattacaagaaaaatattttatgactctgaagccatctgatttctgcatatttctataacaataaaacaatttgaatcaccttagaattcactgtaataggatttggccatgtagcacatataatcagattgagaccagttaatttcggaattcctttttctaactgaaatcctacttaattcaacagatattctcaatagaaaaacagaaacctcttaagaatgaatgcaagtaaaatatacatcttatcataaaaacaatcagtacattctaaccaaaaatatatatcaaaccacagtgaaaaaagtaaaaacctagtattagataaaattttactttcttaaccaaaaaattcattgcacatatttaccatttatctgtttttttaaaaatcccccaaaatatttccaataactgctaagtactatactttttgcttgttcatgagattactaaacatttacaatgcaagtgtattggcttggaggcatccttgcagtaaatgagggcaggattcttcaatacactgtaaaatgcaccaaccttagtcaggtttttaaaatggttcacttttaaatatgatagctggtagctgtccaagtccattagcaccacatatagtgagttaaagagtgttttcagagaagatgactcgtcttttttgtttttaatgtttaaaagttgtacaattaaaagaaattgacttcttgggtcatgtgttttgaatgacacttttcatcttgctcaggatttccaccctcctccccggattataagcatgaaggtaggaaaatctgggggaaatatttttgcacttcagcaaagaatcttgctaataatatccatgatttggttcaatttccaagtcagattagtttcttttgttagaggtctcaatatgtatttacagaaagaaatgaagatgattctgtaggacaaagtagcaaatactttctatatgcaatccatacacaatgcaagaattcacccagatcatttaaaatcatctaatgtgcattatttcctccaagtggagctcttgaacaaataccttacatctcatacttcatctttattacttcatctgtttcaagtagtaacacaatcactcaatttacacaatgggggaatacacactttgaatcctaacctgtgaggtagggaagtgcactctggtattatggccatttcacacaaggaaagattgaaataggattactttttcaaaaaatatggcaatcattgatgagatcagatgcttccctttcaatatgtaaataaaaatgcaaataagcccttctcatttttgtaaagtatatctggattgaaaatagtgatgaaggccgggtgcggtggctcatgcctgtaatcccagcactttaggaggccgaggcgggaggatcatgaggtcaggagatcaagaccatcctggctaacacggtgaaaccccatctctactaaaaatacaaaaaattagccgagcgttgtagtgggcgcctgtagtcccagctacttgggaggctgaggcagaagaatggtgtgaacccaggaggtggagcttgcagtgagccaagatcgcgccactgcactccagcctgggcgacagagtgagactccatctcaaaaaaaaaaaaaaaagaaaagaaaatagtgatgaaaaagttaactttcaatattcatgtaaaatgctttttactggtctcaacacacagacatgaaggaatactgacatttaaattataatgtgctttagcaataacttttcacttttctattcacccacattcatggctcatttttggccgagaataaatatttgcactagattattaggattttccaggaccattactaccaggctggctttgaatctactctcccctctttggagagaagttgatgaatatggctcttaaagaagtaattctgcaagatgaatcctatattatctgtgataatttacttgggaattttcccttctcctggatgaagaataatattccccttgttttgtttttgctgtttcattttttaacttttcacagataaatccatgcagaaatggatatatacagatctgttgaggcagaaagaaaagcgggggaaaaacccactctccctgtttctacacttttgcacttagtaacaatttgcctgaytgaaggatttgtgaatggttctctttttttttttttttttttttgagaaggagtctcgctctgttgcccagactggagtgcagtggtgcaatcttggctccctgcaacctccacctctcgggttcaagcaattctcctgcctcagcctcccaagtagctgggattacaggcrtgcaccaccacgcccagcyaatttttgtattttcagtagagatggggtttcaccacattggccaggctggtctcgaactcctgaccttagctgatccacccgccttggcctcccaaagtgctgggattataggcgtgagccactgcscctggccaaatagcgcttataagagacttaagactaggaaaccactcacgtttaatatcaatatgcatattctgcacactatctgctgaaattgggaaaatgcaatgtattttttgagttaagcctgctgcttaggaatgtaacaattacaaatcacattcacaaaagtagctcaccttattcaccattttaaacatatatgtgcactgtaaaaaataagtttttaaaaacttaatgtgatgttagcctatacacagagctgaattatcaaaaggaaaccagactttgttatatcagaggtcattaaaaagcttatggcataccataagtgctcaataaatacaccttcctcccccaaagcactccaatctccatatgccrttttagcaactccctgtatgttatgtcattttacactgcaatctgtgctgacttcctccaatccagaagtgactgcatttcagtggtagagttttataaacttgacttaatctttagcacttctgcgctggaattgtaccttttaagttctagagatgataaatctctcatttgttactgagtaagaaatgccacaaatgtataaaagaattcttcattaagcttgttttttctgccgtgactctggagagtaagtcactgtagaagattgtttattttattatcatcagaggccatttcattaaccagctgttctattgacaactgaatagcattcttgactagagaagaggctgtttcaattaagagtgtttcatattgttctgaagttctatcctcaaaaccattatcattagcaaaaacccctacttgctcattttcagctgaaattaagaattgcttagggacatttttagattttgtaacatcaaattcactgatttcagtgtctgtaataataatagcaattggctccattcttttgctttcttctgatttggatttctcttcagtgatcccattttctttaaaatctgattyttggctcaattcagtatcttttggcttagtttcttcagctacaatctctgtactttcatagtcttttccatttggtgcactttctagggtactgttactggcttcttccacaatttgttgatctggaattgcaggtaaaggaggaacatcagaaagtactggctgctgatggtctgtttctgaagtttcaagtgggcttgcttgctggggttgaacatcttgtttttccttgatcgtttcaatttcttcaaggattagagttcccgtttgaatagsagaatgcccattatctaatccaagttctactgaaatcactttctctccaraagttrtgctattgctcacatttgattcacagacctcatcaccatctttcygtgagatgccttcacttagatcctgggttgacttagcctttgttgcctgatcattcaatggggtctgtgtttgtatatccaaaatttcagcttcttcctggactttgatgctgcagtctgagtcttctataattttggaatgattactcctttttggccctcttgggaattttatgcagggaatcttaagtctagattttgcctttttcttagaaagatcagcatcctcagcatttattgcaggttgcatttcaccctccaatrgcttttgctgctttgaagactctgaccttttcctgcgtgtkacaagacgtttgagtgaggcccaggccccccgtgtgggctctggctgatcagaagctcctgcttcttgtggacacttccttgccacatcagcagcttcagagccagctttgggcttcagtgctttggctgctttctttcttctcttgaagcaaagcatggatgccttttccttctgcctttcagccccaggactaccttctgctgatctcttctcatccttgttttctacatgaatttctgaaattgtggtttccatttttacactgcactcttattctctagaaaactgtattctctcttccttagcagccttttgtgacaaaaagatgagcaaaaatgtcacactaggtamaatttcttccaggcatattcatacctttcatcttactccatacagttgttttaggtggtttctctagtatagaaatgcccagtttctctatggcttgtaatttctctctttaatttcttgatgaaagcccttctttggataaatttttgctttatttaaagatcaacctgatgagagaaaagaaagtggtattttatttcactatgagcctattattttctgtggagactatttcagtgaatgtataagattctaccaggcatattttccatataataacttaatgaaatgactggagaataaacattggggtttactttggccctattaaagagttcagtgtgattctattttgttttatcctccttgttgaaacttcattttggattaccctgcaagtctgatattatcagttctttagttgtgttgtctgtgtgaattgcttatgactctaaagtgcaagttaagcaaacaacaagaaccaaaaatgaagtgcaggatgaaaagcaagctgatgtaatctttatcacactcaatagataattttaaagctgcaaaggactttagagattatttgagattactcaaatccagccagatgacaaaactgaactccagaggggagcagttgtcttgtcaaaagccatgcaactagataaggtcatagccagagttagaactagagactttgactctctagttttaccattataacataaggtttctgttctaaaaatgtatgttccatcaaggaagtgctatttttcatacatattcttaggaaaatttagcattactgtcatttcccactcttaaattagttgtacaattttgacattttcatttaagtactgtatctgctgtatcacatgtttccaccataatctgcacatagttggaagtcagtaagagtagtaatagctgacatttattgagcaattcttgggtattaggcagtgcatgcacttttacatacatctctaatcctcaccacaatattacaaagatggtggtatcaccacgtacagatgaagcaatttggctgagattacggcagagctgtaacagagctcagattaacacaagattgcttgttgcttaaagcttatgttctgaaactgggctttaagagtttcgtcagaaaatgaattgtttggggatactaatctgcagtgtttcattagtaaaaaaattaaaaaattgattaatggtcatttaaccataaggcacttatcaactcataattgaaccacgagtagactgagttcttgtcatttgaaaaccaagcttttgaaattctttatattttatttttttggttcaggaactaatttaaaagccaaaaataagttggcaaactatgcaattggcaaacttagataatataaaggtgtattgaaaatttaatccttagaatggtatgatggcaccaaagaatggaaatgggaggtgattatccaacaaagatcctatgaattttagtgggtggatgccctaaaataagcaaagggactcattctttatattgtttttatgtaaatccttcactgaagtttcatttgggtaacccataattttatgaactgtagaaggaactggaaccctgaaaatcagtttatgatctaagtaaatattatcttaggttgggtgtttcatactgtrtgcctctaacagaaagataaagtcattctagaacaatgacggaactaaaatatgaacatttgacagtgtttctcctcacaatgtttcagtgagcactagaacctaagctgataactgtttaaatcttctcacctcttgtgagttttcagcacctgagcatttttgttaagcagaggctgtattaccacataatagaaatattgaaatgagatgtttaggagtctgtcattggaaactaacctggattgcgcaaagacaatcgtttgagaagctcacttgaatgtatctcacatactagaaataaaacgaatacccaaacagaaacttaactaacgagggaaaataatgcagtctgtagacaataaaactttgcagaatgtcagactgcaaatgattcgctcttaaccagcaagggtagctttatcgcctcaggaaatcttaaagtccctgtgctcatttcctgatggaattgcaagtctcatgtcacagaaaacaccccctttcctttttcccttgagcagccagtacccgaggaaagcaatgcatctttcccagcaccagatacggaccacgaagcttcctcctggaggaaggaatctcgaattctggcttgacgccccttatggcaggagacagagcgcaggataaagtactcaaaaaggaaaatgccgggggcgtggaacagataacccagcttcaggctgtctgcagaattataatgtaatggccagaaacccaaaatcacatttctcaaagagggataaagaaggaaaaaagccaccggcaacccatgcttctaagacaagctgtaacgcgaaggggataggtgggcagacctgatgagggtcgccctggccgcggattccagcggacaagcgacctcccgcgttcttactcccagcacctcagagggctcggataccccgtatccagtgggcacctcttgcccactccgcggtccgcggaccggacattgcccccgaccctcctcccccgcaggctccccgccctgcctttacttacgtagggcgtcggggtccttggccaacactgctcccgaggtggcggcgcgctcgcggggcccgccgcccaggcctccagggagccgcggtcgcacccggagcaaggcgccctctgcagagcccgccgccgggtgcgccccctccccaccgcgcggggacagacagcaggcagcgccaatgcgagcggagcggagcgggcgggcaggggcggggcgaccgcsggaggcgcggggcggcgcgggcgccgggacccacctgcagcagcagcctgcctgcctgccgcggggaagcccatcgtgctccgcccgggcgccaatctccactgccagaccacatcagcgccgaggcggggaccgcaagagagccagccggaaggttcggggggcgggggaaggcgggggggaccagggcaatgaaccccgcgttttctgagacgctaaatagtgaggtccggtttcaaattatagacagtcgcattacacatctcctctcctccccctcagaatatttaaagacaaggcagacatcgcattttaaaagcaggattcaaaactgtgcatagaatagcgaggtcatgtttgtttgaagcgaaaattacatatataaatggaaacagaaagaaacccgactttctcaggagtggcttgagtgtcagatcatcgtggttcatcgccaaacaggctttcaaacctttgtctcccagtgggaagcaggtggaggtgattggtgcagaactttggcctgcaggagcagctgcatctctatgcggacaaggtgagaaaggcacaggaacccagctccatccatcttataccttacatagttccaaaaataagttgaggtagcttacaagttacccatgattcccttcaggacattccctatgagggcattcctgggagctccagctgtaaaatctagtaggatccatcacaatcccagcctcctcctctggcccccatagcatagcatccagatgaagaacctggtaaggtgaagtgaagaactactgaaaagcagccgcgttcatctcctttcttcaacaggatcacgaccttagggagtgtaaatgtcaggtgtccatttttgtattttttccggaaatgttttatatttgtaagattctgtagtttccacagaggcttatcaaggaaagaactcttgagacacaaaagcaaagccaaatataagctgtcaagatcttaaaattacagataaaagaggcaagagttgtaaaacaggaaaatccataagcatctagtttagttgtaattaagaattcagggatgggcgcagtagctcacacctgtaatcccagcactttgggaggccaaggcaggaggatggcttgagtccaagagtttgagaccagcctgggcaacatagggagacaaaaaaatctaaaaaattagctgggcatggtggtgcacgtatggtcccagttactcaggagctcaggaggctgagaagggaggatcacttgggcccagaaggtcaaggctgctgtgagccactactgcaccactgcacgccagcctgggcaacaaagtgagaccctgcctcaaaaaaaaaaaaaaattcagtcagccttgttcactcagcaaacacgtctatcgaaatggtctgcgtatctctctatgggttgctagcgctgcttgttgccagttttgaactttaagccaaaagaaatccattatgctyataagcaattgagaactattccttattgagatccaaggtttctcaaaactagcagacctgggagtttgcaagagtttcaggcaaaaaataagatgagcttatttaggtgaagacagggtaaaatagctgtcttatttttatttttatttgagacagggtcttgctcaggctggagtgcagtggtacaatccctggctcaagcaatcctcccacctcagcctcccatgcagctgggaccacaggtatgcgaccacatgcccaggttcttcttcttttttttttttttgtagagatggcgtctccctatgttgcccaggctggtcttgaactcctgagctcaagtgatcctcctgccttgacctcctacagtgctaggattacaggtgtgagcccccatgcctggccttcacttgcctttcttttaaacaaaattagtaaaagggaactgaaaggcagtttgaggtgagagatgaatttatttagtatttgaagggcaaattcggacagacttccttaaggtatattacaaacaagtcatccctgacctccaccaacacacatacacacagagtcactcacacagagtatagtactataaataacatagcgcaccatagtttttctttaggatatgactagaactcaatgccatatgtgtgtgtgtgtgtgtgtgtgtgtgtgtgtgtttaatgtatccagtacctcatgcatgaaagaaacctgtcattcctgaattcaggtaagtgacaacgaaggctgtttaagctattacccatatcattgtctactaccccattagtagcttttcattatataacaggaaataggctataaatgtatttctgcaatctgatgagaaattatcctacctatagcttatcatgttaatatcactagatacagtgtgccagtaaaatagcttacatatttatctgagcaatactctactgatcttaccatttatcccatcttgrtctctacccattgcctgggcctatagctaccaaaaatgacttataactccttgttaatagctcttacatttcagaggccttctgggaataagccctccaaccccgttccctgggacaccattgaatgaacctgaggctccaagtctctggtggtttcatctgttcctgggcaccatgagggttgcacagagccaacacaaactcaatagtaatactgttgcaatctgtttaatgtggcagcacataaatgctatctcttttgaattaagactgtgtgtacatcttcagtgcacagaaacagcctctgaagtgagatcagagaatgtacaatttgtttatcagtaatattactaataaggggaaggaaggcwttagcagcccagagaagagaaagggcacgggaaagccactaatctggagggactcttagcaccaaggtaaaggcactagaccttctctgccagcacatgctaatagttaccccaagcactaatgcttctataggtcttttttattttgacacagggtcttgctctgttgctcaggctggaatgcggtggctcagtcatagctcactgcggcctcgaactcctaggctcaagcaaacctctcacatcagactcccaaggagctaggactacaagcgtgcaccacacactcagctgagttttggggttttgttttttgtagagatggggtctgtcttgtccaggttagtcttgaactcctgggctcaagtgatcctcctgcctcagcagcctggacaagacagtgagaccccatctctacaaaaaacagaacttcaaaactcagctgagtgtggtgggattacaggtgtgagctaccatgcccagcccctaccagtattgaggatttaaacccatgtggctgttggcgatattaggaaacctaaatcctttaagatgatccttaagtcaccatatctgacaagactgcatccttcccttgtctacaaaatgaattcccagcaaatcccattccaggtgaagtttcacaggacattaagaaatgtaccagaaagcggtcgggcacagtggctcacgcctgtaatcccagcactttgggaggccgaggtgggaggatcacttgaggccaggagtttgagaccagcctggccaacatggcaaaaccccatctatactgaaaatacaaaaaattagccaggcatggtggtgcgaacctgtaatcccagctactcgggaggctgaggtsggagaatcgcttgaacccgggaggcagaggttgcagtgagctgagatcacgtcactacactgcagcctgggcaaaagagcacgactcttgtcccaacccccctaccccccctgccaaaaaaaaaaaaaaaaaaggaaaaaaaaagtaccagaagcaattaactctgcaaacagggcctggaggatgctgtgcaacaggaactgacaagtgcttacaatgtgccaggccctgtacaaagcatcttagatgatgtgtttgagtaattccagaaccgccctcacgaggtaggtaccaacagtgctcctatttccatggtgaggatgtggaggcagggaggtgggtgaggctctctgccatagagctggggctctgcactgtgacccctttgccatatgcctctcaaggcagcgctatcatttctgtggactgtaaaattgactgtattacaacattgacatggacctagggaattaaaaataataaaaccaaggtcactgggaaaaatactgctttgccaacatcagcagtgtttagcactggcgccagtgggatgcagcatcctctggaaggatccagtggagggagacaaggggaaaaagggaaggaaacaaatgggagaggaagaacagagatagaagataaagaacaagaagagaaggaaaaatatttgatttatttttttagacagagtctagctctgtctcccaggctggagtgcagcagcatgatcctggctcactgcaacctctgcctcctgggttcaagcaattctcgtacctcagcctcccaagtacctggggttataggtgcctgccaccacacccagctaatttttgtatttttggtagaaacagggttttaccatgttggccaagctggtcttgaaccccagacctcaagtgatccgcccacctcggcctcccaaagtgctgggattacaggcatgagccacctccacgcccagccagaagaggaggaaaaaaaatattaggttggtgcaaaagtaattgtggtttttaccaacctaatgttttaggaaaaagaaagtctgggccaggtatggtggctcatgcctataatcccagctacttgggaggctgaggcaggagaatcacttgaacccaggagacggaggttgcagtgagctgagatcgcgccactgcactccagcctgggcgacagagacactgtctcaaaaaaataaaaataaaaataaaaagtctgtagggaagggtggagcccaggcatttagaagaaactcaatgaatacttgctgcaccaacagaatagaggctcacctaaggctaatgctgcatgaccatccttcttgagcactctaaacatagacagtgctaaagctgtgacagaaatgggaattccaaggaagttcaggcaaaaacttgtataagcaatacttcctcagggtagaaaaacaaaattcaacaatatagaaaggtataagattaaaaggtaagtcatcaacttccaacccaaccctctcaggaggtcccctgaattatgtgtcctctcagaaatacacaagcatgcatacatttccctctaaacacaacagtatcataaagggcacactgcaacttgcatcttcagcccaagggtctgcctgacaaatgagctcacaaaggatggcagagacctgtggcacagtctgttaaggctgtaattcatattgcaacaccaagatggcaaacttgtttccttttattctgtggaacgtcactaaagtaaacagacatgcatgatttatgttaatttatacatgatgagaattaaggctgaaaatgacktctggggaaactcctactattagtttcagatcttctggrcaggggctgacttctcttggcttacttatacttcctaactcccagtgggcctgaatagacactggccagactttyaaagtagcttcttgaagatggatggtgatctggaaggaaaaacaagaaataaatgttttctctaagcactgaaatgtttcctgttccttccatactgcaccattacccactcacattgccaaagctgttaacatttacatcctttcctgccaccagctcttctagggcgtgtccataaatggacttgaaaatgatgcatggtatttccatagtactgtgtgaatactgttcaagaccagaccaagccgtgagccatgactgcatttcgagtatcacacataccctctcaaagaatagtgttctagcatcaaactacagtttgcttctacttggaccttaactttctcaaataatgcaagagcttttgttttatactatgaccctttgatatccttgtcttttctrgctttttctagtttttctcaggtgctcccccaacctgttccacacaggatttgtaacttcaggtcatttgcatggttatcagaatgccccttcgctaatgtccaaatgagggttcagtttcccaaaactcacgtcttccttttttcttggttaattcctcattttgctaagtacattgctaaataacttcttaggaagagatgtggggtggcaaacccttgcacgtctgaaaatatccagatagattcggctaggtgtgagcacatgttgaaagtcatcttccctgtgaccttacaggacactcctccattgtctaaaagcttcttattgccagtaagacgggcgttaagtctagttctcattcttttcataggcaagccacttttttcgtctctggagaaagatgttaggattttcatgtttgatatttttgcagtttcaacaggatgtgtctagggatataagtgcacactgcaacttgctgcttcagccccaagggtctgcctaaggagagacacgtcctgttgaaatttcaaaaatatcaaacaatgcaatgtcactcattgcagtcggtactcagggccctttcacctaaggccctaagaactgccagattggtcctgtttccttctcttttctattatacttcctaagacatttgctaattcttgccttctaactacctattcagagtatacagaccgtcagctgttcctgacctgcaatgtgtcatcaactctgaaccccaagcctcctggggcttcagcagagggagtctaacctctcctgtagtttcctctgtagtttattggacagcagttttctcccctacactgtcaacctgtgacaagccatgctgcgcttcttccaaaaatgtgttgaaatataaatatttcaattcattggttattgccaactctcattactatcccctctcccctcagggaagtctgaaaagaaatgttttgaaagcattagaatgtgaatttttatagcgtcagtttgagccctataattcataaataagctacatgaggaaaaaagccaaattattacccagtaacaacttacctgtttagaataatccattcacctgttctgtttcarggtccaaatcaatatcataaaaacagggccgggtggggagtccaggcattgtgctcatctaggatgtaaaaaagcattacaaataaactaatgctgggcacagtggctcacgcctataatcccaggctgagrtggagaggatcacttgaggccaggagttctaaaccaccctgggcaacatagtgagacccccatctctacaggaaataaamaattagctggatatgatggcatgtgcctgtagttccagctacttgggatgctaaggcaggaggattgcttgaggctaggaggttgaggccacagtgagccatgatcatccgattgcctgggcgacagagcaaggccatgtctaaaataaacgtaaagtcatctttactttcacttttccttcagaaagaaagcccaaggcataaagatagaacatcattttatagttgtcaataaagtgggtactcttgttacatattaaaaatcaagtcactgatcctgttaaaaaactcagaaactgatccctgccgggcgtggtggctcatgcctataatcctagcactctgggaggccaaggcagatggatcacctgaggtcaggaatttgagaccagcctgaccaacatggtgaaaccccatctctactaaaaatacaaaaattagctgggcatggtggcgtgtgcctgtaatcccagctacttgggaggctgaggcaggagaatcgcttgaacctgggaggcggaggttgcagtgagccgagatcttgccactgcactccagcctgggtgacagagcaagactccatctcaaaaaaaaaaaaaaggaaaagaaaagaaactgattcctcatgtccttctgcaaaccaaatgccagccttcactatcatcttccatgtggtcacaagcagtagcaggaggtgtttccaccttcaccttacaagaatgagtgctggggagtagaggagttgctcactcgcctcctcagctcacgctttgcaagaccaaaaggaggtacagggcttgyctgcttttaaattttgtttcgttcagtcttgctagctgagctgcccatgtgatttttgcttcagcaacacgatggtaggagttagtatcctttaacttgggccaagacacttttgtacataatctagatggttttataatcaccattcttactggcccaaaatggccttctaaaactaaacttgtaatgcttacaaattatatttgtactcactacttttctaaagactcggctttgacaaatttctacttagatgcaaatatgtacggcttgcaagtgaaaactccgtatatttttatctgtaacaatgtcctatataatgaatacacacaagttccaaatcaaatctagacaggaaaacagcttaggttacttctaaaacttaactataaaaaggttatttaaaaagagtcatcttctgtaacacaaaacatcatcaatactttagaaaacctcattctgactgacttctgagtaccaatcaatattccccaaaacacattatagggatctgacaactggtttatattcttatattgtgtaagaggtaaggaggtgctaggtgtgagacaagtaggagagaggaaaggatgggtccttagacacagcagaaaaaccggaagatgacattataaagataaaagacacatgcccattgttgtagacgggcatgtgcatgtcagcagaaaaccctaaagatggttccctaaacagtgatgagtaggatttttgatattttcactcattccccaagaggattttccctcctaaacactggtcactgataatcagaaaaaatacaaaaaaagacaatattatgtgtacgcacatgtatgaacctagatataaagttctgaaaataagccatcacactttgaattaatatagaaaatattcaaataatctgagtctcgttaaggccccaacggcaactggaaggtgttagaatagtgattaaaccatttgatcatgtgtggaaacgccttggtccaacttaaagttaaaagcctctgacacatactttgttctaaatgagaaagtcttgagttcggcaggctgtgtctctctccaccttacagcctgactctcactggcctgactgcttccagatttgctttcacctctactgttacccttttcttcatgtgaagatcaaaagtgacaagaaagagtacagctacccgtctttcagctggtagctgctgacaacttctccaaaaagaacaacacatatttctgcactattcaaggtgctgggtaaaaatggtggaaaattcctaccacaagggatttctacaaatcctggagactgatgtacatcatagcaagtctaagccttctgctctctatagagagctaaggaggcagtgagatgcaggcatttgtgctaagcaccactgtgatgtgatgatgttgcctacagtgtgagctgagggcagcagggctctcacctttcataatttgcccaaggccaagatctgaagaggtgaaaatgaattcagctctaatgtcctacgttttcaactctataatgccacctcctaccactttcttactatactgaaagaatgacataaatccaaaaggatgtatgttggtttcttttccatgtgtgttgatttagtttaatatttcagtcctgtattgcatggcagtacaatctgtagatacaggatacagggcagatttaggggataacctagattcaggatccaagttaaccttggaacaatgtcagcccaaactatgattatgtccttaagcatccctcccctctgcttcccaactggcaatattcttctttgaatatgcataaaatctgtaagataagaaagcaatggacaccttgttcaccttgaagcgtaaataagcaacctcacctttcatatctcaagggtccatttgcattttttaatggggaaattccttacttaaaaataatgaaccccctgaatttcagacgtaagttctaggcctgtcagtaaaacctctgtccctacctcctagggctgtggggggactgagttaatctatgtaaggctcccaataaacattaactgtgattatgttagcactaccccagcctatcaactgggctcatcctagattcagtgaagagcatactgtccctgggaaacagaattttttattcagtatgagtagtcctggcatcattcttgatttgacaccaagatggtccacagcaagagctatatagctcctgctttatagcttatgatccacagcaatcataataggcccgattccaattttcttctgggcagtgaactctgctcacttggcatttgcttgatggtttcggcaacacacttcagacgagaagtgcagatgcgcccactactcccttgcagcatgcacttaccgttcctactaaggggtacagaaaaccagccccaacgctggcgcggatgtcgcgaatgggcagaatgaagcctgtagggacacctttttgctctgggttgtgagacaaagacaagtgtgttttagccatgcagatggggagattcccaaagccctggggaaagaagggaagagagggaggacaaatgaaaagatgacaacccagcaatgaccatctgggccctgtgattacatggattcttcaatttattcgaaacatccaactccctttatatacatctctatcttgctgtcctccagcttatttattaagccaaaaaaaaaaaaaaagaactgttgggtgagggagttaggtactcacaactgtagtccacaagtgaatattttatttccatctatggaaataacataaaactaatttaaaataatagtttggagtagatatgagaataaaattggagagggtcaggtgcagtggttcatgcctataaattccagcactttgggagactgagatgggtggactgcttgagcccaggagttcaagaccagcctgggcaacagggcaaaaccccatctcaacaaaaaacacaaaaattagccaggtgtggtggtgcgtgcctgtaggcgcagctactcaggaggctgaggtgggaggatcgcttgagcctaggagtcagaggctgcagtgagctgaaattgtgccactgcactctagcctgggcaatggagccagaccctatctcaaaataacaaaaactggagacgttctcaatattttggtaagacattctgtatttcctcatggatttctacacattcatataacgcctatgggtaaataaagaaccagggactgtgccacctaatccaaactcagtatttcagaggagagaaggctgccacccagagaagtgaagcaacgggtayttggcagggctgggaggacccagagattgygactccaagtcctgctttgcaaagagttgaaaggacaaactaaccaaacatctacctgcttcgtgtagacttcagctttgtgttgagcttcgggaagtaattcaatgtcatctgctccatagatcttctgtgcaatgatcctgattttatcctcaactgggagctaatgcacaagaaagagatggggacaccatgactggacacatgtgaggacatttaaccaggacatagccacattctaggtcagagtccctaaaaggggcagaagatggtttttatatacatatacataagcaaatagtttgaggttgatgattgggttaagaacactttctttttgtttttttgagacggagtttcgctctgttgccaggctggagtgcaatggcgcgatctcagttcactgtaacccctgcctcccaggttcaagcgattctcctgcctcagcctcccgagtagctgggattataggcatgcgcaaccaagcccggctaattctgtatttttagtagagacggagtttctccatgttggtcaggctggtcttgaactcccaacytcaggtgatctgccagccttggcctcccaaagtgctgggattacaggtgtgagccactgcacccagccaggaacactttcttttaatatcaagcctcagattttataagtgaaaatgtcccacagaggtaaagtttttatatctatatatgcagatatacatatacacacatacatatatatatagatatagatacacatattaatatatattaaggttttaaatatatacttacataagtacatatttaaaatctctcgctaagtacatcataaacagtgttgctgactacccaagaataattatttcttcataaataaaaagtagatgttcaggctgggtatggtggctcatccctgtaatcccagcactttgggaggaggccaaggcaggaggatcacttgagcccaggagtttgaaaccagcctgggcaacatagcaacactctgtctctttaaaaaataaaaattttaaaataataataaaaattaaaaagtagatgttctattctaatactggagatcagtcctgtcaaaccagacctggggacactgtttatgaaataagacaaccaatgtccatctacataactcccagtctgtatatgagaggcagatgccacccttaacacaattgattaagtgcaagcaccaggaattaggaaatagtcataaaatcaaaatcacccaggtattagaaaaaacaacccagtgatttacatgatcaacacgcattgggcatgtccactttctgtggcacctgaagcaaacagtgcagtggacagagaccagtggtctaactggtgagggcctcagtcccatgggctgtttcctccggggcaaagccttcagagaagtggagctggcttcttaaatgctgtgtagactagttcagggcattaagattcaaagagaacagcatacggagaggttgcctaaaggaaatcagaagcaaagctactcatgggtaatttggatgagcaaattacaaaaattaggcaatatatctgtctttatagcaactaaagctaaaagaacatattaggcaggttcttatttatttgagacagagttttgcacttgttgcccaggctggagtgcaatggcgtcatctcagctcactgcaacctccgcctcccgggttcaagagattctcctgcctcagcctcccaagtagctgggatcacaggcatgggccaccatgcttggctaattttatatttttagtagagacggagtttcaccatcttggtcaggctggtctcgaactcctgaccttaggtgatccacccacctcagcttcccaaagtgctgggattacaggtgtgaccacagcgcccagccaagttttgtttttaaaaggagcaataatctatctataaaaacaaaaattcccttttgaactaaacaatgataatttatgaaggggctttatataatgggcatgaataaagtgaacattcaataaggactttataaagatgaaacacagattattttcatatgcatctcataactggagctctataaatgccaaggcacatttagaacttctgaagcaaaagcactttggttgaagggtgatttaagactagcagacgctgagtaagacaaaaagtggcagcctcctgtttgccagaatggataaaagttgcaagtagaaaygggttctaaagtccatatgtccctgctctttcaggtctcctgctggttttcaaggactgggcttccagccttgggtgctatgcattggagcctggagagggtgcctataaatgctttgcatttgtgtgcaaatttgtgtttatggcatttttctaaaaggatgattgctgaacagattttaaaacttgcctataaaatcaaagctcaacaggagaatgtcaatgtcaatgttaattaactgtaagtgtattatatctgcaaggggcaaagagaaataagagaacactaaaactcaagagtaataagtttattccttctgcttttttatggctgtttttgaaagtctatgattatctattaaaaaccaagccaggccaggcacattggctcatgcctataatcccagcactttgggaggctgaggcaggaggatcacttgaacccaggagttcgagaccagcctgagcaatatagggagacccagtcactacaagaaaaataaaataaaataaaacaaaattttttttttgagacgaagtttcgcacttgttgcccaggctagagtgcagtgatctcagctcattgcaacgtccgcctcccgggttcaagcgattctcctgcctcagccttccaagtagctgggattacaggtgcctgccaccacacccagctaattttttgtatttttagtagagatggggtttcaccatgttggccaggctggtctccaactcttgaccttaggtgatccacccacctcggcctcccaaagtgctggggttacaggggtgagccactgtgcctggccaataaaacaaattagccaggcttggtagtacatgtctgtggtcccacctactcagggggctgaggtgggaggaccacttgggtccaggaggttgaggctgcagtgtgccatgattgtaccactgcactccagcctgagcaacagagcaagaccctgtcttaaaacaaaaaacaaaacaaaaaaatcaagccagaaactagcctagagaataggaaaaattaactacagcatatatctcatattcctaacaaagtttccagttgttgtttccatactacttaatgtcaaatcacatcctgaaatacactggacagataaatgaaaacaaaacacaaccctataataagaaccttttcctgaactaactttattgtatcatagagtaagcagggctctacttagaccaggtgtaatttaatttgcttagtgatggaaaaaatgatgaagcttcctggagtactttggttttgcatgtgagggccctcaacttgaggcagcaccttaccaggaagtgaacgtgggggcacacttctttcccctattactgaaaagccatcagaaaaattttgtaagctcgatgcagccccttaccaatctgctacatggttggtgccttgttttaaaggctacagtgaattacatatttggtctatatgtaaccttctcttctgccacctgtactttgacccttttcgaagttaggatatgagcaacggttccccctccaccctggggtattcctgcttaaatcccctctgtaagtaagcagtggcatatgtttataagaaggctgtctgggcggacgcagtggctcacgcctgtaattccagcactttgggaggccaaggcaggtggatcacgaggtcaggagttcgagaccagcctggccaagatggtgaaaccccrtctctactaaaaaaataagaaaaattagctgggcacggtggcagacgcctgtaatcccagctacttgggaagctgaggcaggagaatcacttgaacccaggaggcagaggttgcagtgagctgagatcatgcctctgcactcgagcctgggcaaaagagcaagactccgtctcaaaaataaaaagaaggctgtctacagctgggagtccaggctgtggttgtgtaagtcacctacgtgggaatcaaaccgcaaggctgaagctgcgaagcatggggctctaatagaagtagccacacagaaacttcactgtgcccttttcgtcttttttctttttttgcagacagcaaatcacccaccttgaggtcataaaggagctggaagctgctgggtgcttgtgctgctctctggacggcctgagccagggctaaggcacmcttgcccccttctgcccagtgagtgcacttcacggcatcaaaagccccatgttctctggaaaggcggctgatgaggtccagctcagactctgtatccgtcctataaaggaagcatttcatatcaaagcatggaaaatggctggagagacagaattgtcttctttttgccattaaacctcatgtgaattacccactgataaacgaacactaaccaagaaatttggcctgggtttgaatctcagctccgaaacttactagctggtgacttttggccagttacctaatctttatgtgcctcaatttccaccctggtaatacgcgaataatcacagcacttatttcattgggacgttatgagactcagatggtaaatccatgtaaaatacttggaaaattcccagcactccagaaggaatcagtaaatactagcatttaagaattttgctggctgggcgcggtggctcacacttgtaatcccaacactttgggaggccgaggtgggagaatcacgaggtcaggagatcgagaccatcctggctaacacggtgaaaccccgtctctactaaaaatacaaaaaattagctgggcatggtggcaggcacctgtagtcccagctactagggaggctgaggcaggagaatggcatgaacccgggaggcagagcttgcagcgagtggagatcgtgccactgcactccagcctgggcaacagagacagacttcgtcccccaaaaaaaaaaaaaagattttttgcttcccattctactacggtgaggccattataacaaaaccctgaccaccaatgcaatacctaaacaacccacacaagttcttgcatgaccccttccagagtaatatgcccaattctttgtcaagacaacatcccaccagatctagtaaaataatggaacactataggcctatgaccttctgttagcataaaaggcctctaaagatgaaaaaggaacattgaacttcaggcttgtgtgttacttcccccagtggaaaggaaaagggcccataggagctgaatctgactttgggaccctcagtgggtgaggtggtgagcccgcagtgacgtaygcaatgcctgtcacagtgcaggctaaaaccacaggctataaccaatagcagtaactgaaaaacaaaataaagctaaaagcagtgctgtacaatcagctccaggagattttccacattcatccttttcgcttacactctacacttacttgaatgcattcacggccactactactggaattccaaacattctggcattttcaatttgtttcttcaagttactgaagcctttttcaaccagctccaggttctgtaaaaacaacagtgaaaggcctatgagatcagagagttgaaaaccactgcaggttcttcttcaaaggcaaacaacctccttgagccagcagccactcactatcaggacaaggaggccaagaaagaagagagaaggtcccttggtgcattttttccagtgcggtgagtggatgctatggagaactgcagctttcactccagcctatgacactagagtagagctctgcttgtttcccagccttcaagaaaaaaagagctggtatgtttcctgtcattatgccacatcattatagcttatttgctgtttgaaaggaattagttacccttacccaaattatatttaccaattgtgtttatagattttatgtattcatagggttatgataatacaaattaactctactctgcacagcacagacccttccatcagaagacagagcctaacaacatagtggctggcacagaagaggtattcgttatatggctgccgtaaatactgccaggaaatatgaagtaagcagtgatgttttcaaaggttttaatgaactcgaccgtgaacgagggcaagaaataagataaatactatctttaggaatcaggccagtggctgggcccagtggctcacacttgtaatcccaggactttgggaggctgaggcaggagaatccacttgagcccaggagtttgagacaagcctaggaaacataacaagaccccatctctacaactgagaagttaattaaaaaaaaaaaaaaaaaaagggccggacctggtggcttatgcctgtcatcccagcactttggggggccgaggcaggtggatcacaaggtcaagagattaagactatactggccaacatggtgaaaccccgtatctattaaaaatataaaaattaactaggtgtggtggcaggaacctgtagtcccagctgcttgggaggctgagggaggagaatcacttgaaccccagaggcggaggttgcagtgagttgaaattgcaccactgcactccagcctggtgacagagcaagactctgtctcaaaaaaaaaaaaaaaaaaaaaaaaagaactgagctggatgtggtagctcacacctgtaatcccagtactttgcgaggctgagatcggaggatcacttgcacctaggagttcgacagcagcctgcctgggcaacatagggagaccccgtctctacaaaaaattaaaaaattagcctggtgtggtggcgtgttcctgttcttccagctagttgggaggttgaagcggggagactgcttaagcccaagagttagaggctgcagctatgatcacgcctctgcagtccagcctaggtgacagagtgagaccctgtctgtaaaaaaaaccccaaaaaccggctgggcgtggtggctcatgcctgtaatcccagcactttgggaggccgaggcgggtggaacacgaggtcaggagatcgagaccatcctggctaacacggtgaaaccccgtctcaactaaaaatacaaaaaaattagccggacatgatggtgggtgcttgtagtcgcagcttcttgggaggctgaggcaggagaatggtgtgaacccaggaggcggagcttgcagtgagccgagatcacaccactgcactccagcctgggtaatagagccagactccatctcaaaacaaaacaaaacaaaaaaacccaccaaaaaccaagtactacaaactaaagggaagcaattaaggaaatgtatctttaagtatgtttactgcagccctgcttgtagcattggaaaattataaacataaacctcctccaagggggactgggccaatgaattatgacatatacactcaataaatatttatcatgcagatgttatgaaagtgagacccatctgtgttaacatggaacctgtccaagatgtactaaaggtgcaaaaccatggagagcttaattattccattttaggacaaacacaaaaatacatgtatataattcatgaaaaatttttaaatgtcgagaaatatgcaccgaactgttaaggggactcaactcacatatattacattcttataatgtttaattattattttttacaaagggtatattactattgtaggcttaacaatacattaaatattttaaaaataaaagagtcttctataaaaatacatatactgaatcatcgagcaaaacccagcactaatgtttgttgatcccaaaaaagcagaaataggtaggataaaaggtggaaaacaactaggttcattataaatgtgatttatgcttttttcctttaataattgaaaactgagattatgatttatttgagcttctaaagaacactgctaattctttacctctagtcacatgaaaaccaattaatatgtaacgctgatcaagaacagttttaaataagtagaatttcttaaatgaagacaccagctgggccagctaggggcagtcactgtaattagacacaggaaaggctgtggggtggcaggagggccagaactgtgaattcccctcctacgcgtgaatcagacaaatgaccataaaaggcaaaccataactcagaagacaggcagactgaaggtaccagcaattttttctagccagttttgaaatacttcatttggggcctgaacagtgaccctgtattgcttgataatttaaaagccttccaaaaaggcagaaaaattgaattagcagtgacagcaggtgaccttgccaccttatctgatggcctgtctttcctgtaaccaccccaaactggctttagagatgtttctttgatggtaaatgacataaatatgaaaagatttgagctcacagttgttctctagcctcctgtttgatgctataaatatccaggaagctttgtctagaaaaacaaccagaatcctgaccatatatcttggcccgttaatatggatttaaatcggcagaggagaagccatttcaaaaaaggtctctacttgcttctgatctgaatggcatttggaacttacccagccaatgcagggaagacaatggaagggaactgctattagtctaggacagggtttctcagcctcacactccgacatttgagctggataatgttgtaggggctgtcctgtgcattaaaggatgtttagccagcatccccagtttctacccactagattccagtagcactccccacctccagttgtaataataaaaaaagtctctagacattgccaaatgtccccggggtcaaaatcagctgttgagaatcaaccactggtctagggcagtggcttattgacaccctatgtgggacaattctattttgtgaggtgcatcttccctatctactcatttaatataactcctcagcacactgcaggccttttggcaccctgcaccctgggtcacagcaataacccattcatttccacatgggccaggtggagaaatgctgattcaaggtgtggtgctttctaggacaygtgatgagaaataactcaggttacctcctgtatgtaagccttgggaagaggcagtccagcagtgacctggaaggaaaagaaacagagtcagaggcatttcctatttaaatctcctagcttaaaatggtgcttttcatgtgttaaaggcaagacgctgcaatgcttgcaggctgtacagtagtataagattatttcctgccctaaggacttagggtatgtgaccaatcacacagcacagaacaaaatcgactgctttgggcagcgtggaagacctctatgacctgaattaaggaggtgagaaggaccggatcgatggcaggagaggtggaaaggggtgtaccaagcaggtgcagtgactcgagtgaaggccatagcagtggggttggaagtcaaggggagtgtggggaaagaggaagcggtcgggcctgcggaagtcaccctgggatgtctgtcgatagagcccgtgatgagccctgccatggtttcatgaactggtccacagtgccaacctagcattggtggagctgaaccgtggtgcagggtcaatacaaacaagagggaaaacaatacagaaggattttctttctcttttgtagagtatatctaaaggatggaggtgtctggtgcctccccgccccgccccccagcccccagtcttgatctatgccgtggctcagccctgttgcatccacagaaatgagcaaatgggtgaaggtgtccatttcatgggccccaccatgggcagtggatagtgattaagaagctctgccctcttccattgcagtgagactatgtgctccaactccagaaggggctgtgtggaggcagagcaagaagcaaggaccttacaggtagcttcccgtcagcaagctaatgagagcaggaggcctactctcttgacagagccatatgtgcaaatgttcccctccatgcacagcattatgggacattatcctgactgtgaggtcaggaggaagcaaggaaaggaggtgtgatggtgtgagggtgagtgaggggtgtaagagagaggaatgttagttgtgactgggaaaaaaaagggagtctatcctgtgctactagcagaaaggagtgtgctgggttgggagtgcctttggcactcagggataactaagactggataggggtgctggggttgttatggcagcattcccagtgtgctccggggacccaatcctttgaaggggtccatgaagtcaaaactatttccataagattctgtaacatcttatggcccttttactctcattatcattctctcattgagcatataatggacttttccaaaggttatgagacatgtgatgtcacaacagatcaagtgctgtcttcaattaagccagacccagagaagatctgaaaaatgtacaatgcctaaattttgctgggaaaagataatgcattttcatgtttacaaagttctttatgtttacatgtaactcagtttt

SEQ ID NO: 5705 - DNA, 83712 bp, Homo sapiens
ctgacggatctcctgaggtcaggagtttgagaccagcctgaccaacatggtgaaaccctgctgtactaaaaatgcaaaaattagctgggcatggtggcacatgcctgtaatcccagctacttgggaggctgaggcaggaggattgattgaacccaggaggcagaggttgcagtgagctgagatcgcaccactgcactccagtctgggcaacagagcaagactccatctcaaaacaaacaaacaaacaaacaaacaaaaaaagcttaaaaattaaattctggtgtaaaagacaggtagcaaacaaaaatataaagaaataaagtcattttagatggtagtaagtgctatgaataaaacaggttaatgagatagtaatggggatgtagatggagaggtaacttttgatagtgtaatcaaagaaggcctttttttggatatagcaacataatattatacattttattaacctgtctttatcatttaaaaatgtataaaagctggtcacgcgtggtgggtgatgcctgtaatcccaacacttttggaggtgggtggatcacctgaggtcaggagtttgagacaagcctcgccaatatggcgaaaccctgtctctactaaacatacaaaaattacctgggcgtggtggcgggcgcctgtattcccagcttactcaggaggctgaggcaggagaatcacttgaacctgagaagcggagcctagatctcaccattgcattccagcctgggtgacaagaacgaaattccatctcaaaaaaaaaagtatgaaagctatcttacatgtctatacatatgtatctgctgttcctttaacaactgcatccatcctgacagaaattttgttttttgctattgaaatcagtgttgtgattaacagttttacacatggtttttttgttttgtttagttttagtttttgtttttttgagatggagtttcgcttttgttgctcaggctggagtgcaatggtgtaatcttggctcactgcaaccttcgtctcctgggtttaagctatcctcctgcctcagcctcccgagtagctgggattacaggggctggccaccacgcccagctaatttttgtatttttagtagagatggggtttcgccatgttagccaggttggtcttgaactcctgacctcagttgatccaccagcctcggccttccaaagtgctgggattacaggcgtgaaccactgcacccagcctatacatctttctttatatgtaaatattactttaagataaattcctaaactgggagaggtggctcacgcctgtaatcccaacgttttggaaggtcaaggtgggaggatggtttgaggccaggagttggagaccagtctgggcaacatagcaagactatctctacaggaaaattttttaattaatcaggggtggtggcatgtgcctatagtcccaactactcagaaggatcactttagcccaggagttcagggttgcagtgagctgattgtgttactgcactccagcctgggtgacagagtaaaatcctgtccaaaaaaaaaaaatcctggaagtggaattacaatgtcaaagaaaatacaaatttaaaattttcgggccaggtatggtggttcacacctgtaccaatcccagcactttgggaggccaaggaaggcagatcacgaggtcaagattgagaccatcctggccaacatggtgaaaccccgtctctactaaaaatacaaaaattagctgggtgtggtggcgcccacctgtagtcccagctacttgggaggctgaggcagaagaattgcttgaacctgggaggcggaggtttcagtgagccgagatcatgccactgcactccagcctggtgacagagcgactcaaaaaaaaaaacatttttttcccgtagatattatcatatcaaattacccctgaaaaaggttgtaaaaacggggcctctgcaaaaagtaaacattttttctagcaactgcctttataagcatttaaataaaaatattttttccttctatttgctgtgaaaggttgattttcattctttatttgaccaatttgcaacacttgacagaattaattacctctttttccatgaaacacattcttcacttgtcttgttttttttttttgtttgtttacttgtttgtttttgagacagagtctcactctgttgctcaggctggagtgcagtggcactatctcggctcactgcaaactctgccccctgagttcaagcagttctcctgcctcagcctccctagtagctgggattacaggcacgcgctaccacacctggctaatttttgtatttttatagagacggaggtttcgccatgtttgtcaggctggtctagaactcctgacctcaagtgatccacccaccttggcctcccaaagtgctgggattacaggcatgagacaccatgccaggcctcctcacttgtcttctaaggtgggatgctcttggggttttccttagaacacactggactctcctttccttttaagagacagggtcttgctctgttgcctaggttggagtgcagtgtgatgattatagcttactgaagtttccaactcctaggctcacaggatcctcccacctcagccttctgagtaactgggactacaggtacatgccaccacgcccagctaactttttaaatttttatttatttatttattttgagatggagtctcgctctgtctcccaggctggagtgcagtggcgtgatctcggctcactgcaacctctgcctcctaggttcaagggattctcctgcctcggcctcccgagtagctgggattacaggtgccagccatcacgcccagctaatttttgtatttttagtagagacggggtttcactgtgttggccaagttggtctcaaactcctgacctcagctgatccacccacctcggcctccaaaatgctcggattacaggcaaattttttaatttttatttttgtagagacagggtcttgctatgttgctaaggctgttctacaaactcctggattcaagtgatcttcctgtatttggtctcccaaagtgctgggattagtaaaggtgtagccacagctcccagctggactctccttttcaatcttccctcttggttcctcctgtctccttgcattctgaacactgaaaggttctaggtgtcagtctttggtcctctctctacctacaatacccttggttggatctcattcaatcccatggatttaaatatcttctctccatttggatgtctaagagaaatctaaaaatgtctaaagccgaattcataatcttaaccccaaaacctagtcctacattttactttatttcaactcagcgaatggcaattccatctttccagttgctcagagcaaatccctgctttctttcttttacattccaagttcctctcttcattaaggtttctgctgaagtcagatgcccaaagaaatctcttaccacatttctgagacaaaactttcccacctcccagcatcactgcctatcctcttagcttgcctatttttaaaatatagcatgtcataatctctaaaattagcctatgtatttctttaacttgatcgttgtctcctccaccagaatatgagctgagagcagaaactttgctggttcactagggtatctctagcatctatagcagtgctgttggcatagtggccactcaataattatttgctccatgaatgaacgatttatgcaactcatacatagataactgtcaaaaaccaggctgttgagatggcaaaggcagtagatttagagaagaaacatcaggtttggggcctataccagccacagctatgcagctttgggtattatccttcaaagtctatccctctgtaaaatgggatttctgccatcttcctcaacaaataagaaagctggaatagtcaatacctatttgatagtataagacaaaagattcactatctgcaatttaccagaaacatttccttcaattttcttcttaatttcacttgtttaggtacaacacaatatgagacaatgtgttttagggttattattataatgacattatattactaagtctgtgcctttaacatatcacttgtgcaaactttaagaatagtaactttaaggccacgcacggtggctcatgcccattatcccagcattttgggaggccaagggagactaatcccttgagatctagaccagtctggtcaacatagtgaaaccccaactctaccaaaaatagaaaaattagccggcgtggtggcatgcacctgtggtccaagctactcggggggctgaggtgggaggatcatttgaacccgggaggcagaggctacaaagagcggagatcatgccactgcactccaccctgagcgacatagcgagactccgtctcaaaaacaaaaaaacatatattagaaataattaccagaaatagaaaatcacaagagattatctaatcccgtatatggggctactataaataacctcagaatttagaaataagaaaaaaatattaaaagccccaaaattaataaaaaatcagttttaggccaggtgcggtggctcacgcctgtaatcccagcactctgggaggccgaggcgggtggatcacgaggtcaggagttcaagaccatcctagccaagatggtgaaaccccgtctctactaaaaatacaaaaattagccgggcgtggtggcgggctaattaggtggtgcctgtaatcccagctactcgggaggctgaggcagagaactgcttgaacccgggaagcggaggttgcagtgagccaaaatcgtgccactgcactccagcctgggcgacagaatgagactccgtctcaaacaaacaaacaaaaaaagttttagatgagctctgccagtagtaaacggcttgtaaaagaaacccggtatctggtcaagtcctaagtgacctgaaccacgcatcttcaggactctactgggatgactgtaacctgaacgcggttcctagagcagagcaagcatattccttggactcagtaacacaaggggccagtcctctccagcatcccagctgccaccgccctgtcaggctccccaggcaattgtccatcttactccttctccagcgtggacgcttaaggggagggagcatccctcctcgagggtcaactggcatgtagcttacgaagaccgcgtgagttctccaaccccagacttgctgcggggcggggacgtgggggtgacaaaatccagactacgaccctccatgagccctggcaaccccggggtgaccccaacaccgatgaggccacgcgcgctccagctctgacactccttccagatcggcggggcctgaaacagcgggctaagcttcacctacggctgagcgtcagattcagctgaggagattctaaaagcgctatgctgggcccagacccaggccctccagagcagaacgcggaggggcccgaccccagtctggtggcgtaggtgtgtgacaaagtatgagggcgcgccaagctctccagttccacatctgctgtcgagtccagcgcctgccacgctcccgtgcggggacccgcccaaaactccctggaagccaggcgattcagaccccgccaccgcgtccccagagactgggcggaaaccggagactcgcctcccgaacccgcgaaactatctcccgcgagactgccccgccccaaccccgccccgcaactctactccctgattggctggaattacggccggattccggagtcctttccagctccctcttcggccgggtttcccgccgaatacaaaggcgcactgtgaactggctctttctttccgccaatcatttccgccagccattcatcaccgattttcttcatcttcccctccctcttccgtcccgcagtccccgacctgttagctctcggttagttaagggactcgggtccttccgaactgcgcatgcgccaccgcgtctgcagggggagaagcgggcaggggcgcaggcgcagtagtgtgatccccyggccagtccctaagcacgtgggttgggttgtcctgcttggctgcggagggagtggaacctcgatattggtggtgtccatcgtgggcagcggactaataaaggccatggcgccagcagaaatcctgaacgggaaggagatctccgcgtaagcacctgacattgttgttgagtgtggggctgtggacgagggctctgagggtgtgcaggtcccccggacccattttttgcgggagggacacttgtagcggaagagttaggcccataacacctgaagacctgcagccaaagaaagagaacccgggcacaacctgcgtttgcaagtggactgcctagtggctgtagccgctggctcctgtgcttcggggaaaagtcctgtgccgactrtgctcccaaacgcgcagctgctggtgactttctgccgggagagtgggtagttgcggcttcctggagcccccctagtcagaactcagaaatccaatctacttaattcccgttaatttggaggtgagtagatggagactagtgaggtgacaaggcttgacaagactacaaggctgataatgacagagggtccttccagctcatagcttttcccactataccatagtcttatcatacgctaagtgaaatctaatacatttttcctttctcttcaatctcgtgcttctctctaacagccrtctctctgccctggtcctagagttacttgaaacgtaatttggctcctgagtcctgagaatattctgcattccwcttgacctctgcctgttctacccttgcgggacatctgaatgcttaattagtgggtatcgttgccagctttactcccaggaagtaacactggctgctttttgtctgggaggtgactggtgaggaaaaatgagagtagaaggaagagggaaaaatatattccctctagtagatgaaggagggaaagatatattctgtgtgaccttactgagtttgctcttgggacctttcacatcacccgttatgtaagtaactgttgccagccacagcagttactaaattgtaattgtcctgtaactcctaactttgtaataggtttttgagtgaattacaaagtcatcggtggtgaaaagtccgggcccagtggctcatgcctgtaatcccagcactttgggaggccgaggtgggtggatcacctgaggtctggagttcaagaccagcctatccaaaatggtgaaaccccatctctactaaaaatacaaaaaattagccgagtgtggtggcaggcatctgtaatcccagctacttgggaggctgaggcaggagaatcacttgaacctggggggcagaggttgcagtgagctgagatgcgccattgcactccagcctgggcaacaagagcgaaactccgtctaagaaaaaaaaaaaaagaaatcacaatacttactgcttagtgcttttcaacatgtggcttgctaaactgtatttctgctttactttctgtttttgtttgcttgtattcaaacttacttccttttccagtggctttttgttttaatataaaaatcttccttttagaaagactgattgtgaagagataatttagtgcataataatagtgcagataatttagtacaataataatgcatctgggccagtactgagaataggtgctcactgaatatactttcgttaattggagagcaaattaaatatgtttatcaactccataagggcaaatacatgtattgtcttatttttgtctatatcctaaacacctggaaaccctgtttcctgccttactacttgtgtggttttaagcaaattaattaacctttctgtgccaaagtttcctcaaatgttaagtaaaagtaatgtctaggtcattgggatgttagtagaattaaatgggttcctaacagatgatcatttataattcttcctggcacataataagtattcgatatatgttgtattaataatcagtaattagttaatgtatatatgaatgattcattatctttttttttttttacatggtagctgctgccttgagatctatttttttttttgagatgaagtctkgctgtgtccaatcttggctcactgcaacctctgcctcctgcatacaagcaattctctcatatcagcctcctgagtacctgggattacaggtgcccgccatcacgcctagctaatttttttttttgagatggagtttcactcgtcgcccagactggagtacaatggcrtgatctcggctcactgcaacctctgcctcctgggttcaagcgattctcctgcctcagcctcccaagtagctgggattacaggcgtccgccaccatgtccagctagtttgtttgtttgtttgagacagagtttcactcttgttgcccaggctggagtgcaatggcatgatcttggctcactgcaacctccacctcccaggttcaagcgattctcctgcctcagcctcccgagtagctgagactacaggtgtgtgccaccccgtccggctaatttttgtatttttagtagagacgggctttcaccatgttggtcaggctggtctgtaactcctgaccccatgtgatccacccacctcggcctcccaaagtgctgggattacaggcatgagccactgcaccggtcctagaatttcttaaaaatccagcccacttcccacattccatcctgcggattaggaaatcatttgaggccagaaaagtgatgtgatttgtccaagggtgaatggcaatggctcaactaaaactaaggtcttcacccagtatatgatgtttttcattctaaccagcacttactacttgctaaaaggaatttcgtaagcttttctttttcttttctttctttctttctttttatttttcagacaaggtcttgctctgttgctcaggctggagtgcaatggcacgatgttgtctcactgtaacctccacttcctgggttcaaacgattctcctgcctcagcctcccaggtagctgggactacgggcatgcactactatgcccggctaatttttgaatttttagtagagatggggtttcgccatgttggtcaagctggtcttgaactcctgacctcaagtgatctgtccacctccacctcctaaagtgctaggattacaggtgtgagccactgcgcccccgctggcgctttgctttttctttacagtcttcctctcattagcatgtttcccaccctgctgagaatgctatccctgactcgtcctcttctattattattctccttttatgccttcctgggagctcggacatcaacaaagttcagcattccagattccttctctacctgctctactctgtgggaaactgggtacttacatgatggatttagttgccaaattatctttctttggaagtaacagccccttttctccctcacggggaattctaagtttgcagcctgaatttgacaaccgggggaaggtctgagagttagagacaagtatctgttctttgtgggtatttattcacttactcaacaagtagctgtatgtgtcccctaagccaggcaatcttcaaagctctgagagtctaatagtgaacaaaacagcccaaatccctaccctcatgaaacttgcatactgatgggtagagacagacatttaaataggtgaaacacattgtgagctggtgggaagcacaaagagaacaccagagcagaaaagagggacaggagtttctgtggtatggtggctgcaattttaaatatgggagtcatagtctttgtaaaagtgacttacgggcaaagacttgaaggaggtggagccttaagcctgccaatgttgtgagggaaatagctcctgaccaaaaacacagcctgtgccatagacctttgtcctcaccagttactaacttactgctttggggggtcaatggcaatggccctgtgagaagctgaccgagtggaggctcctgagtagaggaacctgaccctgccctgggcagaagggtggtgtcttttaaaagattatgcaaagtgggagaaggatgtgcattagtgttggaagacccaccttgctttgtaggcaagaaagcatagttgttctataagtgggcctttcaaaggggggcttactacatttatatgatttgtttggtttttccttcccttagtttgctataattaagcctgytctctccattggtggcatttttcttgattaagtctcctttctaaagagactggttgtgaagaggcagatggtttgagtaggtgctgcgagtgtttgctggcsaagtgcagggcaagttgggtatatttgtaagctcgctgtggatggtagctccagagcctaagcacggtgctgcctcctctgtgcatcactgggtcatgcaatttacctctgtgccttagcttctgtatattggggtagtaatgtcacctaactcataaggttgttagaattaaatgagtttaatacctataaagcatttagagaagttgttggtacatggtaagttttaataaataggtacttagaaagtactcattgaataaaaaagtgatgtttgtgtttatccaggctgtacctttgggagctggcttataatcttgagacttaaaattagaatttatcctagtgatcaaagataaaagtttggaaccttggctgtacatttagctacagggctagaagaactgtttttgtgaaaataatttgcttaccatagtgaagggcaggtcttcttggttactaagttaacatggataagacttttactttgtcctgtagattaaatacatgtaggcccttttgtgcttaaaaagatttgtctgggcagggcgtggtggctcatgcctgtaatcctaggactttgggaggccsaggcaggaggatcacctgagatcaggagttggagaccagcctgactaacatggtgaaaccccatctctactaaaaatacaaaattagctgggcatggtggcccatgcctgtaatcccagctactccagaggctgagacaggagaatggcttgaacctgggaggaggaggttgcagtgagccagtgagccaagatggcgccattgcactccagcctgggcaacaagagcaaaacttcatctcagaaagaaaaaaaaaaaaaatttgcctgtaatgaactccaaagtgcaggttgctcaaaagttacatggaaacttgactgtcatagctggattgattctggaagcctgtgcaggagaggtcggagttccagagaggctgggaccttcagctaggaccccagccaggctgttgggcaggttgcagcgatagtgcagcagagcccagagctggcagccaactactatggtcatggcacctgattggggatgtggtttgcaaataagtgtctgtccttgtccatcaggggagttgggatcaggcagtttgggatttgggtagtggggttttgagcagaggtctgtggttccctgttacatcccctatttgcatgaagaatcttctagaaggaaagctggcctagtacagaggagggtccttggagtggaagcaaatggctcccttctcctctaattgactcagtagaggttggtagaatagaggttaaggggcagggatgcttgtgtggccttggaaaagttagcttcactttcctttctgtgcagtagggatgatgagaactgtctacttcctgacgttgccccaaggattaaaagaatgtaagactctcaaaacaagcttctttgacgtcccatccacagtgcagaaggcccccattacccctgcactgtgcggttggctctcctttgcaccccttaattgaccaaaaagcagcttctgtcaccctgtaaatccttgaccttgaagaagtgggtggctaaaggtgccacagtcaagattcctcagccactcggctactacccttaccctcaattttgcagtttatgacactttagccagaagctaagtgacttgcccaggtgttccaaggtaggtggcagaggctcgatggtgcatttctttccctaccatgggcttgtcattggcttgctagaaggaattgcaaacttctaccctccagcaggagacaccctgggtttggttctccctgaggcctttccattgtgaggaaatcattccacccatcagtctggttgggaagcacccaaacagattctcttcaaaaagtcatttttgaagttatagtccaattttgactggttagagacaggtcagacctacttactttgctggctaagctttttttttttctttgcccctcaccacaagcctggacgggagacgtactgcttggtatctggtgcttgagaggtcccaggagataagggagcatttctgtgaaaggttttgccagagcctgtcargaacttaatcttgactgcaatgaatgacttaacattataagtgatctttgggtttaggtgcccaaataccagtccctccttartaagcagccttttagacctaaccttttctacctaaggttttgttcagtctttttgaaaagcaggaaggccaggtccttgtgaggcttttctcattacaagctcttggcaggttcttccctccaagtggagaacccttaccttccccattctttctaccttcccctctgatgatccagagggctgcaagggacctagagctgttcattggagccctagtcagctctagcggccagatctatggttaggtaatcctccaatagtgagactaattctcagtgttagaattaggggtctgcctgttctcaccagcagacccactggcatcaactctcctttgttgacatatagttaagcaccgcttcttacagatcctcatactcagagccaaccttgtcttgtctcataactcttgctactggcagaaggtgataaaattgtggcctagaggccaaatgttttttgtttggcttacagaattagattacttctcaacacatttattactttacaacattagattacttcttaacacacttatgcctgtagttacacataaaaatctggatgcttgactttttgaaagatgtgaacagtttagcaatactgtactgtctatcttcatgccatcaatttgttggatctgagtagatgctgcctaccccctcatccttgagtgggtgggggtgggggaggtgggacctcattgttcaggaatcctaccacacttggttgcctgtaccaggactccgaaggttctttcctctttgagacctttttctgaatgaacttatggtccacttttaaaatcctaaattttataaagccttaaccagtccaacctagtccgtttattgcattagatcagaggttgtcaaatggggcagttttttcctccctctacctcagggcattgggcatgcctggagtcttttgggttgtcatatggggaaggggtatgctattggcatctagcagtagaggccaggactggtgccgagcatcctgcagtgcacaggatagtccccataacaaaggatgatctggtccaaatgtcagtggtgctgagatcgaaaaaccctgatcragaagcttaatgtgagttattgtgtcattgtgtgtgtggattaatgatggactttaccctcactaagaattataggattcattaaaattttacactattctgacttattttcatgtcataaatatcaagcagtttacctttgctttcttagggctttgagttagagacaattggatggaagaactttacattataaactttcaatgaagcataaaatagcttcctcacattaagctttcaaatacgtatttgaggtaactgtcaaatttggtaaatgtctgggttaaattataataatttttttagtaaatattcttatgtaataatagtactattatcagttgactgtcttgtatactgatatagcttttgctatattagtgataggtgaaaatcagttttctttcaacaagaaggtaatttagtgttttaatttgacttaaatgactagcaatttgaaatatatgtatttcttggaacactaggtggccttacaatcacaattatttttacaaggaactacatattaagtttttaaaaattttttgaaggttttttttttttttttttgagatggagtttcactcttgttgcctaggctggagtgcaatggcgcgatctcggttcaccgcaacctctgcctcccgggttcaagcgattcccgtgcctcagcctcccgagtagctgggattacaggcatgcgccaccgctcccagttaatttttttttttttttttttgtatttttagtagagacggggtttcaccgctcaggctgtgtcaaaccccccagctcaggtgatccacccacctcagcctcccaaagtgctgggattataggcgtgagccaccgtgcccagccgaagtattttttagtagtataaaaattgttaatgaacaaatgaaataaatcaacaaatgaacaaaatgggaataaaacatattaaataaaacatttgtgttctgcattttaaaaatcttataatagctgggcgccgtggctcactcctgtaatcccagcactttgggaggccgaggagggcagatcacgaggtcaggagatcgagaccatcttggctaacacggtgaaaccccgtctctactaaaaaatacaaaaaattagctgggcgtggtggcgggcgcctgtagtcccagctacttgggaggctgaggcaggagaatggcttgaacccgggaggcggagcttgcagtgagccgagatcgcgccactgcactccagcctgggagacggagggagactgcgtctcaaaaaaaaaaaaaaaaaaaaaaaaaaaaaaaaaaatatatatatatatatatatatatatatatatatatatatatatatatatataaaacagtaatctattggggcaggggataaattgtgtccttgtttagaagaagactttttttttttttaaaaaaagccctgttgtttttgttgttgttatttgtttgtttgtttgttttgagacggagtctcagtgggtcgcccaggctggagtgcagtggcgcgatctctgctcaccgcaacctccgcctcccgggttcaagcgattctcctgcctcagcctcctgagtagctgagactacaggcgcgtgccaccacgcctggctgatttttcgtattttttagtggagacggggtttcaccatattggccaggctggtctcgaactcctgacctcgtgatctgcctgccttggcctcccaaagtgctgggattgcaggcgtgagccatcatgcccggcccgaagccctgtattttgaaggtgaatgtttttgcttcttctctgatcagttactaaaagtgttttccctgtgccatttgagaattatttgagaactactctaagcttatggcacatttcagcatttttgttgtctaaaggcagctttattttaatcatgtaaatttcatgctgcctcctttgcctaccatatagcttctgttgaaatgtccatgttatattttattttatttactcatttttctatatccataataagagttaaaggttatattttagcaatgtgtttttttctctgtcataacatgttaaatattttaaattcagccatgatgttaaacagagtgaattggaatttctaacggatttcggcaggaatgattatataagacttagggccaaagagagcctgggtgactgtgtaggggtattaggctatgcccagcaccacatctggttgtcattcaggggagcagctagggctggaactgctggggagtgcaaactgcagtattccctgttcccttgtctcagagcagaattgtggcctctatccaggtccaatcccagttaaaaaaaaaattccaatggtctattcttcttttgagctatattattgtagagaatactgacttgaaaaaacaaagtcactaactagaaataaaatttgagctgggtgcagtggcttataactgtaatcccagcacttttgggaggccaaggtgggaggatcacttgagctcaggagttcaagatcagcctgggcaacatggcaaaatcccatctctacaaaaaatacaaaaattagctgaagtgtggtggtgtgcacctgtagttccagctacttgggaggctgaagtgggaggatggcttgagcccaggaggtggaggttgcagtgagctgtgattgcatcactgcactccagcctgggtgatagagccagaccctgtctcaaaaaataaaataaataaataaaaatcaaaataaataaaatttgaaaatcttgggtatgacttctttcttgtaccattcaacattcttgatgtttactaggccagtccaaataatctatttcttgtgtgcctgtttatgtcagttttttgtgacgtgtggagaagtggaactgggagtaaccaaatcagaatgaaggaagagctgtttgtgaatgtccatatgacaaatgacaaaactggttttccaagagggacagagcatgttcaagttgaacattgtatcatatatcataactgggcaaggttgagctattcagatatgtatttatggatgtaatttcatttacttgacatcctagtgtattgttgagaagttgtatgttggtaaattgatcatcttagttttgcaagaggttatactttctttcactctaataaggagactgcaggaggttatacttttagccttgtgttaaattctttgtaaagaaaattcttttgtgaattagaatataatttgtaagtttatactgaatttggagtgggattcattgatttatcattcaaccttatgtggatacgctgtggtcatcttactagtgcaggttgagcaaaaggtgtgtgcttgagtttgttcctgtaaaatttttcatgacagcacctggagagtggaaatgtgaaaaaagatgagcatcagcactttctagaagtgttggtctaagttttcatttatttactatatgattttgaatgccatcaactaatacattttcaattatccctgaaccctgtggctcagttagtgtcagtgggagtaagaaaagatccacgtgtccgggaacagtggctcacgcctgtaatcccagcactttgggaggttgagatgggtggatcacgaagtcaggagttcgagaccagcctgaccaacatggtgaaaccccatctctactaaaaatacaaaaattagccgggcgtggtggcacgtgcctgtaatctcagctactcaggagactgaggcagcagaatcgcttgaacccaggaggtggaggttgcagtgagcagatatcgcaccattgcactccagcctgggcaaaagcgagtccccatctcaaaaaaaaaaaaaaaaaaagaaaaaagaaaaagattcacatctacttgaggcctggaaaattgttgggaagttcctgtacatattaaaccagataatgtccattcagtggtgtttttattttattttattttattttggagacagtcttgctctatcgtccaggctggagtgcaatggcaccatcatagctcactgcagcctcaacctcctgggctccagccatcctcctgccgcagcctcctgagtagctgggactacaggggcctgccaccactcccaactaattttttattctttgtagagatggggtctcactatgttgcccaggatagtcttaaactcctgttctaaagcaatcctcttgccttaggttcccaaagtactgagattacaggcatgaaccattgcctgctcctggccagtgtttttgatttaaaagagaaatacaggccgggtgcagtggctcacgcctgtaatcccagcactttgggaagctgaggtggggggatcacctgaggtcgggagttcgagaccagcctgaccaacatagagaatctccacgtttactagaaatacaaaattagccaggcttggtggcgcatgcctgtaatcctagctactcgggaggctgaggcaggagaatcgattgaacctgggaggtggaggttgtggtaagctgagatcgcaccattgcactccagcctgggcaatgagagcaaaacttggtctcaaaaaaaaagagaaatacaggccgggtgcagtggctcacgcctgtaatcccagcactttgggaggccgaggtcctagatcgcttgagcccaggaattcaagaccagcttgggcaatggtgaaacccatctctaccaaaagtacaaaaattagccaggtgtggtggcacagacctgtaaagtcccagctactcaggaggctggggcgaaaggatcgcttgagcccaggaggtcgaggctgcagtgagctttgattgtgccactgtactcccagcctgggtgacagagcgagaccctgtgttaataaacaaacaaacaaataaaagagaaatacatctaataatctgcatcacttatttgtgcttgaaacattcagtgttaaccccaccctttcctttttctctaggcaaataagggcgagactgaaaaatcaagtcactcagttgaaggagcaagtacctggtttcacaccacgcctggcaatattacaggtattatgatagtgtattttcattaatgttgtctttgcttgatttctcagtatcatttcagacctctccctctactttcctcctttttttttggctgttgtgtaatctcatgccttttcagtctctcttggcaggctcccccctttggctcagcttctaaatgttggcatatcctggccctctgctcttctctgtggataccctttctctaggccagtgtctcttaacctttggtcttagtagggcccctttacaatcttttttttctttaatttaatgtatttatttatttatttacttttgagagacaaggtcttactctgttgccaggctggaatgtagtagtgcaatcatagctcactgtagcgttgaactcctggcttcaagcagtcctcctgcctctgcctgccaaagcatgggtatyacaggcgtgagccactgtacctggccccgtttacactcttaaagatgtaagacctcaagaagctattgtttatacagatttatccattaatgtttactatattagaaattaggaagttttggccggacacggtggctcctgcctgtaatccagcactttgggaggccgaggtgggcagatcacctgaggtcaggagtttgagaccagcctggccaacatggtgaaaccccatctttattaaaaacacaaaaattagctgggcgtggtggtgggcgcctgtaatcccagctactctggaggctgaggcaggagaatcacttgaacccgggaggtggaggttgcagtgagccaagattgtgccactgcactccagcctgggcgacagagagattccgtctcaaaaaaaaaaaaaagagaaattaggaagttttaaaaatgtttattcatttaaaaatgccaatagtgagctcatttattatatgttaacataaataacattttatggaacaaaaacttttttaaaaagaaaatttagtgaaaagaggggcattattttatatttgtgcacacctctttcctgtatggcttagtagaagagagctggagtcctatctgcctctgcattcagtcttttgctgtgtgctggtttgattgaaatatatggagaaaatttggcttcatacagatgtgtagctataaaagggaagaatttttttaacagtccttccaggtaattgtgggtatttttctttgatgttgtaccaggactcagtaagtaaattttaaaagattagttgcaatgtagaatctgaaactctatcagtgaactttgatactttgttacatcttctcagacttgcacactttgttacatcaaaatgttacatttggaatgaatatttaccccatgcatggttttgtaacatcctttgttcctcatttggaaaataatagttcccggaattatgcagatcttccaaatgttaacatttcattatgcaatatgaaagaattggaatcattaacatcaccaacaagctcatcagagaagttttcaagtattgagaagctgtcaagctcacaggggtggataaaaaattttaattttcacccaaaaactcayattttatcattrgcaacaaatacaattaattgtttcccttgaaataccagtttcactttattcatttttgagaaaatatttgtcaaatactcaagcctgaataatcattgcttgtcagttgttatttcaagtaggtgtttcatataaaaatgcatctgtttcagctaacaaggcaaaaaagcacaagtgcagcctggacaacaaagtgagatcccatctccacaaaaaaattaaaaaatgagccaggagtggtcgtatagaggtgtggtcccaactacatgagagggagacaggagatcacttgagcccaggaagtcgaggctgcagggagttgtgttcatgccactgtactccagcttaggtgacagtgagatcctgtctcaaaaaaaaaataaaaataaaaataaaaaagcactaatgctttagtaacaaccacaaccactgtacttctgtatatagcagaagtgcattatgagtgcttcccaattccttacatagactattaaaaacacatgcactcaagagttgaggtttatttatatatatatattttttacttttttgggacagagttttactgttactcagtgcagtggcacaatcttggttcactgcaaccttcatctcccaggctcaagtgatcctcccactcagcctccagagtagctgggattacaggcatgcgccaccatgcctaatttttttttttgagacggagtcttgctctgtcgcccaggctggagtgcagtggtgcaatcttggcttactgcagcctccgctcccagattcatgcaattctcctgccttggcctcctgagtagctgggattacaggcacctgccattgcaccctgctaattttttttttttgaaacagaatctcgctctatcccccaggctggaatgtaatgacataatctcagctcactgcaacctttgcctcctgggttcaagtgattctcatgcctcagcctctggagtagctgggattacaggtgccacgcccagctaatttttgtaattttagtagagatagggtttcaccattttggccaggctggtctcgaactcttgacctcaggtgatccacctgcctcagcttcccaaagtgctgagattacaggtgtaagccactgcgcccagccttaattttttgtatttttttgtagagttttttttttgccttgttgccctagctggtcttgaactctgggacccaaagtgatcctcccattttagcctcccaaagtgctgggattacaggcatgagctactgcgcttggccttaattttttgtatttttttgtagagacggttttttgccttgttgcccaggctagtctccaactcctgggctcaaagtgatcctcccgccttggcctcccaaagtcctgagattacaggcatgagccactgtgctcggccaagttgaagtttaagaaaattaataatgtatatttcttcatcaagggtggtcctagtgaaactggcatttagttttactgggagtgtgtggtagtgaaggataccttgactactartccaaagccattgtcttgatttgtgctggttcactagtagtcttacacaccattgcttttgcaccatcggtacagacgttaacacaatgaaaaaggcaaacaacattgtagtggtattattatgaagctagtctggccctcataaatctttgaaaaggtcttggggtccctcaagagtgtgtgggccacattatcagaaccattattttaggcagtttcatctatcaggccagtgacttctaaatctagatttcttctgagctccaggctcttggtctgggacaccactggtttccttcccaccttcaagtctcctttgcttgttgttgytcatcaccctaatacctaaaccatttgaatgccttgggctcacccttgagatctcttccccatcttattctttccctaagtaacctcacccagtcccatagcttcatgagggaatgcttccaaatttaggtctctatccagtatttcttccctgagctccagattcacccagtagggagatattcaatacatatttttacggacaaatgtatgaaggaatgtttgcaatcttgatttggatgacaggaaactcacggctttcatttgaaactcccatcagagtttcacccaagttggacatagtctccttctcaatctctttatttgtatgtctccaatagatcatttaatcccttgctaaatttctatcccttgttcatcaagaatgtcaaggtgggcatggtgcggtggctcatgcctataatcccagcactttgggaggctaaggcgggtagatcacttaaggtcaggagtttgagactagcctggccaacatggtgagaactcatctctactcaaaatacaaaaattagccaggtgtggtggtgcacacctgtgatcacagctactcaggaggctgaggcaggagaatcgcttgaacctgggggacagaggttgcagtgagctgagattgtgccactgcactccagcctaagactccgtctcaatttaaaaaaaaaaaagtcaaagtgaatagtacttaaatattcccctctcctcctctgctgtttgtctaagagggcttagctgagaagaaaagcacagaaggcctgtcactctctgcctggcatgttctctgctgtggtggattttcccttttttgcaaattactaagaatcaaaagtatatattgtgggtgtatactggtacatttggtggctggttatttcttggcttatttttgcaaattgtttgttgtagaaagagtaaatgtcataggcaagaagtataccctttttaaagcaacattgggggtgttttttttcctccattttaaaaactgacttccaaccttgttttttaaatttattgattacaaatgtttttattacataaacactgttctacagctcgtctcctacgtccttgctgataaaacagtggtagaatcttttaattttgtactttagcaccagagtcaacagctttctgtgatacaaggtttatataatatgttgtaatcacatctccctgcctcagacctctagtctttttcgctstggtgctggcaccaccatcttcccacattccctgagctagaagcctgaggccgtctccttaggagctctcttcctcactccctgcatccagttaggggctattgtcctattgattgtgcctctcatcaactcttggaatctgttgcctccccttgattcctatttctcccaaccctggggccactatagttacctgcttaatgatttggggttctatctatatacctcctgtctgtcctcctgactgcaattgcaatccttgttaaaatgcaagtctgatcacaatctatccagccacactcactctccatcctttaccagaatgatagtacaagttgagtatcccttatccgaaatgcttgggacaagagtgttttagatgttggaatctgtatatacatagggatgagatccaattctaaagcaaaatttatttgtgtttcattatataccttatacttgtagactgaaggtaattttatatatatrtgtgtgtgtgtatatatatatataataataattattattattattwttttttttgagactgagttttgctcttgtcacccaggctggagtgcaatggcacgatctcggcgcactgcaacctccacctcctgggttcaagtgattctcctgcctcagcctcctgagtagctgggattacaggtgtgttccaccacgcctggctaatttttgtatttttagttgagatgagatttcaccatgttggtcaggctggtcttgaactcctgacctcaggtgatccgcctgcctcggcctctcaaagtgctaggattacggacatgagccactgctcccggccaattttatatatttttaataatattttgcatgaaatgcacttttaactgtgttttgactgtaagccatcacatgaggccaggtgtggaattttctacttttggcgttgtcagtgctcaaagtttctgattttggagcattttttatttgtggttttttttttttttttttttgagacagggtctcactctgttgtccaggctggagtgcaggggtgtgatcacagttcattgcagcctggatctcccaggctcaagctatcctcccatctcagcctcctgagtagctgggactacaggcatccagctaattttagtatttgagacagaatttctccatattgcccaggctagtctcagactgagctcaagtgatccacctgccttggcctcccaaagtgccgagtcaccgcacctgactgattttggatttttgagttagggatcttcaacctgtactacttatatagagtgtctacaataattcaaattgtttgtttatatttctaatcgttctatgttttatactaccctacgatgtaggagatgtccccttatagccatagtaactcatgctcaaagatcttgggtagcttgcccaaagccagtcaggaagggactgagtctgggaaatgaacccagatctgtctctaaaacccatttgttcttcccctttgttttcctaattccttagcaatgcattcaagaacattcatgatctggcccaagtatatatttaaaagttgagttttcatytttttttaataaagtggatgagtaacttcccaaataactgaatatttataggaaattaagacttgacttttcattataagagatactaatgggctaggcatggtggctcacgcctgtaatcccaccactttaggaggccaaggcgagtggattgcttgagcccaggagttcaagaccagcctgggcaatatagagagactttgtctccaaaaaaatacaaaaattagctggttgtggtggtgcttgcctgtagtccccactactgaggaggctgagctgggaggattgctcacgcctgggaggttgaggctgcagtgagctgtaatcgtgtcattgcactccagcctgggtgacagagcaagactttgtctcaaaaaaaaaaaaaagtttctggtaaggtgatagaaatacagcctcagccccatagcctcattagtatctctcactctctctcttttttttttttttttgagtcagaatcttgttctgtcatgcaggctggagtgcagtgatgtgatctctgctcactgaaacctctgccctcccctgtcccccaggggatcctcccaccttagcctcccaaatgagctgggactacaggcacaccaccatgcccagataatttttgtattttttgtagagatggggtttcgatatgttgcccaggctggtctttaactcctgggctcaagcaatccacacaccttgacctcccaaagtgctgggagtataggcatgagccactgcacctggccaaaaaactgatttttaacagtattcgggaactattcagagtgctttatgtatagtaactcattcagtcctcacaaaatacatggacagaatacagttaataaactcaactagcctgtatcttcataaggttttctgaaacagaaagaaaaatgaaccagtagaccaatacccaagatatcttacggtgtagaacacagattagtaaactgtggcccgtatccaaatgctgcccagtttataaagagttaaaaaagcaatagcagcagctgctgtgacacggtatgtgtcccacaaagcctaaaatatacaccgtctgcccctctacagaaagtttgcagactcctggtataaaaaaaaagtgtccctaacctgttctggaataggatcttttttggatgatgtagtactcagccaccttcaaggagaaatcagcattcttttttttttttttttttttgagatggagtttcactcttgtcgcccaggctggagtgcaatggcacgatcttggctcactgcaacttctgcccccggggttcaagggattctcctgcctcagcttcccaagtagctgggattacaggtgcacaccatcatgactggctaatatttgtatttttagtatagatggggtttcaccatcttggccaggctagtctcgaactcctgaccttaggtgatctgcccgccttagcctcccaaagtgctgggattacaggcgtgagccaccatgcccggccagaatacacgttctttaaacattctttttgcatctagtctatcaatggttctataaccactttcccctataaaatgcctatactggccaagtgtggtggctcacacctacctagcactttggcaggctgaggcaggaggattgcttaagcccaggtgtttgagaccagcctgggcaatagagaaactccatttctacaaaaaatacaaaaattggctgtttgtggcagcgtgtactggtagtcctagcttcttgggaagctgaggtgggaggattgcttgagcctaggagttgcaggctgcagtgagccatgatcatgctactgtactctaggctgggtggcagagtaagaccctgtctcaaaaataataaataaataaataaaacctatactaagagtgactctttgaattggcttttagatgtcttttccaataaaactttgacatacgctcataactataactattaagttttctttctggaactggttgtagttttagtgttttagacaaactccttcagaaatattcaggccgaaaatagttacatgtaaaggaacaacaacagcgagagacttcagacttctcctgtgtgacattagatgccaaagacaacatctccgaaggaaaatgctgtcactccaaatcaggcaaggccagtcaagtgcaagggacagcagaaaaatattttcagttatacagacttagaaacatgtccacctacctttcctggaaaactgacttataagttacatttcacttacttgaaacatgaatgaagataaattctagaacagagaagttgtggcttccttactggcagcaagtgataaaacaatttaatctcagagttaagactaaataactagtggtaggtataaatatgaatgaaattgtaaaaaaataatacttttgtatttagaaccacctcctttcctactttgatctaaaaattccggaatgtatcaaatctggtaactgaaccagtgagggttgggtggtggggcaaagaacatacatagaaagtgacatgagaggcacgaaaagtctagggaagcccctacgagaagcatctaatgtacttagatacaaataacccattaaaaaaaaaggtagaattcccctcaaaggactcttctggctcttgcaattcaaattagcaccacaaaactgagaactgtctgtataagggacaactgaagctaagattcaggccatgtcctgakatctgaggagagcgtccagtaatagcaccaatatgacaagctcagaaaatcctgtgttacaaaagccggcttctttctctgccatggtcctgttaaaaggagctgtgcttcagttgtctttgatatgaagggaccaccacctttccctctgtgataccctctgcaattctgggagaaacacaacttatggtagcatgtatcaaccttgagaaggagaaataccaaccactggagcatgaaacaatattagtacaataaaattttacaaataaatggttataatgataaactataaatatgttcatggtcaaagaaacagagggaacatagtgagacactgcatggtggttcaaaggatttagcctctgcactacaagtttctccctgtctctctcttttttttttaagagacaaggtctctctctgttgcccaggctgcccaggcatagtaccatgactcactgtgcactggtgcaatcatggaaaaactcttgacctcaagtaatcctcccaccttggcctcctgagtgctgggactacaggcaggcaccactatgcctggctaattttttgtaaagatgggggggtgtctcactatgttgcccaggctggtctcgaactcctgggctcaaacgatcctcctcccttggcctcccaaagtgcagggattatagacctgagttgctgcacccggcctcctctctgtgttggggccagcagattgccctttgtcttgcctggctgtttattctgtgtaaactagagggaggtccttccaccctcctttctattgtctgtgtggcggggccagggagctttccattgcccctgcgggtgggggagagggtgtggaatgtgccctctgggtgctcctgcctctcaggcatttttcttgcctgatgacagtttctcagccctccatactctgtttttctggtatggcagcagaaatcccacatgtttctagtaggcctgcagcatccttgcttagtttccagtgcagatgcagatatcctctactttctgtttggggtttggcagtgggaaccaggtgggccttgtttaggggaggggctgtaacaccatctgtgttcacataatccctcctgcccccacagcctccctatactcctgtaaaagttctctgcaacaagagtcgcatgattaaacatttcttttattaaaactaaaattgtagaagcttttctgtgcactttgcctttccctaatcatctgatttgcatgcatttattattctaggttggcaacagagatgattccaatctttatataaatgtgaagctgaaggctgctgaagaggtaacgccagaagagctgtgccatcaccctccccaacctccacctgggtcctatcgattaccccttgccctttttggtcctccctgtgaaaacttttatcacccacaggagacattagtttatctattttgtaagtcagaaatgggtgggttagatctgtggcctctggtttgcccgtgagtttttgttttctcattaatgattttcttcccaaagagcaggatgtcaattgaggaaagtgacaagtctcgatcattttaggagatttatttgccaaaattaaggacacacctgggagacaggtctatacctttctccgaagatgatttcgagttctccaaatttaaagaggaaagggtgggttattgaaaagtacacgttttcatgtaagaggtggrtagggaaaaatagtcattcatgaccttctctggctcagtgaatctgcattttttacataagatgacagatggccggacgcggtggctcacgccagtaatcccagcactttgggaggccgaggcgggcggatcacctgaggtcgggagttttagaccagcctaagaaacatggagaaaccccatctctactaaaaatacaaaaaattagccgggtgtggtggcgcatgcctgtaatcccagctactcgggaggctgaggcaggagaatcgcttgaacctgggaggcggaggttgtggtgagccaagatagtgccattgcactccagcctgggcaataagagtgaagctccaaccagaaaaaaaaaagacgatatagacaagtggggcagaggaaaaatgcaggcaatctgcattttacataagataacatagacagaattgggcaggggaaaaatcagatatacatttgtgtctggtgggctggggggatttacatygccatggtgaaattttaacagaaacatcataaagatgttgcagctcactacgaatttctttgtgggcaaaatatgggggaggcatgtagcttttcatcttgtaacatcttatttaggaaccaaaaagggggaggcagatttgcatgacccagttcccagcttggcttttccctttgacttaatgaatttggggtcccaagatttaatttcctttctcaagaaatagcaagcatgacattgctgaagtgcagtggtggcaattaacaagtgaatgatgaatgggttgaagtgagggactcattcttcagaacatataagggtgaaatgatgaccaacacctccttgcttgttagtcatgtctgtaaaagaaatggttcaatatctcaagttgtcttgccatttacctgcttttaatgtctgttttgcagattgggatcaaagccactcacattaagttaccaagaacaaccacagaatctgaggtgagcttttatgagttgattgtgaagagggaaggtgaagtggtttcctctctggttttggtttacgggggctttggggactgacacatttagccaagacctccaggtatttttttttttttttttttttgagacacagttttgctcatgtcacccaggctggagagcaatgatgcgatctcgactcyctgcaacctccgcctcccaggttcaagcaattctcctgcctcagcctcccgagtagctgggattacaggygcccaccgcctcacctggctaatttttatatttttaatagagacgcggtttcaccacgttggccaggctggtcttgaactcctgacctgaggtgatttacccgccttggcctcccaaagtgctgggattacaggcgtgagccaccacgcctggcacctccaggtattctttcttcacagactcccacagaggagatggtgcagggatgaacatttggtactcaaagtgtgactgcagtactgtttgcttccaaatcatctgttgtgtttgttaaaactgatccttggagccaggcacggtggctcatgcctgtaatcccagcattttgggaggccgaggtgggcagatcacctgaggtcgggagttcgagaccagcctggccaacatggagaaaccctgtctctactaaaaaatacaaaatttgccaggcgtggtggcgcatgcctgtaatcccagctacttggaaggttgaggcaggagaatcacttgaacccgggaggcggaggttgcagtgagccaagatcgtaccattgcactccaacctgggaaaaaagagcaaaactccgtctcaaaaaaataggtaaaaccgatccttggcctgtaattatctgcattctaaaaaccaaatatgtattccttttatatgaggttcaggactaggcagaacaaatcagcggtgattaaagtcagaactgtggttgcctgtaggtgggagattaatgctaaactgtaggaggataaagcaactttcttgaggttatggcaatgttccatatatgcgctgtccagtatgggagccactagccccatgaggctatttgaatttagttaaaatgaaataaaattaaaaattcacttccttggttgtactagccactttgcaaggattaagtagctgctattgtattgtaaggtgcaaattatagaaaatttctgccatcgcagaaaagatgattggacattgctgctctacatcttgatttggatgattgtaacatgggtattattgctgtaataagttattagagttcttagctctttttattttattgtattgtatttttagagacagggtctcactcttttgcctcagctgcagcacagtggtgtgatcatagctcattgtagcctcaacctcctaagctcaagtgatcctcccacctcagcctcttgagcagctgggactataggcatgagccaccatgcccagctaattttattttatttttgaggcagagttttactcttgtcgcccaggctagagtgcagtggtgcaatattggctyactgcaacctccacctcccaggttcaagcgattctcatgcctcagcctcctgagtagctgtgactacaggcatgcgccaccacgcccagctaatttttgtatttttarttgcccatattgcccaggctggtctcaaactactgacctcaagtgatctgcccactcaagcctcccaaagtgctgggattacaggcgtgagccaccgcacctgtccccgctttttttttttttttttttgagacagagtcttgctctgttgcccaggctggatgcagtggcatgatctcagctcactgcagcctcygcttcctgggttcaagcgattctcatgcctcagcctcctgagaggctgagattacaggcatgcgccactatgcccggcttattttttatatttttgtagagacagggtttcaccatgttggccaggctggtttcaaactcctggcttcaagtgatccagtagctgctattgtattgtaaggtgcaaattatagaaaataattttctatattttgggaggcctgccttggcttcccaaagtgctgggatgacaggtgtgagccaccacacccagccctaattttttttttttttttttgaggtggagtttcactattgttgcccaggctggagtgcaatggcacaatctcaactcacygctggagtgcagtggcactatctcagcgsactgcaacctccacctcccaggttcaagcaattctcctgcctcagcctcccgagtagctaggattacaggcatgtgccaccacacctggctaattttgtatttttagtagagacagggtttcactatgttggcccagctggtctcaaactcccaacctcaggtgatccacccacctcagcctcccaaagtgctggaattacagtcgtgaaccaccgcacccagcccctggccctaatttttaaaaagtttttgtagatatcacatttcactgtgttgtccaggctggtcttgaactcctgggttcaagtaatcctcctgacttggcctcccaaagtgctgggattacaggcatgagacacctcgcccagcctcttagctcttttatttgatggacttcttaccagacacctaggggatgcattctatgttaaagtacaggtgctctcaggattcaaggggaaggtacattctgaaaggactataattaaagtgttggggggaaatagggcaacctaatttttgccttagaaagtgtttcttcctaccttttgatttctgtgtgatatacaaattatatatggtattacttttaggtgatgaagtacattacatctttgaatgaagactctactgtacatgggttcttagtgcagctacctttagattcagagaattccattaacactgaagaagtgatcaatgctattgcacccgagaaggatgtggatgggtaagtgtggcttggcttcctatgtctcattgcatgctttcatttataatatgtttctatttggggaatacagcataaatgtttctaaagagtaaagacatctaattgcctttatttccttcttatttccatcacttttttaagattgactagcatcaatgctgggaracttgctagaggtgacctcaatgactgtttcattccttgtacgcctaagggatgcttggaactcatcaaagagacaggtaaaaacaacaaaccaaacaacaagaaagcaccatttcctgaatcctggtcttgacatgtggtggcatagaggaggtacattgtgggccataaataaatggacttgattggcagaagggcctgtctactaaggatgttacctaaattttctctcaattttctcagcaactctgtgaagtaggtactgttattgttcaactgctaagaaaataggctcaggccaggcacagcggctcatgcctgttatcccagcactttgggaggctgaagcgggctgagatcacctgaggtcaggaattcgagaccagcctggtcaacatggtgaaaccctgtctctactaaaaatacaaaaaaattatccaggcagggtggcatgcacctgtattcccagctattcgggaggcagaggtgggaggattgattgaacctgggaggcggaggttgcagtgagccgagatcacctgactgcactccagcctgggcaacagagcgagactctgtctctaaaacaaacaaacaaacaaacaaacaaacaaaaccagctcagagagagcaagtaacttgtctgggagacaacggaaccaagatttgaattcagagttatctgagttcaaagcaatttattttaacctatacagtaataaaaatttggatagtttaaaaggatatgaagtgaaaagccccacctccccccacccccaaaatgggcactgaatctccacagtagttccaggactcgacagatggctggaaatgggtctcctgcacagttggccatattgtcccgttactagttagcaccttgctattttaatttcattatgaatacttttagcagaggttattttttacaaggaaatgggtcctggtaaaaagaagtaggtcagaagtttcaagtggaaagttttggccagcataaatgaaaattttctgtggttggcaagaaaaggtcaaaggtcaagctttgacagttcatttctacagttaaatgtatattcttcagcatatttagcaaacattgtagtgccttgcttaaaagaaaaaaatcccacgaggacagcacctgaaggcctcccactgcctcttattgagtgatgctaccatttgccctgatgcagctttaactcttctgctgaatcctaaaaagtatagaaagttaccttttaaaactttgaggtctttacttctagatgttcatgatgttcacattattataagagtttatctttttctgaaaaaaaatgattttatgcgagaagcacaatttaaacccttgctgctttgagcaagggtccactgccctcagccttgactgccctgaggactctgatgaagtcgtcaacttctctctgctttcttctttgtggacagctcattttcgggctccactttgtggccacaaacacctacagcctggttccatcctcatgcctaacagtcatgggattggatcttatcagctgagggaagaaatatggtcccctgtccactactgggtactcactcaggctgtctttagtagagtatgagtcagccctgaaaaggacattggtatattgccagaaaaatggatgctgtgatagcaaaaagaaagctttgctgccacagttcaatttcccctttatcacttccctgcaagtaaccctatggctcaggccctaagccaaaagagaaatttgggtgaggaactgtataaacaaacttaccaaagttagaaggaattaccgatactaatctaatttcttacacatctctccagcctgttacatacaccctatttgttttaactttttttccccatgtaatttaatctgatgtcttcttccgtatggctgattagctgtatgtcagggtttcttttttctttgagtgtaggttttcttcccactcccctatgactcaatgaatgatcttggcttaagctgctcccaaaaacccacggccagaaggacacaagtacaagtcccaatttatagctgaaaccctagagttgagaatattattgccaaagaaggaatgcttttaggaaggtttctgtttgatgttaagaacctgtttttgtgcacttattctaatttctccacgtggcatgcgaaggagggcagcttctatcctccaactctgatgcaggctggcttttctttcaggggtgcygattgccggaaggcatgctgtggtggttgggcgcagtaaaatagttggggccccgatgcatgacttgcttctgtggaacaatgccacagtgaccacctgccactccaagactgcccatctggatgaggaggtagggtgtccagaggagaggtaaaggtgttacggtggggagggtgggtgtgccagaggctgccatgtcctttacactcatgacctcatttaaccccatcatctcatttttacaagatgaaaaaacaaattcaaattaaaggctgagtggggtggctgacacctgtagtcccaacactttgggagtctgaggcaggaggattgtttgagcccaagagtttttgagaccagcctgggcaacatagtgagacgctttctctgcaaaaaaaattaaaaattagccagatggggtgggcacatgcctgtagtcccagctactcgggaggttgaggcaagaggattgcttgagcccaggaggtcgaggctgcagtaagctacgatcacaccactgcactccagcctgggctacagagcaagaccctgtctcaaaaaaaaaaaaaaattaattaattaaaaaaaacataaaattaaaagcatgctgaagtttatacagagtttgttctgtgtactttctctcttcctttttcttttttctttatttattttttttgagatggagtttcactcttgttgcccaggctggagtgcaatggcgcaatctcagctcaccacaacctctgcctcctgggttcaagtgattctcctgcctcagcctcctgagtagctgggattacaggcatgtgccaccacgcctggctaattttgtatttttagtagagacaaggtttctccatgttggtcaggccggtcttgaactcctgacctcaggtgatccacctgccttggcctcccaaagtactgggattacaggcatgagccaccatgcccgacctttgtcttttttcttttgagacagggtcttgctctgttatttaggctagagtgcagtggcagtccatgagagcccactgcagctttgaactcctgggctcgagtgatcctcctgcatcaaccttctgagtagctgggactacaggcatgtgccaccatgcctggctaatttttaagctttttgtagcgacaggggtctyactgtgttgcccaggctggactcaaactcctggactcaagcgatcctcctggttcaccttcctaaagtgctgagattacaggcgtgacccaacatgcctggcctctcaccaagtactttctaccctaatctgcctcgtggtggacagggattagcagtacaggcactcagattgacctctggcagccagatcccatgtgtgtaaaagtggtggcctcagagtgaaggtgctccagaggcagtcgtgggcagtagtctgctaatagctatggcagcttgttctagatccctgcatcagattcctgagcccaagaatgcgcacacacacacgtgcctgttgacagtgcagtctcttaaatgtggggagagagcaggagagaggcctagtactttctcttttaatcctcccaaagtagtgctctacattctgtaggagaaggagcagtgtctggacataacacgcagggccccaagcctgtttgcccctctgccttgcaggttgacactgatttccctattgggtaaaatggctggtgaaagggagctctttggcatgtgtagaaatgagcacggcatgtgaagggctgtcagaaacagtgtgtggcttacatttgaggccttaacccaatatcttatgaaatagcttaygacasttaagaatttaatacaaagctcagggatatccttttcatttctgggtttttttttggtgtgtatttcattatttcatttctgatgtccaaatcccctacccctaggtaaataaaggtgacatcctggtggttgcaactggtcagcctgaaatggttaaaggggagtggatcaaacctggggcaatagtcatcgactgtggaatcaattatgtcccaggtgagtgttgttggaggagtaaggtggctgctggtattgaggatggtatctaggtcatcaaaagaagcctgagagagaagcttgtctcattttatgcttgtagtactaaggtttaggagactgactagcccaagrgtgcacagagttagtagatagaagagttgccacttgcaggcaggtctgcctggtgccagagcctttgattttcatcatgtgctgtacagcttccaagatgactttgtccagggagaaagtgagagggagggcaggagggatatatcactttatcttcatgtagagatcaccctttattttagcaaagttgatggatggatttaaaatacagtataattattgcaaagtgctatgagagtccagaagaggractcattctgccaagaggagggctttacaaagaagatatttgacctgggtttttttctaggctgagaggataaatctagccttttaatcatgtccaaaactgtactcggcatcctcatccccaagttacccctwactcccgtcttttggttagtatcaccattcttccttcccgcaagtctgaagccttttagtttccctcccaagcattccctatattggaccagtctctaaatattaggaattgttttctctctcctctgttctgagtgtcaccactgagtgttaccttctcagctgatgggctgtgataacttccttgcaggtgtccctccctccagctgcttcccactcagatctatccccgtgctctcgccttgccacgttcaccttctggcatggaactctgagcctcttccttcttacttgccagactccttagcctcacactaatttcagtgacctctgcagcctgtgatctcacttgcgcatggtgaatacctgtcttcaacttgtaaagtggaccactttcccttccctgcgcatgcctcgtttgccctttgtagttccctcacctgcattcttagtggagtgggctactctttcaaacagaaaacttcacagaacaatagggcaaaacttgcgtacgtcctcatagatccaagaaaggaacaatctttaacggagcaactactgtgtatccagcacaatgccaggccttgggctacacaactgaataaggttcaacttcaccttcaccttcagctgcttcctccccatstcctctctgtcatgtctgttattccttccaaaccttgtttgatttccccttatcaagggatgatctttccttctctccctccctcctctcccatagaacatgtgtattgtatcttttgttgcatgtgtctcatgtacggcgtcctgtgctctcctgcctagatagctcctcaagggcagtggtcactgtggcgccacatccagcttcctgccatctgaccactggcactcatatctattgaattgtygaagggagttatagctggaagtcttttttctcccttcccatctcaagtttcagatgtagacgctgagctgccaggaacattagtcactgtcaagccttcaccgtttttaacctccctcccactctccctaccgtgcttttaagacagtrgctcataattgatcactcattttcttgtagtgtaattatctaacaggcgataaagaaattgctctcctacaactcctcactttgaatacttgcgatatgacattcaagctcagtctttttatttatttatttttttaattttttttttttttcttgagacggagtctcgctctgttgcccaggctggagtgctgtggcgcgatctcggctcactgcaagctccgccttgcgggttcatgccattctcccgcctccgcctcccgagtagctgggactacaggcgcccgccaccacgcccggctaattttttttgtatttttagtagagatggggtttcaccatgtyagccaggatggtctcgatctcctgacctcgtgatccgcccacctttgcctcccaaagtgctgggattacaggcgtgagccaccgcacccagcaagctcagtctttttaaaacctcgcatcttctgtatcatatttctgcttttggcattttttttttggattacatgtgagaaatggagaagaaaaacctgagtggggatcttgagtgttgcagataggtaggaaatgttgacttaaacatgaaacttgccatccttttcacattgattccttatgtagacaataaaatatgaataaaatcaaagcagtatcttcccttctggtcaacagtgtttttactgatcttgggcatataggcaaattaatgctgatacagctggatgttattgtgttccccaaaggatggcagaatcactcagttacagaccagcaaatgggctgcaggacctaaagactgatatttgcaaatgttcactttagaagcaaacttttctaccaccgagctacttcttggttcatattttgattatttaaatagtttgcatggtccactcagggataacattgtaagtcacttgccaaattaagaatgaatcaaggtgtgtataccttttacaaagaagtaatatttttaaagattcaagtgcagggcagaaagtattggccagagaaacacataaaagtgctcttcctgcttggcttactaaagataaattgagaagggccagatcaatagtgttttatttggaagggttaaaaagtgggaacagattccccaccctaatgcaatccagtctcaacctatccagtgtagctgcttctggactggcctctattattagggtccccaaattaaatgtagaagagtcagggctcagctggatctttagttgatttttgtacatgtgatttcccaaagaaagagaaattctagggctgggggtagataaccaaaaggtttgctcattactgaggtcatatgcttaggctgagtagtggtcactttttccactgaccacatcatcctatccacgaagcactgcatgtttagcagtgtctcgtcaaccctgacagtatttggtttaggagcaaaactgaactcaccagtgctgcgtttagtcatgtagtcaaagatatgtgtctcttacctgtgggaaaacgaaaatgactaacattaacacgtagaaatagatgcagcgggtatttcaagctaactacagtgtgaagacgattgaaacttgtacagagggcaaacctctatctatatttccttggcattttgaaatgactctaggggctgtaagaggaaatgttctgccagtttgctgctttataatcttctagaaacttgaaaccatcccaatgagttgtgttgaccagctccttttactccatataaaaaatatcttacgtatctgtggtggaaagagaaactcttgcgtttggaggctgctttttcaatttcagtaatgtacacattttctcattttgccctcagcaaatttgtgataggtagtgttaagccttctttgcattttggacttcagattaatatggagcccacaggagctgcagaactaacttttttttttgagacggagtttcgctcttgttgcccaggctggagtggaatgctcactgcagcctccgcctcccgggttcaagtgagtctcctgcytcagcctctgagcagctgggattacaggtgcccgctaccaagcccagctgattttttaatatttttagtagagacggggtttcaccatgctggccaggctggtctcggactcctgacctcaggtgatccacccgccttggcctcccaaagtgctggcattacaggtgtgagccaccacacctggccctaatttttaataaaagagctgatgctacagctaatctcttttttttttgagacagagtctcgctctgttgcccaggctggagtgcagtgacgcaatctccgctcactgcaagctccgccccccgggttcatgccattctcctgcctcagcctcccaagtagctgggactacaggtgcccgccaccatgcccagctaatttttttgtatttttagcagagacggggtttcactgtgttagccaggatggtcttgatctcctgatctggtgatccgcccgcctcggcctcccaaagtgcctgctaatctcttaattctggcttcttgcctccaccttggagcttcttctcagttgtggcgatctgatcagagagaagtggtgatgtcgctaaaactaccagatgcagcgcgggagccttattgcttcgaggtctaggcccgcccccagcccctcctggaagtgcactgaagccaagtgtaggatgttctttgtgtgagtgagcaatgatgcatcattgggttttgttctcttgaatagctattctttgctggtaagatttgtagttgttcttgtgtccttttaagggaagtgtaattatattctttgcctttagcatacatttaagtagctgtgtctttggaattggatgttgaattgttcctccagctcacacatggagctcacaaaatgctgacagttgctgtagaaacgatatctggcagctgtgacagagttggatctttgtgcacccaaaaaatttcctttgtaggctttagcaaattaacattttaaaatgggtgctcattatatactgggtagttggttttaagaataaaaaacagttggtattttatttgccacctgagagactacaaaaggattctccaggttctgtaaaaccacttatgcatcttgtgaatttttgcaggtaaaataattttctccctaagaaatagcaaacatctgtcattccatagcttttaagttaagtaggcactggagcctgatgggactaacacaccctacaattctgctgagtttttgtcgtaactgatcwccaggactgtgattctgagacttagttttgatttctcccccacttgaccagatgataaaaaaccaaatgggagaaaagttgtgggtgatgtggcatacgacgaggccaaagagagggcgagcttcatcactcctgttcctggcggcgtagggcccatgacagttgcaatgctcatgcaggtaattgtgaataaaagtttctataagagttctgaaaagctgatcgagttttggctgcttttctccccaagtagaaatgtcaaaaacctactcagaagtaaagrtgtgaatttattgagaaaaagggaagggaagaatagagaaataagatcaggcacattaatagaggaaagtagggatggcataattccagtctgttttggaatataataactttgaaagaagaaaagtgcgatcacactggcttggccaggtctgttttggtttgccttccctttctttttttttttttttttttgagacggagttttgctcttgctgcccaggctggagtgcaatggtgtgatcttggcttaccgcaacctccatctccctgattcaagtgattctcctgcctcagcctcctgagtagctgggattacaggtgtgcaccaccacgcccggcgaattttgtatttttagtagagacaggtttctccacgttggttaggctggtctggaactcccgacctcaggtgatccgcccaccttggccttccaaagtgctgggattagaggtgtgagccaccgtgcccggcctgttttccctttctaacatgcaccagctgacaggggccaggcgagcagccccaaagcatgttaggtgcctcttgactcttagctaggattgaagcatggtaataagtrggtctgaagcagttcattttgtgattgaactggagtgacctggagcttgaaactgaggtgaggattaaaataaccacctcttctaagtttcatttatttcattttgcttagagcacagtagagagtgccaagcrtttcctggagaaatttaagccaggaaagtggatgattcagtataacaaccttaacctcaagacacctgttccaaggtaaaaataaagttttactgatttaaaactttgtgaattgttggtttttagttgacagatactgtgggttcacatatgctccctctgaaggtgccttcagtggttggggttgggttgggggcttgttactactgtgggattaattaaactcagtggataaacattaatacctattttctatgtttccaaagtgacattgatatatcacgatcttgtaaaccgaagcccattggtaagctggctcgagaaattggtctgctgtctgaagaggtagaattatatggtgaaacaaaggccaaagttctgctgtcagcactagaacgcctgaagcaccggcctgatgggaaatacgtggtggtgactgggtatgctttttattcatgttgccatccaaatcttagtatcagtcctgatactaaggcgttgcatttgcacttggcacatgtatgtagaggtgcctttaatttgattttagcattttcacccgtatttgatctcatttgatccttacagcaatcctgagaggtaggtaagaatagattataatcatagatgagaaaattggtcaaggttatccatctagtaagtggaagagtttggtcttaaaacccggtcttaagatagaatcaccttttgctgttgttgttgttgttgttgttttgagacagagtctcgctctgttgcccaggctggagtgcagtggcacgatctcggctcaccacaacctctgtctcccaagttcaagcggttctcctgcctcagcctcccgagtagctgggactacaggtgcaaggcaccacacccagctaatttttgtatttttagtagagagtgtgtttcactatgttggccaggctggtctcgaactcctgaccttgtgatccacccacctcagcctcccaaagtgctgggattacaggcgtgagccaccacacccggccagaatcacctttttgaacccaaaattcattaattcgatggatttactaagcattcatttttattgctgggctgaggttatattaaaaagctagtttttgagaatataaaatgagaaattaaaattatagccgtgtctctacaagataaagtatatttgcttcttacagcaagaagagctaaaatacaggaatcattttttttcttaaagttttttggaaattacaactaagacttttgaaaaagatatctttcagggcttttgtctttctttttctttgtcttttctttctttttttttctttaagagatgggggtttgctctgttgcccaggctggagtacagtggtgcagtcatagcttactgtagcctggaactcctgggctcaagtgatcctcttgcctcagcctcctatatagctgggactacaggcatacactgctatgcctgactttgtctttcttaatctttagattacgagtcattctctaggatctgctaggtatgacttagtgattcagatacacttaattctttaaacctttttctcttttgctttcgtcttgaagaataactccaacacccctgggagaagggaaaagcacaactacaatcgggctagtgcaagcccttggtgcccatctctaccagaatgtctttgcgtgtgtgcgacagccttctcagggccccacctttggaataaaaggtactagtgagactggaccatgggtggtgacaggggacctgcttctccttcagtcctcccaggcccacgcaacctatgatacttatggggtcttcaactcatttcaacaccaggaatgtcattctcacaaacctctgtagtcatgcttttgatgaaggctgtcattggatytccccagctcctgctgtcactgttggccactgcacagggattctctgggatgggtgatatgtagctggaggtgcttttatttgaccctcatagtccactgctacagtaaccataaaggtaatcatagctactgatcatcttacagacactctagagacaatgacaaaccccacagatgtttcaccttgttgggaataagaaaagcctacctttattgaatatatgctttgtgccagatattgtgctgagcagtttttgcatattattctatcatccagtacgagatagtattgtcaccattttaaaatagcagcaactgggacttcagaggtggcttggtcaaaggcacctgtattaagtaccagagtgattcttccatgtctatttcaagctctaaattactaccatactcgcactttaccttcagatttttattgctgcggtactaagaacatgtgtttttttttttttttttttttttttgagacagggtctcactcactctgtcgcccaggctggaatgcagtggtgtgatctcggctcattgcaacctctccaccttctgggttcaagagactctcctgccacagcctcccgagtagctgggattacaggcacgcatgaccatgcctggctaatttttgtatttttggtagagacggggtttcaccattttggccaggctggtcttgaacttctgacctcaagtgatctgcctgtctcagccttccaaactggtaggactataggcatgagccaccgtgccaagctgctgtcttaattaaaataatttttattaattatgataggttcttagagttagctttctctgcttggtgagggtatcacattttgcttgttctagcaattactacaaatgttgacaccgggaacaccttcacccttccacctttttttttttttttggagacacagtctcgctctgttgcctgggctggagtacagtggcacgatcttggctcactgcaacctccgcctcctggtttcaagcaattctcctgcctcagcctcccaagtagctgggactacaggtgcgtgccaccatgcctggctaatttttgtgtttttagtagagatggggtttcactatattggccaggctggtcttgaactcctgaccttgtgatctgcccaccttggcctcccaatgtgctgggataataggcatgagccaccgtgcccagcccacccttccacctattttataaatgtaatcactttgttctgctcttgagcttgtcttaaccccctttcaacttcagcacgagctattccttgttctgcttattgaacccattattttccttttactcttactgcaaattgcctcactgcacggtctctgcctcacaaaaacaaaatacatattaatatatctctgggctgggtgcagtggctcatgcctaaaatcccagcactttgggagggtgaggtggtagattacttgaggccaggagttcgagaccagccaggccaacatggcaaaccccgtctctattaaaaacacaaaaattagctgggcatggtggtatgtgcctgtaatcccagaccattaccctccagcctgtgagacagtatgagactctgtctaaaaaaatatatatctgatttacatttattgcactgataatgtggtaacctggactttttttgtttgtttgtttgttttttttgagacagagtcttgctctgtctggagtcccagctcaggctggagtgcagtggcatgatcataactcactgcagccttgatctcccaggctaggactataggcatgagcagccatgcttggtgtcctgaacattttcaactggcttttggctaatacagattgagcatcagaaatctagaaacctgaaatctgaaaggctccaaaattctaaactttttgagtgctgacacgatgctcaaaggacatgctcattggatcatttcagattttaaatcctggatttgggatgctggatcagtatgatgaaaatattccaaaatctggaaaacaaaaacccaaatccaaaacccaaatccaagcattttaaataagggatactcaacctgtaatccaagtagcccaaaaaaatctagcaattaggctgctttctaacagcctaatctatttatctctatttaggaaaaattatagtctttttgttaggtgtatgtattttaaatatttctgttttaaaagccaaagtagctttatgagagtaggaaattgaacaggttgcctttatgtaactgtcagctgggtgttttaacaaatgccagtaattacaaggaacatatttctaaagataatgagtaggtatatatttgttcatggttttgtcatttaaactcagatttcaattgagagactagtattagaaaacacttgatcaaaactgtccaaatgattstaaaaaataaataaataaatgtgcttagtagttacaataatgcatttgcatttatttgatttctaagtcattggagaagcatgcttaactgagcttccacccttgacctgtcccctaggtggcgctgcaggaggcggctactcccaggtcattcctatggaagaggtaaagtattctgggatttggctgaattagatccccctttttttgtcgggggggagggtgctgaattagctccctttttttccccatgacggagtcttgctctgttgcccagagctggagtgcaatggcgcaatctcggctcactgcaacctctgcctcccaggttcaagcaactctcctgcgtcagcctcccgagtagctgggattacaggcatgcaccaccacgctcagctaattttgtatttttagtagagacggggtttcaccgtgttggccaagctggtcttgaactcctgacctcgtgatccgcccacctcggcctcccaaagtgctggtattataggcgtgagccaccgcacccagcctagattctttattatagctttttctctctggagattagccttttttgtagagctcttagcggacaaatgacttgtttctcagcaaaagcaacacctagggggaaaacaacttaatttgcagacttgtgatacagcttggtttcaaactttggctttcagtgggaatgattattataagcaaatgaccaaatgaagcatggtatcgggaagcaccaacacacagcgatttcagaattcatttatgtaactgcagaaattggaacattacatagacatagagtcggtgctgctcccgtgcactcctcctcrctgttttgaggtgtgtcctcagtaacccagtgtggctgttgatcccagtggtgtggtatttgtggtctctggacatctcattttggaaaaactgcaagttctgtatttgggaggagattcttctgtggacagataattagtcttttatgttttctttttctttttctttttcttttttttttttttttaagacagagtctcactctgtcacccaggctggagtgtagtggtgtgatcttgggtcactgcaacctccacctcccaagttctcctgcctcagccttccaagtagctgggattacaggtgcgcactaccacacttggctactttttatgtttttagtagagatggggtttcgccatgttgcccagggtggtcttgaactcctggcctgaagtgatccgcccgcctcggcctcccaaagtgctggtattatagttgtgagctaccacacccagccagtcatttatgttttcaagaactccctatattgggtgtttgtccactaactgggctgccttcagtattccattggctttaaaatagggattgagctttgcaatagaatgaaagttggaaagatacagagcagctgggagactaatgtggcttctgttcttttgtagtttaatctccacctcacaggtgacatccatgccatcactgcagctaataacctcgttgctgcggccattgatgctcggatatttcatgaactgacccagacagacaaggtaggatgccaaagccccatgaaccccattgaacagttttgaaagtattgaaccatctgaattagtgttggtgtcttgggtgctgaggatgcaggtagcaargcartggggctcctctcattttaaagcccctttcttttctttaaggctctctttaatcgtttggtgccatcagtaaatggagtgagaaggttctctgacatccaaatccgaaggttaaaggtaagctttttttcttccacattttttatattgtatggaatctggaatctgatcattgattaggacataaaagtcttcttggagtagcctattttagatgaagttacrtcagyaatcatagtcttaaagtcatgatatacatagcaaagatggatggtagaggttatttctcatttatctatagattagaagtggctagtgtggaataaatagaacactgacaacctgccctcagctaagaaagaaacgacacttcctttataacatgaacaagagtcaggatgtcactgtggcggcatagcagcctttggagtttgcatcattgggaccttaagcaaatttgttaaatgacttgtttctccgcttacttgtctgtaaaataatacttgccttgccctgaatagataagggtctgtgttaaacagttaaaaccatagttatatctatattttatttgaatttctgtaacaaatacatagttagtaagcatacaccataccacctgacccagaaatctcacccaaaataaatgaaaactctgttcacataaaaatctgtacattaatgtttttagcagctctattaataatttccaaaaactgggaactaatctaaatgtctttcattggatgaataaataaacaaactggtacatccatccaataaaaataaatgagctattgatacaagcaacaacttggatgaatttcagtggcattatgctgggtgaaagaagccagtctcaaaagcttgcatattgcatgcctccatttatatgatattctcaataagagaaaactatagtgctagggaacagatcaatagatgttaagggtatggatgaagggagggtatgaccataaaggaacagcaaaggagaggtgttttgttttgttttttgttttcttttttgagacagcgtctctctctgtaacccggctggagtgcagaggcacaatcacagctcactatagcttccaccttccaggttcaagcaatcctctcatcttagcctcctgagcacctgggactataggtacacacaccaccacacctggctaattttttattttatttttttgtagagaccgtgtctcaccatattgtccaggctggtctcaaactcctggtctaaagcgatggtcctgcctcagcctcccaaagtgttgggattactggcgtgagccaccacgtctggccacaagggattttttgtttttgtttttctgttttttaatttttcaaaaatttattggttggttgtttgtttgtttgtttaagacagagtctcactctatctcccaggctggagtgcaatggtgtgatctcagctcactgcaacctccacctctcaggttcaagcagttctcctgcctcagcctgaatagctggggttacaggtgcctgccaccatgcccagctaattttggtatttttagtagagagaaggtttcatcatgttggccaggctggtctcgaactcctgacctcaggtgacccacccgccttggcctctcaaagtgctgggattacaggcgtgagccactgtacccggcctgtttgtttatgtttttgagaaaagcttttactctgtcacccaggctggagtgccgtggtgcaatcacatcttactacagcctcaacctccaggactcaagtgattctcccacctcacccaactaggtagctgagactacagccaggtaccaccatgcccagatttttatatattgtgtagagaccgggttttgccgtgttgcccaggctgatctcaagcttctgggctcaagcaatctgcctaccttggcataccaaagtgctgggattacttgcatgaaccactgagctcagcattttttttttttttttttttttaagagatgaggaggccaggcgtggtggctcatacctgtaatcccagaacgttgggaagctgaggcaggtggatcacctgaggttgggagtttgagaccagcctgaccaacatggagaaaccccatctctactaaaaatacaaaattagctgggcatggtggtgcacgcctgtagccccagctactcgagaggctgacacaagagaatcgcttgaacctgggaggcggaggttgcagtgagctgaggatgccccactgcactccagcctgggtgacagacagagactgtctcaaaaaaaattgggtttgtgttttacaacacttcttggtcactatgatactatgattatttaggtctaggcttagggaaatcttctggtgctcagttatagggacaaacatgttaataatacctttgtacatgtgtgagtaatgtgaatttgcagatatcgggataaaatcacttttgtcagacccagaaaaaacagggctgggaaaacatgaagaagaggaggcttacacttacgtgtctgtgataagaactgtttgcaaggcctgtaatcccagcactttgggaggccaaggcaggaggatgacttgagcccagcagttcgagaccagcctgagcaatgaagcaaaacctcgtctctacaaaaaaatttaaaaacgagccaggtgtggtggcatgcacctgtagttatacccagctactcgggaggctaaggcaggagcatcccttgaacccagaagttcaaggttgcagtgagctatcattgggccactataatctagcctaagtgacagaatgagacctcatctcaaaaaaacaaaagcaaaaattgtttccaacaactttataaaaccccaaaagaaatcccttcacgtccttcacacatctcctgctttgcacagcttgcacatttcaaatgtatacttatgtttccatgacaagacttatcactagacattcttcaggatgggagtaattcagataagatgctcttgaaagtacacttatccagcaacggcaactgcaccaatgaattgacaactctggctttgagcttctgggagcgatgaattctgttttttttttttttttgagacagggtcttgctctgtcacccaggctgtagtgcagtggcacaatcatggctcactgcagccttgacctgaactctctaagcagactacgtgaagctctccctcttttcttttttttttttttttttttttttttgagatggagtctcacccaggctggagtgcagtggcgtgatcttggcttactgcaacctctacctcctgggttcaagcagttctgctgtctcagcctcccaagtagctgggattatagtcacccaccaccatgcccagctaatttttgtattttttagtagagacagggtttcaccgtgttggccaggctggtctcaaactcctgacctcaggtgatctgcccatctcagcttcccatagtgctgggattacaggctcagccacaggctgagcttcacgcctagctgaagctctccttctttgctagtaaaatcttcccttccctcactaggcatatttrtggcatcccaggttataatcctcgttgctcattcctgaataaactcaacctayttggagataattttttgtaatgtctttcttyaggctgacagtagraaataacccccagctttcagtttttccttctgaatttaagatggtttgcatttcctagaggggatcccatttagaggtaggggtcaaaatttttgtcttacgtttattgtgcttctgtttgtcttattttatgttttcattttcctacactttcagagactaggcattgaaaagactgaccctaccacactgacagatgaagagataaacagatttgcaagattggacattgatccagaaaccataacttggcaaagaggtaccagagcagtatacaagccccgtttgttttggctatattgcacaccctacaccctccagaagagttgttaaaatgtgaggctcagaagcttccatgttggyattttaccagctaaggcatgaccaagatggtgacattatttctttttcttgccacctctctcagtatctctccttattagctatcatcaaatctctttgttggattggtcgaacattttgctggctattcagtgttgactgaaattagggtagttaaaccaaaaatcacattttacaaatttaattttatgcaaaaagttttagtgtcatgaagtagagaaattatgtttaatcacttcttgaatcatgtgtgacctttattcttagaactcttgtgtggcataaatgacttgatttttttctgtagttctctagcttacctaatctttttttttttgagatggagtctcgctctgtcgcccaggctagagtgcagtggcacagtatcggctcactgcaagctctgcctcccaggttcacgccattctcctgcctcagcctcccgagtaactgggactacaggcacccgccatcatgcccggctaattttttgtatttttagtagagacagggtttcaccatgttagctaggatggtctcaatctcctgacctcatgatccgcccacctcaggctcccaaagtgctgggattacaggcatgagccaccgcacccggcctacctaatcatttttttacctcattttattaaattctcttatagcatattaggtagccttcaaggtttaaatacttaccagttcagtaagtaggtttcctggcttcactgccatatgctacttttctcaatgcacaactagtgtagcttagatttcactttgcatcaacaatgcaaccttctattctgtatcactattgagaaagaatcttcatccactcatgcagaatagagctgaaggccagtttattgactgtttttgtgattttccttgactcaataaccgttgctagctaatggccttatttagatgacactctcaatgtctaaaaccacattggaatttctcttcctttgcttcaatagctttagacaaatggtataatattttataaggaataagctaaaagtccattttgaagatttagtatccgatttacttttcttttgcttcgtgtctcattcatgttttctaagcaactagaggcagtcatacctattgactagctattttttacagaaatattagttacatgaaacctgatacttttttcttttgaaaaataagggttggctttaacaacacattacagcaagagtggggggtgtgtgtgtctgattgctatataagacactgcttttggtatgaaattatgacagtctttatggaaaataatttggcatattatcaagtgccttaaaaatgcttctcctccttgactcatttagagtatgaactgggtttttttgttcattttgtgtgtgtgtgtgtttttactttgaaattattttaattttgaaatagaaaacatcttgaaaaaaaaacccacaaaatatataggcaaatttgtactctgtgagcttctcacatccttacactgcttcaccaatctctaagatgaaaaactctgttctaaaacatattcagccatcagcaatgatgttattagtaggaatatggatcaatttaattttgtgtttctttgatattgtttggcatttgatactgaaatggcaactcctgtttcctctctatactcatagtactctcagcacctcacttctgacaccagatgggtagtttttctcttccacaacaattcagctttcacttctccagtggatattgactgagtatcctatgatttaactcaattctgacactaactgtctggagcagatcctacaggtaaagggctcagtcctaaaagactgccccacttcagacaygaatcgcaagtccaggttgtcacctgtgcttctgaccaactggttataaactggagggtccccacaaccccctgctcaggttcatttgctagaatggctcacagaactcagagaagcatttcayttgtgtttatggtttattataaaggatacagctcagaaacaaccagatggaagagaagcgtagggggcatcactctcccagcacctggatgtgttcaccagcccagaggctcatcaaatcatgttgttcaagagttttttttttgagacggagttttgttcttgttgcctaggctagagtgcaatggagtgatctcagctcactgcaacctctgcttcccgggttcaagcgattctcctgcctcagcctcctgagaagctgggattacaggcatgcaccaccacacccggctaattttgtatttttagtagcgacagggtttttccatgttggtcaggctggcctcgaacttttgacctcaggtgatctgcccaccttggccccccaaagtgctgggatttacaggcgtgagccactgtgcccggcctgttcaagagttttatacacccctaacaccttacccagaggttggtgggtgggactgaaagttccagccctctaatcatttggtctttttggtgaccattcctttcctgaggctgtctaggagacctaccataagtaacttattaccataaactcaggtgtgatcaaaaggagtttgtaatgaataacaagacactcctatcacccttggaattccaagagctctgtgagccttttgtcaggaacccatgacaaaggtcaaatatatttcctattacactacacataccaaaagccagaactgagggtacactaaaatgttaacagtagttagtcctgggaggtcgttagttggttagttgcttggtctttgccatgttttttgtggttatataattggatagatattctgtcatcagaataaaaattctctctgctaagtgtgctatgtttcctaaatttccagaccaggcctggcacccagcgtgtttcaaaagatatttgcacttgccctgatttgatggctcctgcatttcttacggtggtggaaagtcaatgagtcatcatcccacagaacaacaacacaaacctcagtcttttgaaaaaatgtagactgctctgtttttcttatatgtggaatatgctttaaaatagattccagatttctagttaactgtttgaattctctagatgggataaaaccaagccattccacattcctttgctgtaaaaataactcctgtgtatttatggtatatgaacatcatttcttaactttaacacatattctagctttgccatccattttgaaatattgatagacaatcatgaaattagacttattgctttaaaactctgctgcttcctttaactttgtggtccttttactcaaaatcgttctatatcttgcctgtctgctgtagtgttggataccaatgatagattcctgaggaagatcacgattggacaggctccaacggagaagggtcacacacggacggtaacaatttgtccctttccaaggaaattagttcagaggcactagatcttgctgcttctctcctcctccatcctctctcatacgaytgatactgccaggtgttgttctgccttctcccttttaaaatggaagtgagtaggtgtgtggcattgagcactcctgacagcttttgcaataaatcccatgtgtcacctgtgtgtttttcccccggcattttttcctggaggtggagagccccaagtgaatatccttgcatagaaattgattaaaattgcttcttttttgtggccatttcactgtatatctccttggtttaagaggtaccatattattcccttgtatatgaaagaaacaataagcgcatgattataagcggccttcatagggataaaatcatagctttttggtcctactataacatttattttaaaaaactgacaactcagggctgggcgtggtggctcacgcctgtaatcccagcactttgggaggccgaggcgggcggatcacttgaggtcaggagttcgagatcagcccggccaaaccccatctctactaaaaaaatacaaaaactagctgggcatggtggcacgygcctgtaatcccagctacttgggaggctgaggcgcgaaaattgcctgaacccaggaggtggatgttgcattgagccaagattgtgccactgcactccagcctgggcaacagaccgagactctgtctccaaaaaaaaaaaaaaaaaaaaaaaatgacaactcagggtcttggaataattaattaatatatttttttgctattagaggattattttcattaagtattttgggtagtattctgttattctatccttttaagctatttgtttaagcctcagatgtaaaagaggatcacttttgcaattcacacttctggtttaacacaaagtttttgctagtacctcttttccctgcccacaggcccagtttgatatctctgtggccagtgaaattatggctgtcctggctctcaccacttctctagaagacatgagagagagactgggcaaaatggtggtggcatccagtaagaaaggagagcccgtcagtgccgaagatctggtgggtacccagacacgccaggcttggcgacatatctgtgtctgttgtcctagggtctttcagcagttattaataacaaaatgtaatgctgtacttaagacattgcaattaattcatcaatttaatcctattttgctaattacaagataattatgaaatgtttaaaaagtacatcagagtgaataatagctggtatgctttagtaatagatcacaagttccagatgatttgagtaacatcttcatcctgtgggcatctctaaaagtgggtgtatgacttcaatttgcagagaacatcaagagtaccattgctttatctttgttgctaggtagttcagctacactttgatggcttaatagagtgacctgatgttaaaagttggtattgaactcttgcgtaatattgcagtttcagctttggaagacacatattgagtttggtatttatagaaatttctgcccagataccagagttacaaataactgagtactctgggaacgagcattgtcgtgctctaaaatagtctagaatggatttctcacatcagtcagcagctgagcttgattaagatgcttgtttctagagttacatgtttttccagatattacatgtgaatgtcatttgtattctatctggcaactttggccaggcgtggtggctcatgcctgtaatcccagcactttgggaggctgaggcgggtggatcacaaggtcaggagattgagaccatcctggctaacacaatgaaaccctgtctctactaaaaatacaaaaaaattagcygggcatagtggcgggtgcctgtagtcccagctactcgggaggctgaggcaggagaatggcgtgaacctgggaggtggagcttgcagtgagccgagattgcaccactgcactccagcctgggcaacacagccagactccgtctcaaaaaataaataatttaataattggcaacttcatagcatatccagaaaaaaaccatgaatggtccaattcaggtgaaagtatcarttggtccaagatggctaacatgggtaagcctagaatgtcaaatattggtttcagaaggttgggtttttttgctggtgggagttgatgctgcacacatttgttttgtagggggtgagtggtgcactgacagtgcttatgaaggacgcaatcaagcccaatctcatgcagacactggaggtgagcagagtgactcctgccttcttgaaytggttttggacagtcagagcagastggttataaagcacacttgcaaggcgcggtggctcacacctgtaatcccagcactttgggaggccaaggtgggyrgatcacaaggtcaggagatcgagaccatcctggctaacatggtgaaaccccgtctctactaaaaatacaaaaaattagccgggcatggtggcgggcgcctgtagtcccagctgctcggaaggttgaggcagaatggcgtgaacctgggaggcagagcttgcagtgagccgagatcacgccactgcactccagactgggcgacagagcgagactccgtgtcaaaaaaaaaaaaaaaaaattaagcacacttaacctgggtagtcaagaccttctccacttgctcatctctttcttctcattcttcctcacacctgtgactgggacgttactgaaataaaagagatgactttatattttccctctgggaagtattcttccttccgattccaaatcaattccataccgttgaatgtgtgatcccactttgaagcaggattggcagctcagctcacggtgtcctggtttccacagggcactccagtgtttgtccatgctggcccgtttgccaacatcgcacatggcaattcctccatcattgcagaccrgatcgcactcaagcttgttggcccagaagggtttgtaggttagtgttttttgcaaaaccagtgaatagactgtatgtttcttttaacatcaggggarttgggatggcatttttactgttgctttcctctttacagtgacggaagcaggatttggagcagacattggaatggaaaagttttttaacatcaaatgccggtattccggcctctgcccccacgtggtggtgcttgttgccactgtcagggctctcaagatgcacgggggcggccccacggtgagtggtgggttgaagtatctgattatcrgcagtgtgctgacggccaaaaggaagttggatgacttctgcctgtttcttcattgagttgctcttatcctcgtgattaacaggcagcaaaagcaagggacgggcagacagcccttgtgttggctgccttatcactcacaggcaccgtcagcgctcagcattttaagagggccaaaatcggctgcctggcctacctttcggaggacatctgacaatatctaaacccctccaaggacgtgtactcggctagccccacaaaaaactgttttacgttcagactgttctttttaaatctgcatccctctgtatagtgacactggcaaccagccaaccaaaccagttagctgagacagaggtcagccccttcttgagtatactgttcatgctggacagggcctccacaccctagggagggagtgggggagaggagaatggcagatctgcccagggctgccctgggtaacagagaaacaggtggagactggctcatcctcacctccagcctgaattttgtatttctctgaattcctactgcttagaaattcctactactttttatcctagtattttaacaccttttctttagggcctacatgaaaagacatggtgctaggttttctgaaatcatttgaaaaactattaaattcctgtccaccaggagcttgtattataacttaggaaataaggactccctggcctacaggataaaaatcaaatttgttttggtcagggtttgtcctaatgtagcagttctctgttttggcctcagaacctctttacactcttgacagttattgagagcctaaaagagtttttgttcatatgggttatagctattgatatttaccatattagaaattaaaactgagttacatgtaaacataaagaactttgtaaacatgaaaatgcattatcttttcccagcaaaatttaggcattgtacatttttcagatcttctctgggtctggcttaattgaagacagcacttgatctgttgtgacatcacatgtctcataacctttggaaaagtccattatatgctcaatgagagaatgataatgagagtaaaagggccataagatgttacagaatcttatggaaatagttttgacttcatggaccccttcaaaggattgggtccccggagcacactgggaatgctgccataacaaccccagcacccctatccagtcttagttatccctgagtgccaaaggcactcccaacccagcacactcctttctgctagtagcacaggatagactcccttttttttcccagtcacaactaacattcctctctcttacacccctcactcaccctcacaccatcacacctcctttccttgcttcctcctgacctcacagtcaggataatgtcccataatgctgtgcatggaggggaacatttgcacatatggctctgtcaagagagtaggcctcctgctctcattagcttgctgacgggaagctacctgtaaggtccttgcttcttgctctgcctccacacagccccttctggagttggagcacatagtctcactgcaatggaagagggcagagcttcttaatcactatccactgcccatggtggggcccatgaaatggacaccttcacccatttgctcatttctgtggatgcarcagggctgagccacggcatagatcaagactgggggctggggggcggggcggggaggcaccagacacctccatcctttagatatactctacaaaagagaaagaaaatccttctgtattgttttccctcttgtttgtattgaccctgcaccacggttcagctccaccaatgctaggttggcactgtggaccagttcatgaaaccatggcagggctcatcacgggctctatcgacagacatcccagggtgacttccgcaggcccgaccgcttcctctttccccacactccccttgacttccaaccccactgctatggccttcactcgagtcactgcacctgcttggtacacccctttccacctctcctgccatcgatccggtccttctcacctccttaattcaggtcatagaggtcttccacgctgcccaaagcagtcgattttgttctgtgctgtgtgattggtcacataccctaagtccttagggcaggaaataatcttatactactgtacagcctgcaarcattgcagcgtcttgcctttaacacatraaaagcaccattttaagctaggagatttaaataggaaatgcctctgactctgtttcttttccttccaggtcactgctggactgcctcttcccaaggcttacatacaggaggtaacctgagttatttctcatcacrtgtcctagaaagcaccacaccttgaatcagcatttctccacctggcccatgtggaaatgaatgggttattgctgtgacccagggygcagggtgccaaaaggcctgcagtgtgctgaggagttatattaaatgagtagatagggaagatgyacctcacaaaatagaattgtcccacatagggtgtcaataagccactgccctagaccagtggttgattctcaacagctgattttgaccccggggacatttggcaatgtctagagactttttttattattacaactggaggtggggagtgctactggaatctagtgggtagaaactggggatgctggctaaacatcctttaatgcacaggacagcccctacaacattatccagctcaaatgtcggagtgtgaggctgagaaaccctgtcctagactaatagcagttcccttccattgtcttccctgcattggctgggtaagttccaaatgccattcagatcagaagcaagtagagaccttttttgaaatggcttctcctctgccgatttaaatccatattaacgggccaagatatatggtcaggattctggttgtttttctagacaaagcttcctggatatttatagcatcaaacaggaggctagagaacaactgtgagctcaaatcttttcatatttatgtcatttaccatcaaagaaacatctctaaagccagtttggggtggttacaggaaagacaggccatcagataaggtggcaaggtcacctgctgtcactgctaattcaatttttctgcctttttggaaggcttttaaattatcaagcaatacagggtcactgttcaggccccaaatgaagtatttcaaaactggctagaaaaaattgctggtaccttcagtctgcctgtcttctgagttatggtttgccttttatggtcatttgtctgattcacgcgtaggaggggaattcacagttctggccctcctgccaccccacagcctttcctgtgtctaattacagtgactgcccctagctggcccagctggtgtcttcatttaagaaattctacttatttaaaactgttcttgatcagcgttacatattaattggttttcatgtgactagaggtaaagaattagcagtgttctttagaagctcaaataaatcataatctcagttttcaattattaaaggaaaaaagcataaatcacatttataatgaacctagttgttttccaccttttatcctacctatttctgcttttttgggatcaacaaacattagtgctgggttttgctcgatgattcagtatatgtatttttatagaagactcttttatttttaaaatatttaatgtattgttaagcctacaatagtaatataccctttgtaaaaaataataattaaacattataagaatgtaatatatgtgagttgagtccccttaacagttcggtgcatatttctcgacatttaaaaatttttcatgaattatatacatgtatttttgtgtttgtcctaaaatggaataattaagctctccatggttttgcacctttagtacatcttggacaggttccatgttaacacagatgggtctcactttcataacatctgcatgataaatatttattgagtgtatatrtcataattcattggcccagtcccccttggaggaggtttatgtttataattttccaatgctacaagcagggctgcagtaaacatacttaaagatacatttccttaattgcttccctttagtttgtagtacttggtttttggtgggtttttttgttttgttttgttttgagatggagtctggctctattacccaggctggagtgcagtggtgtgatctcggctcactgcaagctccgcctcctgggttcacaccattctcctgcctcagcctcccaagaagctgcgactacaagcacccaccatcatgtccggctaatttttttgtatttttagttgagacggggtttcaccgtgttagccaggatggtctcgatctcctgacctcgtgttccacccgcctcggcctcccaaagtgctgggattacaggcatgagccaccacgcccagccggtttttggggttttttttacagacagggtctcactctgtcacctaggctggactgcagaggcgtgatcatagctgcagcctctaactcttgggcttaagcagtctcccygcttcaacctcccaactagctggaagaacaggaacacgccaccacaccaggctaattttttaattttttgtagagacggggtctccctatgttgcccaggcaggctgctgtcgaactcctaggtgcaagtgatcctccgatctcagcctcgcaaagtactgggattacaggtgtgagctaccacatccagctcagttctttttttttttttttttttttttttgagacagagtcttgctctgtcaccaggctggagtgcagtggtgcaatttcaactcactgcaacctccgcctctggggttcaagtgattctcctccctcagcctcccaagcagctgggactacaggttcctgccaccacacctagttaatttttatatttttaatagatacggggtttcaccatgttggccagtatagtcttaatctcttgaccttgtgatccacctgcctcggccccccaaagtgctgggatgacaggcataagccaccaggtccggccctttttttttttttttttttaattaacttctcagttgtagagatggggtcttgttatgtttcctaggcttgtctcaaactcctgggctcaagtggattctcctgcctcagcctcccaaagtcctgggattacaagtgtgagccactgggcccagccactggcctgattcctaaagatagtatttatcttatttcttgccctcgttcacggtcgagttcattaaaacctttgaaaacatcactgcttacttcatatttcctggcagtatttacggcagccatataacgaatacctcttctgtgccagccactatgttgttaggctctgtcttctgatggaagggtctgtgctgtgcagagtagagtyaatttgtattatcataaccctatgaatacataaaatctataaacacaattggtaaatataatttgggtaagggtaactaattcctttcaaacrgcaaataagctataatgatgtggcataatgacaggaaacataccagctctttttttcttgaaggctgggaaacaagcagagctctactctagtgtcataggctggagtgaaagctgcagttctccatagcatccactcaccgcactggaaaaaatgcaccaagggaccttctctcttctttcttggcctccttgtcctgatagtgagtggctgctggctcaaggaggttgtttgcctttgaagaagaacctgcagtggttttcaactctctgatctcataggcctttcactgttgtttttacagaacctggagctggttgaaaaaggcttcagtaacttgaagaaacaaattgaaaatgccagaatgtttggaattccagtagtagtggccgtgaatgcattcaagtaagtgtagagtgtaagcgaaaaggatgaatgtggaaaatctcctggagctgattgtacagcactgcttttagctttattttgtttttcagttactgctattggttatagcctgtggttttagcctgcactgtgacaggcattgcrtacgtcactgcgggctcaccacctcacccactgagggtcccaaagtcagattcagctcctatgggcccttttcctttccactgggggaagtaacacacaagcctgaagttcaatgttcctttttcatctttagaggccttttatgctaacagaaggtcataggcctatagtgttccattattttactagatctggtgggatgttgtcttgacaaagaattgggcatattactctggaaggggtcatgcaagaacttgtgtgggttgtttaggtattgcattggtggtcagggttttgttataatggcctcaccgtagtagaatgggaagcaaaaaatcttttttttttttttgggggacgaagtctgtctctgttgcccaggctggagtgcagtggcacgatctccactcgctgcaagctctgcctcccgggttcatgccattctcctgcctcagcctccctagtagctgggactacaggtgcctgccaccatgcccrgctaattttttgtatttttagtagagacggggtttcaccgtgttagccaggatggtctcgatctcctgacctcgtgattctcccacctcggcctcccaaagtgttgggattacaagtgtgagccaccgcgcccagccagcaaaattcttaaatgctagtatttactgattccttctggagtgctgggaattttccaagtattttacatggatttaccatctgagtctcataacgtcccaatgaaataagtgctgtgattattcgcgtattaccagggtggaaattgaggcacataaagattaggtaactggccaaaagtcaccagctagtaagtttcggagctgagattcaaacccaggccaaatttcttggttagtgttcgtttatcagtgggtaattcacatgaggtttaatggcaaaaagaagacaattctgtctctccagccattttccatgctttgatatgaaatgcttcctttataggacggatacagagtctgagctggacctcatcagccgcctttccagagaacatggggcttttgatgccgtgaagtgcactcactgggcagaagggggcaagkgtgccttagccctggctcaggccgtccagagagcagcacaagcacccagcagcttccagctcctttatgacctcaaggtgggtgatttgctgtctgcaaaaaaagaaaaaagacgaaaagggcacagtgaagtttctgtgtggctacttctattagagccccatgcttcgcagcttcagccttgcggtttgattcccacgtaggtgacttacacaaccacagcctggactcccagctgtagacagccttctttttatttttgagacggagtcttgctcttttgcccaggctcgagtgcagaggcatgatctcagctcactgcaacctctgcctcctgggttcaagtgattctcctgcctcagcttcccaagtagctgggattacaggcgtctgccaccgtgcccagctaatttttcttatttttttagtagagayggggtttcaccatcttggccaggctggtctcgaactcctgacctcgtgatccacctgccttggcctcccaaagtgctggaattacaggcgtgagccactgcgtccgcccagacagccttcttataaacatatgccactgcttacttacagaggggatttaagcaggaataccccagggtggagggggaaccgttgctcatatcctaacttcgaaaagggtcaaagtacaggtggcagaagagaaggttacatatagaccaaatatgtaattcactgtagcctttaaaacaaggcaccaaccatgtagcagattggtaaggggctgcatcgagcttacaaaatttttctgatggcttttcagtaataggggaaagaagtgtgcccccacgttcacttcctggtaaggtgctgcctcaagttgagggccctcacatgcaaaaccaaagtactccaggaagcttcatcattttttccatcactaagcaaattaaattacacctggtctaagtagagccctgcttactctatgatacaataaagttagttcaggaaaaggttcttattatagggttgtgttttgttttcatttatctgtccagtgtatttcaggatgtgatttgacattaagtagtatggaaacaacaactggaaactttgttaggaatatgagatatatgctgtagttaatttttcctattctctaggctagtttctggcttgatttttttgttttgttttttgttttaagacagggtcttgctctgttgctcaggctggagtgcagtggtacaatcatggcacactgcagcctcaacctcctggacccaagtggtcctcccacctcagccccctgagtaggtgggaccacagacatgtactaccaagcctggctaatttgttttattggccaggcacagtggctcacccctgtaaccccagcactttgggaggccgaggtgggtggatcacctaaggtcaagagttggagaccagcctggccaacatggtgaaaccccatctctactaaaaatacaaaaaattagctgggtgtggtggcaggcacctgtaatcccagctacttggaaggctgaggcaggagaatcgcttgaacccgggaggcggacgttgcaatgagctgagatcactgcactctagcctgggcaacaagtgcgaaacttcgtctcaaaaaaaaaattttgttttattttattttatttttcttgtagtgactgggtctccctatattgctcaggctggtctcgaactcctgggttcaagtgatcctcctgcctcagcctcccaaagtgctgggattataggcatgagccaatgtgcctggcctggcttggtttttaatagataatcatagactttcaaaaacagccataaaaaagcagaaggaataaacttattactcttgagttttagtgttctcttatttctctttgccccttgcagatataatacacttacagttaattaacattgacattgacattctcctgttgagctttgattttataggcaagttttaaaatctgttcagcaatcatccttttagaaaaatgccataaacacaaatttgcacacaaatgcaaagcatttataggcaccctctccaggctccaatgcatagcacccaaggctggaagcccagtccttgaaaaccagcaggagacctgaaagagcagggacatatggactttagaacccrtttctacttgcaacttttatccattctggcaaacaggaggctgccactttttgtcttactcagcgtctgctagtcttaaatcacccttcaaccaaagtgcttttgcttcagaagttctaaatgtgccttggcatttatagagctccagttatgagatgcatatgaaaataatctgtgtttcatctttataaagtccttattgaatgttcactttattcatgcccattatataaagccccttcataaattatcattgtttagttcaaaagggaatttttgtttttatagatagattattgctccttttaaaaacaaaacttggctgggcgctgtggtcacacctgtaatcccagcactttgggaagctgaggtgggtggatcacctaaggtcaggagttcgagaccagcctgaccaagatggtgaaactccgtctctactaaaaatataaaattagccaagcatggtggcccatgcctgtgatcccagctacttgggaggctgaggcaggagaatctcttgaacccgggaggcggaggttgcagtgagctgagatgacgccattgcactccagcctgggcaacaagtgcaaaactctgtctcaaataaataagaacctgcctaatatgttcttttagctttagttgctataaagacagatatattgcctaatttttgtaatttgctcatccaaattacccatgagtagctttgcttctgatttcctttaggcaacctctccgtatgctgttctctttgaatcttaatgccctgaactagtctacacagcatttaagaagccagctccacttctctgaaggctttgccccggaggaaacagcccatgggactgaggccctcaccagttagaccactggtctctgtccactgcactgtttgcttcaggtgccacagaaagtggacatgcccaatgcgtgttgatcatgtaaatcactgggttgttttttctaatacctgggtgattttgattttatgactatttcctaattcctggtgcttgcacttaatcaattgtgttaagggtggcatctgcctctcatatacagactgggagttatgtagatggacattggttgtcttatttcataaacagtgtccccaggtctggtttgacaggactgatctccagtattagaatagaacatctactttttaatttttattattattttaaaatttttattttttaaagagacagagtgttgctatgttgcccaggctggtttcaaactcctgggctcaagtgatcctcctgccttggcctcctcccaaagtgctgggattacagggatgagccaccatacccagcctgaacatctactttttatttatgaagaaataattattcttgggtagtcagcaacactgtttatgatgtacttagcgagagattttaaatatgtacttatgtaagtatatatttaaaaccttaatatatattaatatgtgtatctatatctatatatatatgtatgtgtgtatatgtatatctgcatatatagatataaaaactttacctctgtgggacattttcacttataaaatctgaggcttgatattaaaagaaagtgttcctggctgggtgcagtggctcacacctgtaatcccagcactttgggaggccaaggctggcagatcacctgargttgggagttcaagaccagcctgaccaacatggagaaactccgtctctactaaaaatacagaattagccgggcttggttgcgcatgcctataatcccagctactcgggaggctgaggcaggagaatcgcttgaacctgggaggcaggggttacagtgaactgagatcgcgccattgcactccagcctggcaacagagcgaaactccgtctcaaaaaaacaaaaagaaagtgttcttaacccaatcatcaacctcaaactatttgcttatgtatatgtatataaaaaccatcttctgccccttttagggactctgacctagaatgtggctatgtcctggttaaatgtcctcacatgtgtccagtcatggtgtccccatctctttcttgtgcattagctcccagttgaggataaaatcaggatcattgcacagaagatctatggagcagatgacattgaattacttcccgaagctcaacacaaagctgaagtctacacgaagcaggtagatgtttggttagtttgtcctttcaactctttgcaaagcaggacttggagtcrcaatctctgggtcctcccagccctgccaartacccgttgcttcacttctctgggtggcagccttctctcctctgaaatactgagtttggattaggtggcacagtccctggttctttatttacccataggcgttatatgaatgtgtagaaatccatgaggaaatacagaatgtcttaccaaaatattgagaacgtctccagtttttgttattttgagatagggtctggctccattgcccaggctagagtgcagtggcacaatttcagctcactgcagcctctgactcctaggctcaagcgatcctcccacctcagcctcctgagtagctgcgcctacaggcacgcaccaccacacctggctaatttttgtgttttttgttgagatggggttttgccctgttgcccaggctggtcttgaactcctgggctcaagcagtccacccatctcagtctcccaaagtgctggaatttataggcatgaaccactgcacctgaccctctccaattttattctcatatctactccaaactattattttaaattagttttatgttatttccatagatggaaataaaatattcacttgtggactacagttgtgagtacctaactccctcacccaacagttctttttttttttttttggcttaataaataagctggaggacagcaagatagagatgtatataaagggagttggatgtttcgaataaattgaagaatccatgtaatcacagggcccagatggtcattgctgggttgtcatcttttcatttgtcctccctctcttcccttctttccccagggctttgggaatctccccatctgcatggctaaaacacacttgtctttgtctcacaacccagagcaaaaaggtgtccctacaggcttcattctgcccattcgcgacatccgcgccagcgttggggctggttttctgtaccccttagtaggaacggtaagtgcatgctgcaagggagtagtgggcgcatctgcacttctcgtctgaagtgtgttgccgaaaccatcaagcaaatgccaagtgagcagagttcactgcccagaagaaaattggaatcgggcctattatgattgctgtggatcataagctataaagcaggagctatatagctcttgctgtggaccatcttggtgtcaaatcaagaatgatgccaggactactcatactgaataaaaaattctgtttcccagggacagtatgctcttcactgaatctaggatgagcccagttgataggctggggtagtgctaacataatcacagttaatgtttattgggagccttacatagattaactcagtccccccacagccctaggaggtagggacagaggttttactgacaggcctagaacttacgtctgaaattcagggggttcattatttttaagtaaggaatttccccattaaaaaatgcaaatggacccttgagatatgaaaggtgaggttgcttatttacgcttcaaggtgaacaaggtgtccattgctttcttatcttacagattttatgcatattcaaagaagaatattgccagttgggaagcagaggggagggatgcttaaggacataatcatagtttgggctgacattgttccaaggttaacttggatcctgaatctaggttatcccctaaatctgccctgtatcctgtatctacagattgtactgccatgcaatacaggactgaaatattaaactaaatcaacacacatggaaaagaaaccaacatacatccttttggatttatgtcattctttcagtatagtaagaaagtggtaggaggtggcattatagagttgaaaacgtaggacattagagctgaattcattttcacctcttcagatcttggccttgggcaaattatgaaaggtgagagccctgctgccctcagctcacactgtaggcaacatcatcacatcacagtggtgcttagcacaaatgcctgcatctcactgcctccttagctctctatagagagcagaaggcttagacttgctatgatgtacatcagtctccaggatttgtagaaatcccttgtggtaggaattttccaccatttttacccagcaccttgaatagtgcagaaatatgtgttgttctttttggagaagttgtcagcagctaccagctgaaagacgggtagctgtactctttcttgtcacttttgatcttcacatgaagaaaagggtaacagtagaggtgaaagcaaatctggaagcagtcaggccagtgagagtcaggctgtaaggtggagagagacacagcctgccgaactcaagactttctcatttagaacaaagtatgtgtcagaggcttttaactttaagttggaccaaggcgtttccacacatgatcaaatggtttaatcactattctaacaccttccagttgccgttggggccttaacgagactcagattatttgaatattttctatattaattcaaagtgtgatggcttattttcagaactttatatctaggttcatacatgtgcgtacacataatattgtctttttttgtattttttctgattatcagtgaccagtgtttaggagggaaaatcctcttggggaatgagtgaaaatatcaaaaatcctactcatcactgtttagggaaccatctttagggttttctgctgacatgcacatgcccgtctacaacaatgggcatgtgtcttttatctttataatgtcatcttccggtttttctgctgtgtctaaggacccatcctttcctctctcctacttgtctcacacctagcacctccttacctcttacacaatataagaatataaaccagttgtcagatccctataatgtgttttggggaatattgattggtactcagaagtcagtcagaatgaggttttctaaagtattgatgatgttttgtgttacagaagatgactctttttaaataacctttttatagttaagttttagaagtaacctaagctgttttcctgtctagatttgatttggaacttgtgtgtattcattatataggacattgttacagataaaaatatacggagttttcacttgcaagccgtacatatttgcatctaagtagaaatttgtcaaagccgagtctttagaaaagtagtgagtacaaatataatttgtaagcattacaagtttagttttagaaggccattttgggccagtaagaatggtgattataaaaccatctagattatgtacaaaagtgtcttggcccaagttaaaggatactaactcctaccatcgtgttgctgaagcaaaaatcacatgggcagctcagctagcaagactgaacgaaacaaaatttaaaagcagrcaagccctgtacctccttttggtcttgcaaagcgtgagctgaggaggcgagtgagcaactcctctactccccagcactcattcttgtaaggtgaaggtggaaacacctcctgctactgcttgtgaccacatggaagatgatagtgaaggctggcatttggtttgcagaaggacatgaggaatcagtttcttttcttttccttttttttttttttgagatggagtcttgctctgtcacccaggctggagtgcagtggcaagatctcggctcactgcaacctccgcctcccaggttcaagcgattctcctgcctcagcctcccaagtagctgggattacaggcacacgccaccatgcccagctaatttttgtatttttagtagagatggggtttcaccatgttggtcaggctggtctcaaattcctgacctcaggtgatccatctgccttggcctcccagagtgctaggattataggcatgagccaccacgcccggcagggatcagtttctgagttttttaacaggatcagtgacttgatttttaatatgtaacaagagtacccactttattgacaactataaaatgatgttctatctttatgccttgggctttctttctgaaggaaaagtgaaagtaaagatgactttacgtttattttagacatggccttgctctgtcgcccaggcaatcggatgatcatggctcactgtggcctcaacctcctagcctcaagcaatcctcctgccttagcatcccaagtagctggaactacaggcacatgccatcatatccagctaattktttatttcctgtagagatgggggtctcactatgttgcccagggtggtttagaactcctggcctcaagtgatcctctccayctcagcctgggattataggcgtgagccactgtgcccagcattagtttatttgtaatgcttttttacatcctagatgagcacaatgcctggactccccacccggccctgtttttatgatattgatttggaccytgaaacagaacaggtgaatggattattctaaacaggtaagttgttactgggtaataatttggcttttttcctcatgtagcttatttatgaattatagggctcaaactgacgctataaaaattcacattctaatgctttcaaaacatttcttttcagacttccctgaggggagaggggatagtaatgagagttggcaataaccaatgaattgaaatatttatatttcaacacatttttggaagaagcgcagcatggcttgtcacaggttgacagtgtaggggagaaaactgctgtccaataaactacagaggaaactacaggagaggttagactccctctgctgaagccccaggaggcttggggttcagagttgatgacacattgcaggtcaggaacagctgacggtctgtatactctgaataggtagttagaaggcaagaattagcaaatgtcttaggaagtataatagaaaagagaaggaaacaggaccaatctggcagttcttagggccttaggtgaaagggccctgagtaccgactgcaatgagtgacattgcattgtttgatatttttgaaatttcaacaggacgtgtctctccttaggcagacccttggggctgaagcagcaagttgcagtgtgcacttatatccctagacacatcctgttgaaactgcaaaaatatcaaacatgaaaatcctaacatctttctccagagacgaaaaaagtggcttgcctatgaaaagaatgagaactagacttaacgcccgtcttactggcaataagaagcttttagacaatggaggagtgtcctgtaaggtcacagggaagatgactttcaacatgtgctcacacctagccgaatctatctggatattttcagacgtgcaagggtttgccaccccacatctcttcctaagaagttatttagcaatgtacttagcaaaatgaggaattaaccaagaaaaaaggaagacgtgagttttgggaaactgaaccctcatttggacattagcgaaggggcattctgataaccatgcaaatgacctgaagttacaaatcctgtgtggaacaggttgggggagcacctgagaaaaactagaaaaagcyagaaaagacaaggatatcaaagggtcatagtataaaacaaaagctcttgcattatttgagaaagttaaggtccaagtagaagcaaactgtagtttgatgctagaacactattctttgagagggtatgtgtgatactcgaaatgcagtcatggctcacggcttggtctggtcttgaacagtattcacacagtactatggaaataccatgcatcattttcaagtccatttatggacacgccctagaagagctggtggcaggaaaggatgtaaatgttaacagctttggcaatgtgagtgggtaatggtgcagtatggaaggaacaggaaacatttcagtgcttagagaaaacatttatttcttgtttttccttccagatcaccatccatcttcaagaagctactttraaagtctggccagtgtctattcaggcccactgggagttaggaagtataagtaagccaagagaagtcagcccctgyccagaagatctgaaactaatagtaggagtttccccagamgtcattttcagccttaattctcatcatgtataaattaacataaatcatgcatgtctgtttactttagtgacgttccacagaataaaaggaaacaagtttgccatcttggtgttgcaatatgaattacagccttaacagactgtgccacaggtctctgccatcctttgtgagctcatttgtcaggcagacccttgggctgaagatgcaagttgcagtgtgccctttatgatactgttgtgtttagagggaaatgtatgcatgcttgtgtatttctgagaggacacataattcaggggacctcctgagagggttgggttggaagttgatgacttaccttttaatcttatacctttctatattgttgaattttgtttttctaccctgaggaagtattgcttatacaagtttttgcctgaacttccttggaattcccatttctgtcacagctttagcactgtctatgtttagagtgctcaagaaggatggtcatgcagcattagccttaggtgagcctctattctgttggtgcagcaagtattcattgagtttcttctaaatgcctgggctccacccttccctacagactttttatttttatttttatttttttgagacagtgtctctgtcgcccaggctggagtgcagtggcgcgatctcagctcactgcaacctccgtctcctgggttcaagtgattctcctgcctcagcctcccaagtagctgggattataggcatgagccaccatacctggcccagactttctttttcctaaaacattaggttggtaaaaaccacaattacttttgcaccaacctaatattttttttcctcctcttctggctgggcgtggaggtggctcatgcctgtaatcccagcactttgggaggccgaggtgggcggatcacttgaggtctggggttcaagaccagcttggccaacatggtaaaaccctgtttctaccaaaaatacaaaaattagctgggtgtggtggcaggcacctataaccccaggtacttgggaggctgaggtacgagaattgcttgaacccaggaggcagaggttgcagtgagccaggatcatgctgctgcactccagcctgggagacagagctagactctgtctaaaaaaataaatcaaatatttttccttctcttcttgttctttatcttctatctctgttcttcctctcccatttgtttccttccctttttccccttgtctccctccactggatccttccagaggatgctgcatcccactggcgccagtgctaaacactgctgatgttggcaaagcagtatttttcccagtgaccttggttttattatttttaattccctaggtccatgtcaatgttgtaatacagtcaattttacagtccacagaaatgatagcgctgccttgagaggcatatggcaaaggggtcacagtgcagagccccagctctatggcagagagcctcacccacctccctgcctccacatcctcaccatggaaataggagcactgttggtacctacctcgtgagggcggttctggaattactcaaacacatcatctaagatgctttgtacagggcctggcacattgtaagcacttgtcagttcctgttgcacagcatcctccaggccctgtttgcagagttaattgcttctggtactttttttttccttttttttttttttttttggcagggggggtaggggggttgggacaagagtcgtgctcttttgcccaggctgcagtgtagtgacgtgatctcagctcactgcaacctctgcctcccgggttcaagcgattctcccacctcagcctcccgagtagctgggattacaggttcgcaccaccatgcctggctaattttttgtattttcagtatagatggggttttgccatgttggccaggctggtctcaaactcctggcctcaagtgatcctcccacctcggcctcccaaagtgctgggattacaggcgtgagccactgtgcccgaccgctttctggtacatttcttaatgtcctgtgaaacttcacctggaatgggatttgctgggaattcattttgtagacaagggaaggatgcagtcttgtcagatatggtgacttaaggatcatcttaaaggatttaggtttcctaatatcgccaacagccacatgggtttaaatcctcaatactggtaggggctgggcatggtagctcacacctgtaatcccaccacactcagctgagttttgaagttctgttttttgtagagatggggtctcactgtcttgtccaggctgctgaggcaggaggatcacttgagcccaggagttcaagactaacctggacaagacagaccccatctctacaaaaaacaaaaccccaaaactcagctgagtgtgtggtgcacgcttgtagtcctagctccttgggagtctgatgtgagaggtttgcttgagcctaggagttcgaggccgcagtgagctatgactgagccaccgcattccagcctgagcaacagagcaagaccctgtgtcaaaataaaaaagacctatagaagcattagtgcttggggtaactattagcatgtgctggcagagaaggtctagtgcctttaccttggtgctaagagtccctccagattagtggctttcccgtgccctttctcttctctgggctgctaatgccttccttccccttattagtaatattactgataaacaaattgtacattctctgatctcacttcagaggctgtttctgtgcactgaagatgtacacacagtcttaattcaaaagagatagcatttatgtgctgccacattaaacagattgcaacagtattactattgagtttgtgttggctctgtgcaaccctcatggtgcccaggaacagatgaaaccaccagagacttggagcctcaggttcattcaatggtgtcccagggaacggggttggagggcttattcccagaaggcctctgaaatgtaagagctattaacaaggagttataagtcatttttggtagctataggcccaggcaatgggtagagatcaagatgggataaatggtaagatcagtagagtattgctcagataaatatgtaagctattttactggcacactgtatctagtgatattaacatgataagctataggtaggataatttctcatcagattgcagaaatacatttatagcctatttcctgttatataatgaaaagctactaatggggtagtagacaatgatatgggtaatagcttaaacagccttcgttgtcacttacctgaattcaggaatgacaggtttctttcatgcatgaggtactggatacattaaacacacacacacacacacacacacacacacacatatggcattgagttctagtcatatcctaaagaaaaactatggtgcgctatgttatttatagtactatactctgtgtgagtgactctgtgtgtatgtgtgttggtggaggtcagggatgacttgtttgtaatataccttaaggaagtctgtccgaatttgcccttcaaatactaaataaattcatctctcacctcaaactgcctttcagttcccttttactaattttgtttaaaagaaaggcaagtgaaggccaggcatgggggctcacacctgtaatcctagcactgtaggaggtcaaggcaggaggatcacttgagctcaggagttcaagaccagcctgggcaacatagggagacgccatctctacaaaaaaaaaaaaaagaagaagaacctgggcatgtggtcgcatacctgtggtcccagctgcatgggaggctgaggtgggaggattgcttgagccagggattgtaccactgcactccagcctgagcaagaccctgtctcaaataaaaataaaaataagacagctattttaccctgtcttcacctaaataagctcatcttattttttgcctgaaactcttgcaaactcccaggtctgctagttttgagaaaccttggatctcaataaggaatagttctcaattgcttataagcataatggatttcttttggcttaaagttcaaaactggcaacaagcagcgctagcaacccatagagagatacgcagaccatttcgatagacgtgtttgctgagtgaacaaggctgactgaatttttttttttttttgaggcagggtctcactttgttgcccaggctggcgtgcagtggtgcagtagtggctcacagcagccttgaccttctgggcccaagtgatcctcccttctcagcctcctgagctcctgagtaactgggaccatacgtgcaccaccatgcccagctaattttttagatttttttgtctccctatgttgcccaggctggtctcaaactcttggactcaagccatcctcctgccttggcctcccaaagtgctgggattacaggtgtgagctactgcgcccatccctgaattcttaattacaactaaactagatgcttatggattttcctgttttacaactcttgcctcttttatctgtaattttaagatcttgacagcttatatttggctttgcttttgtgtctcaagagttctttccttgataagcctctgtggaaactacagaatcttacaaatataaaacatttccggaaaaaatacaaaaatggacacctgacatttacactccctaaggtcgtgatcctgttgaagaaaggagatgaacgcggctgcttttcagtagttcttcacttcaccttaccaggttcttcatctggatgctatgctatgggggccagaggaggaggctgggattgtgatggatcctactagattttacagctggagctcccaggaatgccctcatagggaatgtcctgaagggaatcatgggtaacttgtaagctacctcaacttatttttggaactatgtaaggtataagatggatggagctgggttcctgtgcctttctcaccttgtccgcatagagatgcagctgctcctgcaggccaaagttctgcaccaatcacctccacctgcttcccactgggagacaaaggtttgaaagcctgtttggcgatgaaccacgatgatctgacactcaagccactcctgagaaagtcgggtttctttctgtttccatttatatatgtaattttcgcttcaaacaaacatgacctcgctattctatgcacagttttgaatcctgcttttaaaatgcgatgtctgccttgtctttaaatattctgagggggaggagaggagatgtgtaatgcgactgtctataatttgaaaccggacctcactatttagcgtctcagaaaacgcggggttcattgccctggtcccccccgccttcccccgccccccgaaccttccggctggctctcttgcggtccccgcctcggcgctgatgtggtctggcagtggagattggcgcccgggcggagcacgatgggcttccccgcggcaggcaggcaggctgctgctgcaggtgggtcccggcgcccgcgccgccccgcgcctcccgcggtcgccccgcccctgcccgcccgctccgctccgctcgcattggcgctgcctgctgtctgtccccgcgcggtggggagggggcgcacccggcggcgggctctgcagagggcgccttgctccgggtgcgaccgcggctccctggaggcctgggcggcgggccccgcgagcgcgccgccacctcgggagcagtgttggccaaggaccccgacgccctacgtaagtaaaggcagggcggggagcctgcgggggaggagggtcgggggcaatgtccggtccgcggaccgcggagtgggcaagaggtgcccactggatacggggtatccgagccctctgaggtgctgggagtaagaacgcgggaggtcgcttgtccgctggaatccgcggccagggcgaccctcatcaggtctgcccacctatccccttcgcgttacagcttgtcttagaagcatgggttgccggtggcttttttccttctttatccctctttgagaaatgtgattttgggtttctggccattacattataattctgcagacagcctgaagctgggttatctgttccacgcccccggcattttcctttttgagtactttatcctgcgctctgtctcctgccataaggggcgtcaagccagaattcgagattccttc

SEQ ID NO: 5706 - DNA, 26974 bp, Homo sapiens
  misc_feature (1)...(26974): n = A,T,C or G, or insertion/deletion polymorphism (see Tables 1-2)
tatgtgaaatatgacattggtattttgataggaattgcattgaatctgtagattgctttgggcagtacggtcattttcaaggtattgattcttctgatccatgagcacgggatgctccatttttccattcatctgtgtcatctacaacttatttcatcagtattttgtggtttgccttgtactgatctttcacctccttggttaaatatattcctaggtatttttctgttgcaattgaaaatgagattgacttcttgatttttcttctgttagattactgttggtgtatagaagtgctactgatttttgtacattgattttgtatcctgaaattttactgaattaatttattaaatctaggagtcttttgaaggagtccttagagttttctagatttaagatcctatcatcagcaaacagagataatttgacttcctcttttccaatgtgggcgccttttgtttctttctcttgcctgattaattgctctagataggactttcagtatcaggttgaatagcaatgaagagagtgatcatccttgtcttgttccagttcttagggggaatgctttcagtttttaccctttcagtatgatgttggctgtgggtttgtcatagatggctcttattattttgagatatgttcctttaatgtctagtttgttgagggtttttaccatgaagagatgttggattttatcaaaagctttttctttgtctagtgggatgattatatggtttttgcttttaattctgtcaatgtgatgaatcacatttattgatttgcatgtacggaaacatccttgcatccctggaataaagcctacttgatcgtgacgaattatctttttgatgtgctgttgaatttggtttgctagtattttgttgaggatttttgcgtctatgttcatcagggatattggactgtaatttacttttctcattgtgtccttgctaggttttgatatcacggtcatactggcttcatagaatgagtcagagaggattccctcctcctgaatattttgggagagttattctttgtacatttggtagaatttgactgtgaaaccatctggtcctggacttctatttgttgagagatttttttctattgctggttcaatctcactacttgttattggtctgttcagcatttctatttcttcctgattcaatcttggcagaatcttatggttctaggaatttatgcatttcctccaggaaaagttcctctccatgttttgaaacaaaagatattattctctcacagttctggaggctagaaatttgaaatcagtaaggccaggcagaaatgaaggtgttggttggactacaacactccagagacttgagaggatccatacctcgcttcttccacattattgtggctggtgtcattccttgaattttggctggactgctcctacttctgtctctggggccacatggcctcgcctccttctgtgtatatcacatctccctctgcttttctcttatcaggactcttgtaggactcttgtgattagatgtaagggttgactgcataatccaggatttccactggtcaagatcattaatttaattaaagttgtaagaatacctataaagtaacaatacaggctcaagaaactaagacccagttttctttgggggtcattattcagattactgagccgctgtgtgatcttctgccccctaggaggcccccatctgccctccagaccttgccttctctttctattactttctctgttctttccgtcctgacacactagtgggccaactcatgtaacgcgtatttatgggaatggggtctattataccataaaagacactgataagacagccaaaagataagttacagggtgataacacctgaatataggtatctgatgaatgacttgtatccagaatatatcaaggactctcaaaacaaaaacataagtaaaccacaacagcaacaacaacaacaaaaggcccaattttgtgtaaatgaaaaagcagccactcaacaacaacaaaaaataaacaacacttaaaaatggacagagggtgtgaatcacatttctcaaaaaaatatagtactcaaggccctcaccagaagcaaatgccagcaccacatttcttgcacagcctgcagaactgtgagccaaaatatatctgttttcttcataaattactcagtctcagatattcctctatagcaagccaagaatgaactaacacaatattttaaaaaggtagccaaaggttttatcagccacctcaccagaaaagaaaaacagatggcaaacaggctcatgaaaacatactaaagatcatttgtccttaggtaattataaatcaggagaataagcattcttaggtagcattacatacctgagaacataactagaaaacaaaacaaaaataaaaagaaatgtttaaatattctgataatatcaaatgttaacaaggatgtgaaacaatcagaattcacacataactcctggtgggaatacaaaatggcacatcaactttggagaacagtttgacaatttcttataaatttaaactgaacacttaccataggaccaggcacctgactcctaagtatttacccaagagcaataaaaacttacagttacacacagaaacctgcatgccaatatttataacaacattatttcatagtcacccaaacctgaaaacaatctgaatgctcctcaaatggtaaatgcatacaaaatggggggtccataaaaacagtgagttacgagtcagcaattaaagggaacaaactatagattcatacactcaaccacatgattgaacctcagaggcactgcaccaagtaaatgaagccagactttggaggcaacattttgtatgattccatttatacgacattctgtgaaaaggcaatacagtagggatggaaaacatatcagcattttttcatggactaagtgtggagggagggttgactacccagagacaggaggaaggaacgtttggttaatgacactcttcagtgtcttcacagtggttgtgggtatataattatatacaactctcaaaccatatcaaaattgcatatgataaagagttaattcaactgtatctaactttaaataaattaaaaaatttaaaacactggatgccactatgctctcactagaattgttcaaatataaagcaggacagtatcatacgtcgacaagggtgtggagctactggaattctggcacatggctaggaggagtggtaaaaagtcaaaaccattttggacaacagtttggcaattcctactaaggttaaacttacaagtagtcattagtctgactatttatcttcctgtgtataccaattagtataaaaccatgtatgtaaaaagacttgtacctgaatacctgtagggagaaaactggaaaatccttgtctatcaataggtgagaaataaaacattatagtatacacataaatggaatactacttaacaatatcacattttgaaatacagacacaaacaacgtggttcagtttcaaaaaatattatgctgggtcataggatacagacacaaattaacacatctctaggagattttcaaatagactaactcacaatgaaagaggacatatcagtggttgcccagcatagaaggtgggaagaaaagcccttggcatactagaaatgctgtatatctgcagtgtggtgagtatacaggctgtacatactcgtcaaatctcatgcaaatgtgaacttcaagtaggtgtgctttatttcatgtaaattatacctaattaaattcattaaagaaacacagtaagactcacatattcatatttgatcttctggtccatgaacatagtatgactttattgttaaaactaaatgtggctgggcacagtgcctcatgcccatagtcaaagcactttggaggtcgaggtgggaggattgcttgaacccaggagttcaagatcagcctgggggaacatagcaagaccccatctctcctaaacataaaaacaaaaagttactccggcctggtagtatgagcctgtgatcccagctactagagaggatgacgtgggagagtcacttgagtctgggaggtcaaggctgcagtgaactgtggtcaggccggtgcactccagcctgggcaacaaagcaagaccctgtcttaaaaaaaaaagcactaaatgtattgaattttctattacgtgccacatgctaaatatttaaataacttacaacagatattatttactggagacttaatttgttgtatatcaaatgaggatgcagctacctctctattagtaaggatgaatgaagagttatctagatactattgtgtgtagagatttgacaaaggtatggtggcaagtactaatatgtcccagggatcaacggtttgctggatgcatactacacagagtgatatggaaaaccatgtagctggacctaaagtttaattttctctgtacactccactcatgttgtctggaaatattatgtctttgggccatatttaactgtgagaagcagatttttacatgaaagaaaatgttgatccatatgatgagcctctaaaaaaacttgcttctgcccacactgaaccaaatggcagcatgaatggaaaagaagttttttctgcactggttcatagaacatgtgttctcccttttgtttcacaggaagatgctgcatggttcttgttttggagatgtcattgacactgtgcaaatcagtgtactaggtgccaggggaaaattctatagtcatatttcttttaaaatttccaatatgctaccatgatacatggcaaattcccaacttttcacagctctaaagccagacagcatgtgtgtgtgtggtgaggacatgaggctatggatggggagtatcttaagggcaggaatcaggtcagtggcatctcttctcaagccccacctatacacaaaggctcactgtaagaattaaagaaagaggaaagaaacacgaatggtggctcaccagtcaagacagattttagagaaaacaaacctgagaggagtttctggccgagttaagtcagaggcacactctcttacagactaagagtttttaaggatttagggtgggagagtttatcagagacttggactgcttctgagtctctttgttgtgcttatctgggagagagaggtgtgtgtctgtacccatacatctttctgcagctacaggcatacccactgagtctgcttttagcttccctatcttagtgcacctgaagggaaaggaatttgcttattaaggcccactgttttactagggccattgtatgagggtgaagtttggcagtaactcaagagactctccccctacctccctctgtgcccgagctgtcttatctgtgtttcactgtctgctctttctggttgcttgtagttagcagagaagtgatttccttgaaatgcatgaggctagaaaggaaattggaacttaaagaggcagtgtttctccgagatgacggtgctcctgctctgtcactcactatatctttagtgaatgaatgaataaatgaatggctgccaccttcactttacctaggactcttctttgtttctctgccccagacactcacacggaccctatagaatcctatatcctgctggactaaacaccccatggatctaggtgaggctgcgactcgggccaggccagcagtgatcagccctggtgtaaacagttgtgcacagaaaagcacctcagagtggaaggactttagacatggggttcgcatgtctcagatggccctgaaggtactgatccaggctctggtgctcctggaaggcaagactcagattctgctccatctcctcccatctctgggcgggtctctggcatctctggcccatgagggtcaatctgtgtggaggggacaagctctgagcatgtgtgggtctgaggttcctcttccatgcagggctgaggtctcctgctcctccccagcttcctgtccggccctgtagtccttcccctccactcccttcctcttttctgctcacacaggaagccctggaagctgcttcctcagacatgccrctgctgctactgctgcccctgctgtgggcaggtgartggctgyggggagaggggttgtcgggctgggccgagctgaccctcgtttccccacaggggycctggctatggatccaaatttcyggctgcaagtgcaggagtcagtgacggtacaggagggtttgtgcgtcctcgtgccctgcactttctyccatcccataccctactacgacaagaactccccagttcatggttactggttccgggaaggagccattatatccngggactctccagtggccacaaacaagctagatcaagaagtacaggaggagactcagggcagattccgcctccttggggatcccagtaggaacaactgctccctgagcatcgtagacgccaggaggagggataatggttcatacttctttcggatggagagaggaagtaccaaatacarttacaaatctccccagctctctgtgcrtgtgacaggtgaggcacaggcttcagaagtggccgcaagggaagttcatgggtactgcagggcagggctgggatgggaccctggtactgggaggggtttaggggtaaagcctgtcgtgcttagcgggggagcttgaccagaggttgatcttctctcaggccctcacctggaccctccctcctgattctgcatyccctctttctcctcactagacttgacccacaggcccaaaatcctcatccctggcactctagaacccggccactccaaaaacctgacctgctctgtgtcctgggcctgtgagcagggaacacccccgatcttctcctggttgtcagctgcccccacctccctgggccccaggactactcactcctcggtgctcataatcaccccayggccccaggaccacggcaccaacctgacctgtcaggtgaagttcgctggagctggtgtgactacggagagaaccatccagctcaacgtcacctgtaagtgctgggccaggatgctggggtccctgagggtgtaggggagacaggatgggctggtgctggggacatttagtgtcctggaggcctggctgagttcgggagccagaaggacatgagccctgtcccttctgcatttctgtggtttctggcaggagtaaggggaaatgcctacccttatctcatctctacccccaactgaaggaaatcctctcttcctctcctagatgttccacagaacccaacaactggtmtcnttccaggagatggctcaggtaggaaggagcctccccgcctggggctgttactgacattgagtctgtgtcaggtttggtcagatctggactttcagagtcaaatgttcagaggcaaggcctgcagttagacacgggtagacatcaggcaccttggaaaaggatatttggggatgactagcaacttcccccttgcccatccaaataatgctctttgtctccctcctgtctctgaatgtcttggggtattttatttttaattgatatgtaataatagtacatatttatggatggcatagtgatgtttccatactaataatgtatagtaatcagatcagggtaatagcatatccatcatcttgaacatttattatttcattgttgttgggaacattcaatatcccctttctagctatttgaagctatctattattgttaagcatagtcatcctacagtggtatagaacaccagaacttattcttcctttccaggtgtaatctagtatcctttaacaaatctctctccttatcattgttcccctaaccttcccagcccttattattctctgttctactttttacttctatgaaatcaacttcttgtagcttccacttatgagtgagaacatgtggtattcaactttctgttcctagcttatttcatttaacataatgtcctctagttcaatctatgttatagtgaataacaagatttcattattttttatggctgaatgataatccattgtgtatatacgccacatttcctttatttattcatctgttgttggacacttaggtttatttcatatcttcctattgtggataatgctgcaataaacattgaggtgcagacgtttcttcaatatactgatttcctttcctttctataaatgcccagtagtggggttgctggatcatatggtagttctatttgtagttttttgagaaacttccatactcttctccatagtggttatactagtttacattctggtcaaaagtatataagagttccctcttctctacatcctcaccatcatttgttaattttcatcttttttttatcatagtcctcccaactggggtgatgttacctcattgtggttttgatttgcatttccctggtgattggtgacgttgagcatttttcatatacacttgttggccatctgtatatcttttcttgagaaatgtctactcagataatttgcccatttttaaatgagattgggtttctttgccattgagatgtatgagttcctcgtatgttctggatatgaatcacttgtcagatgaatagctgacaaatattttctcctattctgtaggttgccttttcactctgttggttgtttcctttctgcatagaagctttttagcttgatatcatctcatttatttacttttgcttttgttgcttgtgctagtgaggtcttactcataaaatatttttccagaccaatgtcctaaagcatttcccctatgtttttttctagtattttttaaattttgtgtcttatattcaggtctttgatccattttgaattgatttttgtataggacgagaggtgtgagtctaatgtcattcttctgcatatggcaccagttttcccagcatcatttattaaagaaactgctctttcctcaatgagtgttcttcatgcatttgtcaaaattcagttggctgtagatcgtggattaatttcggtgttctctattatgtattattggtgtatgtatctgcttttatgccaatatcatgctgttttggttactacagctttgtagttttgaaatctttaaatttttgaaattttgaaattttctagttttgaaattttgaaatcttgtagtgtgatacctccagctttgttcttttttgcttgggattgctttgaccattcaggctatttttagttccatatgaattttaagattgtttcctctaattctgtgaagaattacattgatattttgatagagccaggtttgaatctgtagatttctttgggtagtataatcattttagcaatattaattcatctgatgagtaaggaatgtctttccatttgtttgtatcctcttcagtttatttcctcagtgttttgtagtttttcttattaaggcttgtcacctccttggttaaatttattcctaggtatacttcattctcttatagctattgtaaatgtgattgccttcctgatttattttcagctaattcattgtgtgtagaaatgctactgatttttgtatattgattttgcatcctgcaaatttactaaattcatttatcagttctgagagttttattgttagagtctttaggtttttgttttgttttgttttgttttgttttgtttttgagatggaatttcaccatgttggccaagctggtcttgatctcctggcctcaagcaatctgcccactttggcctcctaaagtgctggaattacaggcatgagccaccacgcctggccaagtctttaggtttttgtatgttatttgcagagacaatttgacttccgcctttccagtttggatggtttttatttctttctcttgcctaattgctctggctaggactttcagtactatgtaaaataagagtcataacagtggacatccagttcctagaggaaaagatttcagcttttctccattcagtatgatgttagccatgggtttgtcatatatggccttttttgtgttgaggtactttccttctatacctaatttattgagagtttctatcatgaaacaatattgaattttaacacatgctttttattctgcaactatttaggtgatcatacggtttatgtccttcattctgttgacatatgtataacatttattgatttgcatatgttgaatcattcttgcctttctgggattaatcccactttatcatggtatgttatctttttgatgtattgttggatttgatttgctactattttgttgaatatttttgcatctatgttcatcagggatattggcctctagttttctttttttattgtctcctttctgattttggtgtcatggttatgctggccttgtagaatgagttaggaagagttgcctccacttcaattttttggaatagtttgagaagagttggcataatttttttttctttaaaggttcagtaaagttcagcactgaagccatccagccctggaattttctttgttggggggccttttattattcattcaatctcattacttgttgtttgtctgctgaagttttctataccttcttgattcaatctcggtagattatatgtgtccaggaacttatccatttcttctagactttcaaatttgttggcatattgttcatagtagtgtctaagatcctgtgtatttctgtggtaaccattgtgacatcttcttttttatttatgattttattaatttttatgtcttctgtctctttcttagtttagctaatgattgtcaattttatttatttttccaaaaagcgaacttgttcattgatttttttttaatttcatttatttctgctctgatctttatgatttctttcattgtgctgattttggatttggtttgttcttgctttctagtttcttgaaatgcacagttaaatggtttacttgaaatttgtctaattgtttgatgtaggcatttatttctctcaagttgtctcttaaaactgtttttgctgtgtcccataggttttggtatattttatttctatttttatttattttgagaaatttttaaatatcattcttaatttcttccttcactattggtcatttagaatcattttgtttcatttctgtgtatttgtatagtttgcaatgtttcccttggtattgatttttagttttattcaattgtagtcaaataagatacttgatacaattttggtttttaaaaatttttggcacttgttttgtgttctaacatatggtcgatccttgggaatgttgcacatgctgatgaaaccaatgtgtattctgcagctgtcrgttgaaatgttctgtaaatatcttaggttcatttggtatatggtgcagtttaaatccaacgtttatttgttaatcttgtctagatgatttgttcaatgctgagagtggggcgttgaagtcctcaactattattgtattggagtctatctctccctttatatctaataatatttgctttacatatctgggtgctctggtgttgtgtgcatatgtatttacagttgttatattatagtgctgaactgacccctttataataatataatgtccttctttgtctctttacagcttttgacttgtagtccgttttgtctgagataagtatagctattcctgcttcctttcatttccacttgggtagaatatctttttccatctcttccttttcagtctatgtgtgtcttctaggtgagataagtttcttgtaagcagtatatagctgtgttggtagaagggctgaggcagggcttgcttgtctgacataatgtaaaagagtcttggaacatgtcctgggtccagggtctcaaacccctcgtggcctatggaacaccaagctctgtgcctaagggtggaaggctgccctgccacactgcaatctaagcccagggcataaaacccctcgtggcttggaaagaatccagggctctgggcataaaacccctcatagcctctggaatgtgtccagacttgctggccccttgctccttgctctcccaggatcataaattgattgtatcttgagtgaaaagaacttgttctccattatttcaagtagcagagcatatgctaaaccgtcacagctatgcttgatgcacygctacctttctaccccaaagtcctcacgttctcacttgtctatccccacttctgcacgtcctcaccacctgcttctttgtttgattaccaataaatagtgtgggctcccagagctcggggccttcacagcctccatactagcgtcggccccctggactcactttatgtactattaacttgtcttgtctcattcctttgactccgctggacttcgtggcccccacggcctagtgttggatctgatcaccccaacaagctgagtytagattttcttttcattcattcaggcagtccatatattttaaatgggacaatttaatccatttacatacacattattattaataggttattttcatttcattgattgttttctgattgttttatatattcctggttccttacttcccctcttattgtttctttttgtggttggctgatkttttttttttttttgtagtgataagatttgattcctttctctttcttctttgtgtatgggctgtcagtgagttttaagttcacgtgtttttgccttttcacttccagatgtaagactcccttgagcatttcttttctttttcttctcttatttatttttattattttttttttgagaaagtgtctcactctgtcgcccaggcaggagtgcagtggcatgatcacggctcactatagtctcgacctcctgggcttaagcaatcttcctgccttaacctcccaagtagctgggactacaggcatgtgccaccacgcccagctaatttttgtgtttcttgtagaggtagggtgttgccatttgcctaagctggtctcaaattaaagagctcaagtggtccacctgcctgccttcacctcccaatgtgctgggattataggcatgagccacactgtgcctggccccttgagcatttcttgtaaggccagtctaagagtgattagaattcccttagtttttgcttatctatgaaatattttatttctccttcttttctgaaagatagcttttctgggtatagtatttttgactgttaagttttttatctttcagtactttgagtatgtcatcccattctatcctggcctatataatgttactgctgagaaactcactgttagtctaataaggataatcctatatgtgactagatacttttaccttgctgtttttacaattctttacttgacttttgacaatttggcataatgagctttggagaggacttgcttgggttgaatattttgagagtactttgagcttcctggacctggatgtccttctagttcccaaggcttgggaagttttcacctattactggattaaatatgttttctacaccttttccattctcttctcctcctggaaataccataatgtgaatatttgcttgattgtgtcccatgagtcctgtaggtttccttcgttctattttattctcttatttttacctgcctgtgttatttcagaagatctgtcttcaagttcagaaattattttttcttcttgacctagcctgttgttgaagctctcgattgcggttttttatttcatttattgagttctcagctgtaggagttctgctttgttcttttatataatatctatctctctgttaaatttctctttcaagtcatgaattaaaacaatgggacacaggtgcccaactacttggctgacctgggggcatatctgctggaggtgccaacatggctgttttgcagggctgagatgaagctgaatgactcttggctggcctaggtgtgtttttgccaggagtagcactcagagctttatctagggtttgggatgtgagtgtaagactgctcagctggcctagggggtgtaccagccagtggtagcccatggggctgtttctcaggcctggaatgcaagcacattctgcctggggtcatgtctaaaagggttggctcacaaggctgtttctcaggccctaattgtgggagastggcctttgggcaggccagagtcatgtccacagaaggcgtctgggcaccgtaaggctgtttctcagagcctgtgtgtgagcacataaccactaccccagcctggggatgtatcaactctttgttggctcagaggtctctcccattcaggtgagcatgcacagtagtttggccaactcaattgtgtgttcgccctgagtgggactataagacctttcctccagctggaagtacgggcagcaggggttggtttctctgctgttcagggccagagtcccagccaatcctgggcccaggctccatgcagctctaattgtggtattcagccactactgcaggtttagtggaatgaagatgcacaatgataaagaggtgcatgccactggcccccagaggagggtgcactccagagatggctgtggtctcaagatggttctgtgttgtagcagcttgcccgcaggggctggttagggagttgggagtgcacaccaaatgctccatgcagctgtgtgaattcctggcagctcttccaactgtgctcagagcttgtgaggactgtaagattaacctgtagtaaggaatgtaggtatctgcagtggcactggaggttggttggattcctctgcttatcatttccctacaaggggaaatccttcctgtctctgggacaaaccaatctgggctggggagatggagctgcaaagcccgggtgcctccatgctgccctcctgggtttccaattaccacaggtaactctccactcccttgctgcactacactactctcccttcgacactccactcaaatctttgctgtggtttattcattgccttggtcctttcttgtctggtgacacgggggaggatgagctccaggcacctccggtgagccattttgctccaatgggggcatttttttttaataggttttatttttcagagtagtttttgtttcacagcaaaattgagtggaatcttctagtcgctgatcatcttgggagcatttataaatgaaccttatttttcatgaagaaattgagcagaagatactaagacttcccgtatgccctctacccttacacatagtttccccggccatcagcatcccccatcagagtggtacatttgttacagtcaataaaactacattgacatatcattgtcacctgaagcccatagtttacattaaagttcactcttggtgttgtacattttacaggctttttaaaaatgtataatgacatgaatccaccatgagagtatcatatagaatagtcacacttccctaaaaatctctttagggcatttttttctactgtccatacctcaacccttagccctggcctctgtccaaagaccagtgctctctccactgccctattccaattaataatggcatctggcacctcagtggacagtgagcccagtgagagcaggaacagttccctcagtagtggttatcaaactgttaacaatgatgctcagagacacgcccctgactctgagtgttgggacctagaaggcacagccaggcaggtccaggagaactgtctgggtctaagaaggtctgagaaccacctccctgccccaccctgcttccaggcccttttkaaggccaaaaggaccacctttgaccctaagtgatggggccagtgggaagaaagaagagacaaggcctatcagcattccagtgctttctctctctctcatccaagaggctcagagcttcacagtccttcaggggctatgtctgaggttcatttcagaaagacccagggtggagaggaacctgagtcctaggagagatgatgttttgtgcaccagagagagagggtgggacaagaggtgtcaggtgcactgtgtacttcatctcatggtcgtggtcaatattgatgtctatgatgggtgggaagatctaggagctaaaccccattttggaggtgaagtcacccctctctacatgctggagaggaggatacacatacctgtttatctagattagaattcaccccaaatcttttttgtctgcagggaaacaagagaccagagcaggagtggttcatggggccattggaggagctggtrttacagccctgctcgctctttgtctctgcctcatcttcttcatgtgagcattttctctgggtcaggcatgggccagaggtgaagaggatggacctggtgtagaagggtcctggaggggctgtgagggctggagaaagggcagggggtgtgatgatgtacagaatccagcctgtggccactgggataggcgtgggtctattccagggccctgatctcagatgtccaaggagtgggaggtagagggagaccttgtgactaagtcttgtttgagggctcctggattaatcccaccctttacctgccaaagtccctcattccaggctcataacaatggccccacagcctgagaaaaccaggctcaaagaccctggtgtctcccatcagagtgaagacccacaggaggaaagcagccaggacagcaktgggcaggaatgacacccaccctaccacarggycagcctccccggygagtgatggggcatcctggcatccagtctgtcctgcagacacctcctcccaatgtggcccaccgtcatgccccattcagcatttccagaactgagcttattgtctttcctcctgtttaacagtgtaggttttaatatttttcaggtacgttgaggccaacagatcaggagatgatggccattgaaaagatagtttcttggccgggcacagtgtttcacacctgcaatcccagcacctttggaggccaaggcgggcggatcacgaggtcaggagattgagactatcctggctarcatggtgaaaccccgtctctactaaaaatacaaaaaattagccagatgtggtggctggcgcctgtagtcccagctacttgggaggctgaggcaggagaatggtatgaacccgggaggcagagcttgtagtgagccgacatagcaccactgcactccagcctgggtgacagagagagactctgtcccaaaaagaaaaaaaaaatagtttcttattcaccgttcccgagagggcacaccacaccatgcaaggccatatggagaagcaccagggtcagtcaggaagcagagggagcaaggagaaaatgggacaagagccttcactgtggctttcatggaaaagaatgggcaagacagggtaagcaagctaggcaggtttaggattggctacttagaacaatttcagcagactctggggtataggagttgtctctagttgtctggtacatggccctgggtttattaaggaggattgtggtctggagtgtaagagctcaataaaggatccagctggtagtgtgggctttagattgactggtttgcmcatgaaaggtgcacttgtatgcaagtcctttattagctctagaaatctactatccttgggaaaggcagtctctcaagggtcagtaatgccccagatgtcaaaacatcagaaacacttggttgacacacccctaaacatacttctcctgatgggttctccatctcgctgatggcactcttgtccccattacccaaccagagacatggccccctcctgtcccagtcctccatctcttcctgtgccagtatgctacgatgcatgtctgagcttcctctgaacacggcttaacacaaccactcctgagccgagagcccctcttactccttattctgctgcagcctcacctcccatttctcctctccagaacattagcatcacctccctaaaaggtcattgtcccatcattcccaagtttgaaatgcactgcttctctacactcctgaaagattggcattccaacaacttggtctggcatttggagcaggaaaaccagagtccccttcagtgctatgctcccccaacattagccactcaatcacctcaagcagggcaagctttctcatctcagaatcattgctgggctgtcccctcctcctcatatgcctaatagctacctgcccaactccagtgcatccttcaagctctgattttttttttaatttatttaactctgactaaagtgaacaccacagtaaagtttttgaacacagggtcaaccagcacccattcattctgaaatatctatataatcccatttgccaattgctctaggtccttgtgccattctgtatttttataaacacacagtttacaaatataaaatattcctcctatcgggggcttaacatttattggggaaagggatgaaaataatgaacaaataagcagtgcaaatatacatgaaataggcatgaaataagtgctatggcaggaaatgaaatgggagaacggattggacagtcctgggggccaaagaatggcctttgggcaaacacctgcagaaagaaagtgagtacagtatgagcagtagagaatcatcaaggaagcagcaagtaccatggctctgaggccrgaacacatctgatgttttagagaaacaaagtaggacagtgtggataaggcagagttacgtgttgggggtggagtgtggactgaacaatggtaggtaggaaatgaggttgaagagacataggagctgcaaatattgcaggatcctaagtccatcatagttattgatgcgtttagagcagaagagtgacatgaactgacactcattttagtgggagtcactctggctgctctgtgagaaactctagtatgtagtatagaagagaagataccagaatagaagatacacagataatcaagccaagagatgactgactcagacttagtcccaagtaagaataatgaatctgatgtggagaaattgggttccggatacatcttgaaggtggagtcaacagtatttgcaagtggagtgatggagtgcatgcaaggcatgagcaaagatagctcacgggctctgctcgataagtgtctcagatgtcataggtgggtccacagatatcatagatgtcatggatgtccaagaagaccccatagatgtcatagatgtctatagatgccaatgatgatgttcatgtggttaactcagaattcaaacttaaaaaatcaaattgccaatgattaaaattgccatccttgaaggagaagtctattttcaagtgtatatcaaacattattttggttaccgtaagtttgaggtgcctctgagacatccatgtggagatgacaagtagcaggcaagtgtctggagctcagaagagggmtccacgtgggagacacagaggttgggagcttccctatcaacatccaataatcgatgaatctacaaagaagagaaggggtccacagacacagccctggaaccctccagcatttaatgttagggagatgaggtgtaaatggtgagaaagctgagaatgaataggagccaatgaccaggaaattgcaggctgtagtgttggtggccaagggaagatggggcttcatggaggagaggttggtcatttgtttcaaatgctggtaagtctggtaagatggaatctgagaaatggctatttgaatgtagctaagtggtatgacagcaaagcagatctgatttttctgctggaggaagatctcttgactagagagagttcaagagagaatgggaggagaagaggcagaaactgtgagttgaaggactcttttgagaaacactgccccaaatctagaaccaagaaatgggcctgcaccagcaaatggttgtaccctgtagacttgccatttctccagcatctgctcctgtgtctcttatgataccatgttccctgtttgtgtagggctttgcaccacttgaactaactgcattcccatagcttcccctaccacaccatgagctccacaaggaaaagcctgggttttattagacctccatcattctactctctcctgttcatctgcacactgtcacaatttgcaattaccagtctgtttctgtcttcatcccctgcagtactggaaatcacagggcccctgctctgctctgctccctcctgaggatccagtgcccagcacataggaggtcccagagacctgggaccgagttcagggtcaacagatgtgtgactttggaaattacctaagctctctgagacctagtttcctggtctgtaaaatggattaaaataatagatgccaaagatgatgtcagtgtagctgcccagaatttttccacattagtctctgtgagtattcaagagaattgcgaatcaatcaatacgtgctacatgtgttagataatgaataagtagagccttaattaattaacatttgatgaaagaatgaaagagtgaataaatgttctgtcagagtcaaatttacttcattgaccctctttgccttctcctggtccccctcctcactgccctgctctaacccccttctttcctctccataagaaacaccagaagaagtccaagttacatggccccactgaaacctcaagctgttcaggtgccgcccctrctgtggagatggatgaggagctgcattatgcttccctcaactttcatgggatgaatccttccaaggacacctccacygaatactcagaggtcaggacccagtgaggaacccwcaagagcatcaggctcagctagaagatccacatcctctacaggtcggggaccaaaggctgattcttggagatttaacwccccacaggcaatgggtttatagacattatgtgagtttcctgctatattaacatcatcttagactttgcaagcagagagtcgtggaatcaaatctgtgctctttcatttgctaastgtatgatgtcacacaagctccttaaccttccatgtctccattttcttctctgtgaagtaggtataagaagtcctatctcatagggatgctgtgagcattaaataaaggtacacatggaaaacaccagtcctggtgcagtgagagttcggtgcatactggttccttcccccttgaacagaagtcattagtgatatttgatctctggaactatatcagcaacatgtccatctcacttgctgctcaaaaccccaccatatatgtcttccctgacttaccctccaacatcatctctctccactcctgaatcttctcttttcatctcacctgtcccctactcggatttctgctttctttatgtcctgctacagggaaaatcacatattagcatttggggaattttctaaaactcagagctgaccatagtgaaaatagttccctagatccccaacccacaggaataatttgaagcttctcaatgtgacattctaagtcagagatggtcaaccagtattagcaaagggccagatagtaaacatgttcagttttgcaagcaatgtggtctctattgcaactatttaattccgccattgtagcaacaaagcagccacagacaatctgaaaatgaattatatggccatgttccgacaaaatgctatttatcagaacaggcagcccacgggctgtggtgtgctgacctctattctatgttgctctgaatctcgctcagtctactcttccattgccacatcctacactctatggaccccattctaatgcattcctccctgtctgtttgaatccacatccctcttccaagaagggctgtcaccatgtcatcatcgggcaccatctttttatccttccaaatgacctcaaaggtagatgtctaaattgagatggcagaaagaagctcacaatcatcctcccaaaaagcctaattaaaatgataaaaatcagtttaagaaaaccagccccaaattcatcagcagcacccaaaccattacagggggtgaaagcattatgccataagctcacaataccctttagataaacaaatggaagattctggtgttgcggtggctcacgcctgcaattccaacactttgggaggccaagcccgaaccctgctaggctgtgcccgcctccgcctcccctgcccatgggagtggcgggtgcccctccagggtccacctcacccagcccagacccccagggtgctctgccccatagatgggaggcaactgcccagggtgcaggggcagtgagggcgctgctggctgagggacatgccccatcctggggagggagggtgagtgtgtcagggaggggacagccctgcagttgtcagaggtggggctggagcagcacaggtttcctctggttacaaactactcctaggtgcatacctaacagaaatgcatacaaatgttcttcaaatatacagaagaatgttcatagcagcactaattgtaatgactgaaaataaaacctacccaataccaatcaacagtaatacagataaataaattatggattatttctgcaatggaagaagcaaataatgactccatacaacatgtatgaatcttagaaatataatgttgagtgaaagaacccagatacagaaagtacatactatgtgatgtacttgatacaaggtttagaaacacacataactaatctttggtgttcaaagtccagatactggtgactagtggggcggaggtcaggggctggtggttagtaacgactagaagggggcattagggagttctgggagattctggtaaggatctgttctttggggattttgtttgtttgtttttgttttgtttttgagacagaatctctctgtcacccaggctggagtgcagtggtgccatcatgactcactgcagccttgacctccctggttcaagccatctttccacggcagcctccagagtagctgggactacaggcgtgcaccatcacgcctaaataatttttttagttttgtgtagagacatggtctccgcatgttggccaggctggttttgaacttctgggctcaagcgatcctcctgcctcagcctcccagagtgctggaactataggcatgagccactgcacctagcccaggatctttttttttgatctggctactaattgctcagatgtcatcactctgtgaaaatttttttggtaaagcacttgtgatgtgttcccttttctacatgcatgttactctttaatcaaatttacattaatatttttataaattatccttgttagtatttagctctgatctccaaactgtcagcttccccaggtcaggaactgtactatgtccagccctgtatttttagagtccagccttggacacagcacatgaagtgtactcagtaaatctttgaaatgacctgaactcaatccaggtgggaaccacaaggttggactctgatgaggcctcacaagttacatttccagcccaggcctctctcctaagctctaatctcctatattctcctgcacatctctccccgaatgacctgcaggctccatgcttttaatgcaccccaaactggactcatctttccttaagcctggttgtcttccaggtttgccatccagaggtgtgaggattcccatctgcagtcacggcacctggtactcaatgcctgggtgtcttagtttgtttgggttactatagccaactaccataaactgggtggcttataaacaatagaaatttatttctcacagttctagagtctagaaagtccaagatcaagggaccagcagattccatgtctgatgagggctcattttctgattcatagacaatgccttctcgctgtgtcctcacatggtagaaaggcagggaagggagctctctcaggtcgcttttataagggcactaatcccattcatgggggcttcaccctcatgacctaatcacctaccaaaggccccaccttcaaataccatcacactggtgattaggcttcaacatatgaatatggggggacataagcattcagtctatctcaatgagcaaggagagcataacacccctgtgccgagttctaacctcccaccaagacaaaatttctggcctacattcatggtttcttgtgaaacaggcctccttaccttccctaatctctcagatcccaatttaggttcctctgcctgttcctctaagaggccactgtttgaaccacttcctgaatctggtgagtttatacctcttcctcctcctcctcccttctcctggctccctctcctctggggactgtgagctccactggccacagtatgaaatacctcaaggcccaagtacaaggtcttctccagcatgaagcatccttcaacttcgcactaccctgggacgaatctggaactccctcctctgggatcccacaggctcccatccatctctccaccacagctatactcccaggatctagaatctgttaaaattgtcttaacgaaggcagcagaaggcagcaattaaaattttcacttccttcacagtagccaaaaattggaagcaacccaaatgtccatcaactaatgaaggaataaacaaaatctggtacattcctgcaatgcatatcattcagacataaagatgggccgaagtacagatacatgctacaacgtgtatgaacttcgaaagcatcacaccaagtgaaagaagccagacactaaagatcacgtaccatatgattccattgatatgaaatgtctagaataggaaatacatttctggaggcagaaagcaggtcggcggttgccaggggcttcgaggagggcagtgactgcttagtgagtacatgctttccttttggggcaatgaaaatgtttagaaccaaacagaggttgtggttacacaacgttgtgtatgtactgaatgccaccgagttgttcactttaacatgttcattgtatgtaacgtgattttacatcaataaaaaaaaataataatttaagctttcaagtcagatctccagcatctgaacacctgcctcaccactgaacctcctgctacttccatttgcttatctgttaaatggggataatagcaccacttagttcactggttcatcctgaggattcaatgaatcaatgcttgacagagtggctggtgcatgccaagcccccagctcttgggggctggtcaaagtgaactcagccactagccaaattcttcaaggtaatgattcgattcactgaatgacctgcaggtttccagctatatccttgtggcgccaggcttttcacttgcaccctgattacatggctgaccctgtggtcacagggaaaactgacgtgcaagatagtaaaagtgaagtataaagtctatttttttttttttgagatggagtttcgctcttgttgcccaggctggcatgcaatggcacgatctcagctcactgcaacctccgcctcctggattcaagcaattctcctgcttcagcctcccaagtagctgggattacaggcgcctgccaccacacccagctaattttttgtatttttagtactgtcaggctttcaccatgttggccaggctggtcttgaactcctgacctcgggtgatctgcccacctcagcctctcaaagtgctaggactacaggcrtgagtcacagtgcccggccatataaagcctattttaagtctccatggccagagttttgttccacttctccctttccctcttcacccattcctgtaagtcaccaagttcctggcctgtccccttccccttactctcagatccaggtcccatcttgactcctcttccccagaacatggcaaaagcctcctccccagcctctgggctccagtcccaccccaaccagcccatcaccaaaaccatcagcaatgggagctttctaatactcacctctaaccctgtatctttcttgctaaatatcctcccatgcctgcctctttgcctcaagatgatgttctgactctagtgagagttattcaagcttttcccaggccaggaacagtggctcatgcctgtaatcccagcactttgggaggctgaggcaagaggattgcttgaggccaggagttaacaccagcctgagcaacatagagagaccctgtttctacaaaagcaaagaacaattagacaggtgtggtggcacgcacttatagtcccagctacttgggaggctgaggtgggaggatcccctgagccaggcgttcaaggttatagtgagctagatcacgccactgcactccagcctgggtaacaaagtgagaccttgtctaaaaaaaaaaaaaaggcctggtgtggtggctcacgcctgtaatcccagcactttgggaggctgaggcagggagatcataaggtcagcagtttgagaccagtctggccaacatggtgaaactccgtctctactaaaaatacaaaaattagctaggcgtggtggcatgcacctgtagtcccagctacgtgaggggctgaggcaggagaatcacttgaacccgggaggcaggggttgcagtgagctgagatcgcaccactgcactccagcctgggcgacagagcaagactctttctcaaaaaacaaaacaaaacaaaacaaaaaataactttttacaatctcaccctcagctaccacccctcacacatctcagccacatcctagagattgcatgtccctctgtgcctctccatgcttcattcatgtggttctgtctctttgcaatattgtcccctgccctccttctttgcagcacacactcatcctttgagagctggttcaaacatcacctcctcagacaagctgcattccctaccctgtcccctctcccagcccctgtactttcccacagcttggattagagcagtttatcaactgctgttggtgggccagttcaggttcttgactttgcggcacaaaagaatttgagagcgagtccaaagtaagagtaggcaaagaagtttattacaaagcgaaagtacaccctgagaggcagagggagggagagacagcctctagcatctcaaggtaattcctttcatgggaactatacatacatattcataaaatattggtgagtccagcatgaaaggcatgcactcagaatctatgtgctctaacacgcattgcatgtatcatt

SEQ ID NO: 5707 - DNA, 33703 bp, Homo sapiens
tcacccaggaccgaggtgcagtggtgcattcatagctcactgcagccttgaacatctagttcatacaattctcctgagtagctgggactataggcagatgccaccacgcccagctaatttttgtttttttttgtttttgttttttgtattttgttttttatagatgaggtattgctatgttgctcaggctggtcttgaactcctagcttcaagcaacccatccaccttggcctcccaagtgctgggattacaagtgtgagccactgcacccggcctttcgaggcaattttcttttggggtctgtctccctcccccaattgtgggcatggcttgttcttattttccgcaggaacttccatagtacttctgtggacacaggaggattggaaagatgttggtgggtgtatgaaggggacgtgaggacgcaggacccacgtgttgatggcagcagaggggacaccgaggagagagaacaagggaggaccgtgccacagaagccgtggcgtctctgcctggggctggcgtggttggagtctgtggagagtgccgcccctccggccagcccttggccctggcacatgctggtgacaccaggttctccagcaagcccccttcactgtctgctcccctccgagagcagcagcagccggtccggcctctgatggttttccaggggcggttgtgactgtcgaagtctgaccgtagcccatcctctttggatcgtctcccgcgaccttggttttccgcccacccggttcttttccgtccccactctggcgggtgcgctcgggattgtttttgcaggggggaagtgacatcatatggtgtcctgggctggaggggtgggggtggggaccctgcagttgcgtgtgctttgaattcagccgacggttgtacattccagtagccggcatctggcggtgaattcatcagccagtgtatcacccttgatctcaaacccagatgttgtgttcacagcagaagggaaagaaggaaaaacgaaatctgagacgcccagggagaggccgtggtttctgggctcagggcagttagaacgagagtctttataaagactccccctctcgcagctgcctctggctccttggggaaggggcagaggagcagagcagcccctctcgggggcatggacaggagatgggctgacacccaccccagtgcctaacaccaggcccagcacccagtaggtgttcagtaaacgtgtctgtgccacaattttcatttcttcccagattccttatgtctcttcgctttccccagccctgttcttcacatggcctgggactcggagaggccctccctcttttgaagtggcctgctttcccctacagaactggtggtccatcctggagctcagagtgcggaccattgccattggcatggaaatgtattccggagagctctctctccctcctcctctgtccaccactgggcattggaaactctccttctctgtgttcctatccatcgtctgtcatctygcctggattggatgctcctcccaggcaaggcctgctgtatgcaggattcaccctgtaccctctcttcacctgctgtcacctctgggcaacaacccccgacaggtacccgctgctctgagcaggtcagcggtgcagatcccgctatgccaactggtgtgcaccgatcagagctgtcagctggcccctctccttcatgtctgcggcgtgctggtgctttggggaaggttgccgtggaactggtccttctttgcctctcttgattcccattttccttctttcatgtaatttctcattttgcaaagtgggggaggaggtgcccacccccaatttaaagrgaccctgaagaatctgaattctgttccccaggggcagactaaagcagcccaggggagatggagatgccctcaggctctgctcctccaggcccctcacccccacttccctgcccctcacccccacttccctgcaggcatctggcggcctcctcgccagttcactttctagtcctaaccccacgtggctaccctggacccttgatttgaccagcctcctcttttctgacactttaaagaaggaaagtgtgtaatctgcagcccccaggcaaagctagcacgctgggaagctgcatcaaatcgagagtctgtggcctgctgaccaggaccgggtctgtgtacctgagtggcatgatgccaccgtcccaatccctcacccacgggagcgggagaattcgccctgcttgtctatgcgatgctcgtggtcctgaactgtacasgcattagttcccgggcaccgcagcctccacrccagcccctctaacagtcaccacgaccttgtgaagtgtcaagactgttgtcatcgtctctgtcttaggtgtgaacaactgtggctcagtgaagtcaaggagcttctcaaagatcacgcagccatccaggggtgaatgcaggatctctgtctcttgctgcctccttcaaataagtgcccagctgccacctgggagccttaggcgtttttgtaagagaacagcatgtgaacctcaatgcccatggtaggatgcaacattttggccgttttgaagtaatctttgcttattttctgaactccagtgacatgcttgttgagtgcctattgtgcgttaagcattgtgcggcttagtggaccattgaaaggcagctccaaggccgggcgcggtagctcatgcctgtaatcccagcacgttgggaggccgaggcaggcggatcacgaggtcaggagttcaagaccatcctggccagcatggtgaaaccccgtctctactaaaataaatacaaaaaattagccgggcatggtggcgcgtgcctgtaatcccagctacttgggaggctgaggcaggagaattgcttgaacccaggaggcggaggttgcagtgggccaagattgcaccattgcactccagcctggatgacagagctagactccatctcaaaaaaaaaaaaaagaaagaaagaaaagaaaagcagctccagaaatttccaaaataacatacagaattcagcagactgtaataaaggccggcttgctgctcctactggaactgttgattcctttggattctgctggcttgctttttttccttttctttcttttctttttttaaaagacggagtctcactctgttgcccaggctggagtgcagtggcatgatctcagctcactgcaactttcacctcctgggttcaagcgattctcctgcctcagcctcccaagtggctgggatttttgtattttttgtagagatggggtttcaccatgttggctaggctggtctcaaactcctgacctcaagtgatccgcccgcctcggcctcccgaagtgctgggattataggagtgagccaccgtgcctggccctggtttgcttgtgagctggtgactctgctacatgaagagcaaactttgaccaagttaatctggcacattgactaatttgcataaacatttttggtgcagcattgtcgtaaggtatatagattaggcagggagcaagagagccaaggacaaactgcacctgggccaccagcccaaagttgtcagcgtcatctcagctccatctggcaaagagttagtgagcaccaactgttctgcagtcagaatctagcctcaacctgttaggacctcccagggccctgagcagacaggtgtgcaggaactgacagcaggatggaaaagagatggggaatataccaagtgctgcagaaggacaggatttcccagaggaagacagaaaagggctattttagctgggtcttgaagaatgaagaaaagttctccaggcagagaggggagatggcatttggggcggaagaaacttgcctgttcaggctgggtgtggtggctcacacctgtaatcccagcactttgggaggccaaagtgggcggatcacttgaggtcaggagttcgagaccagcctggccaacatgctaaaaccctgtctctactaaaaataccaaaaaaaaaaaaaattagcctggcaaggtggcagttacctgtaaccccagctactcaggaggctgaggcaggagaattgcttgaacctgggaggtggaggttgcagtgagctgagatcaagccattgcactccagcctgggtgacaaaagtgaaactccgtctcaaaaaaatatatatggtaattagccaggcatggtggtgcccacctgtaatcccagctacctgggaagctaaggcaggagagtcatttgaacctgggagatggctgagattgcgccactgcactccagcctagcaggggtggggatgacagagcaagactctgtctaaaaaaaaaagaaagaaagaaacttgtctgttcagaggtgtggatgcacctgggcgtgttcagggcagacaagtattatgaagtggtagaatagtgggagcatgggtggggggtgttgggcacagcagctgaggcccctggctgacttcaggttgcaaaggcgctcatattttaggggagggcagggggcagccaaggatgatgtttgagcagaaacgaacgtgaataaaaaaagacagctggttgcggtggatgagaggatggttaggagggcactggaaatagggggccrtcagggcaaagccgtctgttctggagtggcctgccgggagacatttcctagatgtggcttttcaggatgaggcctggattagcctgggaaacaggaacctgtggcctcggccagtcatgactcagctccaacagaagaagaaagaagaaaggggtttgtgcccaggcgaggcagtggggctgtggtgtgggactctgatgccagcctgggatccagagagcattggtggggcccagggggatggacacagatggagcacccacacgcctgagcctccttgcccctgtgggaagagacagccctgcctaaggggttctaagagatttgagccgaccacgtggggtggggctggggctggggctaggaggctgcctggagcctggcgtggtctgctccttacctctctgttttgctcatatccaccgtaacataacacttacccagagtgaccctgaagagctgagtttgggagggcaaagcttttaaagccattaaaacagaccatgtcaccaactaatggccttgaaattaagaaagggagggctctacccaaccctgcccaagtgacagcatgaactactgatctgcttgtcctcaggttaccaggagtggaacagaatcctggcttaattgctaggagaaagccctgtgttgcatggcctgtcagcaacctcaggctccagaatattctggaattgccccagcccagcctcttccccaactcctttctgtttggttggggcttagttgggatcctctttccttctgtttgtccttcctcagcatctgtcccttgggtctgccagctgtgcctgccgatgtctcctttgggtgaaacttcctgcccctgcccctgttgtgcccctgatagactctgtgttactgtaaagaatcacccaggctgggcgcagtggctcacgcctgtaatctcagcactttgggaggccgaagcaggtggatcatttgaagtcaggagttcgagaacagcctggccaacatgatgaaaccctgtctctactaaaaatacaaaaattaaggttgggcactgtagctcatgcctataatcccagcactttgggaggctgaggcaggtggatcacctgaggtcaggagctcaagaccagcctggccaacatggcgaaacgctttctctactaaaaatacaaaaattagctgggtgtggtggcagctgcctataatcagagctacttgagaagctgaggcaggagaatttcttgaacccaggaggcagaagttgcagtgagccaagatcatgccactgcactctagcctggacgacagagtgagactccgtctgaaaaaaaaaaaaaattaaccgggcgtggtgacagacgcctgtaatcccagctacttgagaggctgaggcaggagaatcacttgaacctgggagatagaggttgcagtgagccaaaacggtgccactgcactccagcctgggcaacagmgcgagactccatctcaayaacaacaacaacaaaaattactcatagaacattttccaggtcaggaaagatgagaagagctggatagacctttccagatgtaagacccccaaasctaaatatgccgggtacgtttaaggcccctttaaggtggataactccccctctgccctcagcccagaaaagcttgtttccaataggccktggctggagggtggggaaatgtcccatccttcrcggaatgtgtgggattgtgggtcagttccatggggtacctgcttgccccagccaccagtgagtacccactggagagaaggaaaaaaaaagccaaaagcactcaagcatgatatcaacagatgagcttcagtcaaatcaatgactgcctcccactgttacagaaacygccttggtcacaagggactctgggcttctggcttgggcccctgtcaacaaagaagggattcttgttgaagaatcgtggaaggaggaggaggaggctgggcatcatctctcagcctggaggaggagacgccatgccgggggctgggatcaccatgccccttgcccgtctcgcaccttgctgctgtctstaaccccccagcacctcccgcaggcctggacrtcttatccctctccttagccccaggagcgtgtttcaggaactctmctcacctctgtgtcttgtgttttgcagtgatcagggccaaagcggtcagtgagaaggaagtggactctggaaacgacatttatggcaaccctatcaagaggatccagtatgagatcaagcagataaaggtaatagtggctgccggcatccygggctgcactgtgggcacagctgtggggtgttggggttggcagagagcctgggtccctggaacacgatctggccacctgtggactagagcagaggatgaggtcatcaagctgcaaatagatccgatttcccttaatcctcgaatgcctgaaaagttgtgtggagatgacatgctccccacaaattcaattccttcagaaacctgtccgggcgttgcggctcacacctgtaatcccagcacttcgggaggccgaggtgggcggatcacttgagctcaggagttcaagaccagtctgggcaacatggtgaaaatccatctctacaaaaaaccagccaggcatggtagcgcccacctgtggtcccagctattcgggaggctgaggtgggagaatcgcttaagcccagkaggcagaggttgcagtgagacatctcaccactgtattccagcctgggtgacagagtgagagcttgtattaaaaaaaaaaaaaaaaaatatgtggcagggagggcagggagggcagggcctggcctggggcaggagaggtgatgctattgtcattgacagtaactaacatggtctgtaagagagacgaaaattcatgtcgcaggtggagggacagccgtgtgatatggtggtagttgtagtcatcgatatttaattttgtcattaaaaataaaaagtaaaccaggcacagtgtctcatgagtatagtcccaggtgagtggatcacctgaagtcaggagttcaagaccagcctggccaacatggagaaaccccatgtatctactaaaaatacaaaaattagctgggcgtggtggcgagtgcctgtgatcccagctacttgggaggctgaggcaggagaacacttaaacctgggaggcagaggttgccgtgagctgagattgcaccactgcattccagcctgtgcgacaagagcgaaactccatctcaaaaaaagaaaaaaaaaaaagtagctgaaaatcaatgttatcagaaggtcagtggaatgcttcatcatcacatgtatgtcagtttaaggggatgacctagtctctcagtgcctgagtctctttctttacgaagcaggaaagaggatctgctcttacgacctcataaaggggtcgtgaaaaggccagtgccagtgcccaggaaatgcttttagccttttggcaaatgatgtcatttagtacagcatcaacataacctttcctggtacaagctggagtgtcactctcaagccatttgtcatgacatcaggcatgcttccattccatttgggtttgcttattgaaactcttcggggggaaaaaaacagcctccctgagtgctgagaaaatgccattcttcacctgggcagcaggtgcgttcctgaaaggctgtgagtaaatcacatgttgagaaagcaaactcttctggcccatggagttatgtcctaattcctgaggtgcctctctgctctcattgccatcaagtagacaatatttgaccaaaattcctggaaatataggttgggtggagtgacttatgcctgtaatcccagaactttgggaggccgaggcaggaggattgcttgagctcaggagtttgagaccagcctgggtaatagagcgagacctcgtctctgctaattaaaaaaaaaaaaaagccaagcatggtggcatgcgcctatagtcccagctactcgggaggctgaggtgggaggatcacttgagcctgggaagttgaggttgcagccccagcctgagcaacagagtgagaccctatctcaaaaaaataaaaaattcctggaaatatgcaaaagtcatggtccttcatggtggtccagagtcaygtggaggtasaaaagcccctccccatagattcagaaatgacctctttggggyggggggtgagggaacagaggtgttgtctgaggatgtcatgctccagatgacagtctttttttttttttttgagatggagtcttgctgtctcccaggctggagcgcagtggcacgatcatggctcactgcaagctccgcctcctgggttcacgccattctcctgcctcagcctcccgagtagctgggactacaggcgcccgccaccacgcccagctaaatttctgtatttttagtagagacagggtttcaccatgttagccaggatggtgtcgatcttctgacctcgtgatctgcctgcctcggcctcccaaagtgctgggattactggtgtgagccacttcgcccggcacagatgagtcttgtgctcacctgctgtgatctgccacactaaaagttgagtgactccaaagaatcactttgctataagaagtctttttcttttctttttttttttttttttttttgacggagtcttactctgtcatacaggtaggagtacagtggcgccatctcagctcactgcaacctccacctcgcaggttcaagcgattctcctgcctcagcctcccacatagctgggattacaggcgcttgccaccatgctcagctaatttttgtatttttagtagaaacagggttttgctacgttggccaggctggtctcaaactcctgacctcaagcgacctgcccacctcagcctcccaaagtgctgggactacagccatgagccctgagcccagctggaacggtcttttcctaacccatgtatttgcacttcctggtcctcttgggtgctggctgtaccccagctacaggttgtgccgcccagggtgttctggatgggaacggaattcaccaactgtgtggcctccctctgcttayatgtcctcctccttgtctttccagatgttcaaagggcctgagaaggatatagagtttatctacacggccccctcctcggcagtgtgtggggtctcrctggacgttggaggaaagaaggaatatctcattgcaggtgtgtatgagtggggccatcagccggaggctggcacagaagtggggctgttcctagaygcggtccagggctygtttcccaggctcggggggtggggaggcggagtagctgaggaacagtgaggcagggtacggagccytctcggccacttcccgtcagagaatgctagtgaatgttcactacctgccaatttcctgggaaatttgagattggtggacmaaaaaaagggagcatttttgccttttgttcctaaaagggaggcgagtgcrggatgctggagacatgcagggcagagaaaccctttctgccgtcgggagggccaaaagctcgcgtaacatctgtggatactatgcacgagacctgcttgacttattcattcatctgtctcctttttttattgtggtaaaataatacgtaacaaaatgtagccatgttaattaaccattttctttctttctttctttctttctttctttttttttgagacagagtgtcgctctgtcgcccaggctggagtgcagtggtgcgatcttggcttactgcaacctccacctcctgggttcaagcgattctcctgcctcagcctcccgagtagttgggattacaggcacacgccaccacgcccagctaatttttgtatttttagtagagatggggttctaccgtgttggtcaggctggtctcgaactcctgacctcaggtgatccacccacctcggcctcccaaagtggcaggattacaggcgcgagccaccgcgcccggccaaccattttcaagtgtacacttcagtggcattagatacattcgctattgtgcaaccatcaccaccatctgtctccacatcttcccaaaccaaaactccgtccccgttaaacactaactcccccttctctcttccctcagcccttggccacctccattttactttctgtctctgtggatttgactactccaggggcctcacatgggtggaaccctgcagtgtttgtcctctctgtctggcttatttcagtagcatcatgttttcaaggttcgttcacgttacagcatacatcagaatttccttactcttttttttgtttttgagacagagtctcgctctatttcccaggctggggtgcaatggcactatctcggctcactgcaacctccgcttcccaggttcaagcgattctcctgcctcagcctctcaagtagctgggattataggcacacgccaccacacctggctaatttttttttgtatttttagtacagacagggtttcaccacgttgaccaggctggtctccaacttctgacctcaggtgatccgcccacctcagcctcccaaagtgttgggattacaggcgtgagccaccacacccggcccaaaatgtccttactttttaaggatgaataatatttcattgtatgaatgtagcacattttgtttattgttgcatctctttgtttatagttttttggtttgttttttttttttttgagacaaagycttgctctgtttcccaggctggagtgcgatcatgactcactgcaacctcgatctcctggggtcaagtgatcctctcgcctcagcctcccaaagtgctgagatcaactacaggtgtgtgccaccacacccagctaatttttttattttttggtaaagaagtctcaccatgttgcccaggctggtcttgaactccgaggctcaagcaatcctcctgcctcagcctcccaaagtactgggattataggcgtgagccactgtgcccagcctatatttttattcctaagtaaaattattttcccttacttccttctacggcctcctctgcttgcccagctaggctgaaccacaggaggccaggacaggattctcaatctcagcactattaacatttggggatggaccattctttgttgtgggggcctaccttatgcattataggatattcagctgcatccctggcccccaccctctacatgccacagcacccgctccagtcgcggggtctctggacattgccacatgtgcccaggggaggtggggtagattgcccctgcttgagaaccactgggctcaaagagctttctgcagtgatggaagcggtctctgcaccatccagtccagcagcccccagccttgtggctcatgagcacccgagatatggctagtgcagcygaggagctgcattttaaattttatttcatttcaagtaattttagtataaatgtaaacagccacatgtggccggcagccgcagtctagcatggcactgactcagccagttaaggaacattattcccctcctccctggggaagtaggaatctgatcacaaacttaagaaaaaaagaatagacaaggcctggtgcagtggctcatgsctgtaatcccagcaatktaggaggctgaggcgggcggattgcttgaggtcaggagttcaagaccagccttgccaacatggtaaaaccctgtctgtactaaaaatacaaaaattagctgggcgtggtggcaagtgcctgtagtcccagctactcaggaggctgaggcaygagaatcatttgaacccaggaggcagagattgcagcaagctgagatcacgccactgtactccagcctgggtgactgagcaagaccccatctcacaaaaaaaaaagagaaaagaaagaagagacaagacaattcccctagcctggtactatagtttgttccaaaaggcaactgtaatcataaacatatactccaaatccaaatatccatgattgggggattttcttctggtttaggtgacatgtacttttttcccttctaaaaatcaaygtgtgcttagtgagcacctgttaggtgcccagccccgtgttagagacaatgggagattcccacggtgagatccttggctctggtcatcatggagcacacagatgttccgaatggggagactggaaaagaaagaaaatmgattttgcttgtggagaattgtgaatagtaagtgaatgcttagaaggtgcaaaaggggccgggcgaggtggctcacgcctgtaatcctagcactttgggaggccgagacgggcagatcatgaggtcaggagattgagaccatcctggctaacacagtgaaaccccgtttccactraaaatacaaaaaaaaaattagccgggcgtggtggcgggcgcctgtagtcccagctactcaagaggctgaggcaggagaatggcgtgaacccgggaggcggaacttgtagtgagccgagatcgtgccactgcwctccagtctgggcgacagagtgagactccatctcaaaaaaaaaaaaaaaaaaagaaggtacaaaaggaagagagactctcacaggtccaagggtctagacagacttgctgctggaagaaggtggtgtccttgcctatggatggggaggaggtcattgcagggaggaagatgcagggctgtgagttgggcagggaagactcctgttatctccccttgggtaagatcttccctcccttccttaacatgctcacagctcctgctttgctgggtatctcggtcatcaagacttctatccctctccttggggataataggagacttcccccccttttaagatgcatttctggacttcctaaaatgttttattatgagcacttttcttattctcattccaagacagagtctccctctgttgcccaggctggaatgcagtggtgtgatcttggctcacagcaacctctgcctcctgggcaattctcgtgcctcagccacccaagtagctgggattacagatgtgtgcccccatacctggctaatttttgtatttttagtagatacggggtttcaccatgttggccaggctggtcttgaactcctgacttcaggtgatctgcccgcctaggccttccaaagtgctgggattacaggcgtgagccaccgcgcccggcctacaattcagtggttttagtatgtcacagagttgtgcaaccatcactacagtcaaaaagaaatcctgtattcttgagctattaccctcctgactcccctccccctcccccagccctaagcagccactggtatacttcccgtctctatagatttctctatgctgggctttcctgggaacggaatcatacgtgtgaccctgtgtaaccggcttctttcgtgtttccaagggtcatccatgttacagtgtgtatcagaatttcattcctttctatgactgagtattccactgtatggatagaccacgttttgtttatccggtcatcatttgatgtgcatttgggttgttgccaccgtttggccattgtgacaaatactgcaatgaacattggtgtgtgagattttgcagggacctgttctcatttttcctgggtgtatccctggcagtggaattggtggggtcgggggtggggaggggttgggtgactttaggtttaaccatttgaggagctggcagaccgttttccaaagcagctgcaccattttacacgcccagtattatctatgatttttacaataagaaaaaaaaaatcaaatggagaagggtagagggacaaaaaccacctgtggtgcaaagatcttaccagctaactaatgccctcaaaaaaaacacagaggaggcaggagagctggggtggccgcacagcacgcacggtggcgcgtggcagaggcatggtctgcagtgtggcattcgggggctgctgcagctgtgcacagaacagagcacgggaggaaatttcccagcgtgtcagcatctgctgtgtctccttttcagttctttcctgtattaaacctttaaaattatggcatttattacgtttgtcatcagaaaaataaaatctggagagacaagaaaggagacagaatcccccgtggtgcagggaacttacttccagttttctgcatcctgtttgttcctatccacagggaacagcctttaaagtaagtcccagccgtcccagctcagtttcgtcacactgccctctaggggctttctggccaaactgcagcgctgcggaaggactcttgggtgcaaaagtgaccttggtctgagccagcaccgstgtccaaacatacccagctgaatcctcgcccatgctgaagctctctgtttgtttttgtttttgttcgagatggagtctctctctgttgcccaggctggartgcagtggcacaatctcgggtcactgcaatctctgcctcccgggttcaagcagttctcctgcctcagcctcccaagtagctgggattacaggtgcccaacaccacgcccagctaattttttttttttttttttgagacagagtttctgtcttgttgcccaggctggagtgcaatggcgtggtctcaactcaccacaacctctgcctcccgggttcaagtgattctcctgcctcagccttccgagtagcagggattacaggcatgtgccaccacgcctggctaattttgtatttttagtagagacgggatttctctgtgttggccaggctggtctcgaactcctgacctcaggtgatccrcccacctcggcctcccaaagtgctgggattacaggtgtgagccaccgcacctgggcggcattaagtacattcacagtgttgtgtaactatcactatctatttctagaagtttttcatcatcccaaactgaaactctctccccattaaccaataattccctgttcctctgtttgcccagcccctgacaaccacctttctacttcgtctccatgaatttgcccattctagacacctcgtacaggtagagtcatacctccttccatagctgaagcattgcacttagcataatgtcctcaagttcatccatgttgtagcatgggtcagattttattttattttatttatttatgagacggaggcaacaaagcccaggctggagtgcagtggcgcgatcttggctcactgcaacttccgccccccaggttcaagcrattttcctgcctcagcctcctgagtagctgaggttacaggcatgcaccaccacgcccagctaatttttgtatttttttagtagagacggggtttcatcatgttggtcaggctggtcttgaactcctgacctcaggtgatccgcctgccttggcttcccaaagtgctgagattacaggcttgaaccactgcacccggctggtagattttatttctttttatgtgcatacattttaaagtttccaaaatatgtaatactcttctaagttgaattctatatatgttttcaaattgttaacatttccattaactttttaactcagatactacttagtatctcaaggaggaggcacgaggttttgatgaggacacagaactaaaggtgccaagtgcaaacagtttattgcataaagaaaataaggaaatgggctgaccatagtggctcacacctgtaatcctagcattttgggaggctgaggcaggaggatggcttcaggttaggagttcaagatcagcctggacgatatagcaagaccctatctctacaaaacaggaagggaggaaggaaggaaggaaggaagggagggaggaagggggagggaggcatggaggaagggaggaagggaaggagggagggagtgaagggagtcagggagagagggagagaggcagggaagaaaggagggagggaagaagaaggaaggaaggaaggaaagaagagatgagctgggtgtggtcatgtgcacctgtagtcctagctacttgggaggctgaggcaggaagatctcttgagctcaggcatttgaggctgcagtgagctaggactgcaccactgcactctagcccaggtggcagggcgggaccctgtctctgttttagaagagaaaaagataacgactaagtgtcatgaaaagatgtgaagaaatacaatgagatgcccgagtgaaggctctgaaaacacctgctcgagttcgaatgtgtgctctgacacctgactcgttaatgtccttggccaagtaactttacctgtctgtgcctcccatgccgatccgtacrtgggggatgatgacagtagtatctgccccacgaggggttgttgagaggatgaaagtgggagtaggagaccagaaatgatkatcacagagatgctggttatcttggtcaggccccactcaagggtagctgataattttatgtcttacactggagatgacagtgacccatacacgcagcacagcactgcatgaaaagctggtgagtcgatacagagagtcatactgaaggtctaaggagggctagggtagcctgtagcagaatgagcgtgaaggctctgctgaaagggcattgctccctggacctgtggcgggatcctcggtagaaagctgacattgaaagattttgaagagctttagttaaaaagttaaaaacagcccagcgcagtggctgacgcctgtgatcccagcactttgagaggctgaggcgagtggatcatgaggtcaggagattgagaccatcctggctaacacagtgaaatcccgtctctactaaaaatacaaaaaattagccaggcatggtggcgggcgcctgcagtcccagctacttgggaggctggggcaggagaatcacttgaacccgggaggcggaagttgcagtgagccaagattgtgccactgcactctagcctgggcgacagagcaagactgtccccccacccaaaaaaaataaataaaaaataaaaataaaccaatgttggcaaggctatggagtaaagggaacgcttaggaacgcttatgcgctgttggtgggaatgtaaacgagttcacccactgtggggcacactttgtagatttctcaaagaactgagaaagcaactagcatttgacccagcaatcccactgctgggtgtatacccaaaggaaaataaatcgttcaacggcactgcgcccgtatgttcattaccgcactatctgcaatagcaaagacacagaatcaacccaagtgctcatcaatggtgacttggataaagaaatgtggtgtatatatactacggaatactacgcagccgtgaaaaggagggaaatcatgtcctttgcagccacatgagtgcagctggaaaccattatcctaagggaactagtgcaaaaacagaaaaccaaataccacatgttctcacttaaaagtgggagctaaacattgggtacacatggtcataaaaatgtgaacaagagacactggggaatacaaggaggtgggagggaggaagcaggataagggctgaaaaaattctacctattgggcgctatgcccactacctgggcgatggatccgttcatatgccaaacctcagggacacacaatatacccatgtaacaaatctgcacatggacttcctgtttctaaaaatcaacaaagattgtgagacctgcccagtggccagctggctgtgtatcttctccaccaatgaggctgcattacttcatcctcctctccctgggagggggagcaggggtgargctgttaatggccacagtggctgactcacctcatggcgagaggaacctctctcatctgacttctttcccagccttggtcagatgactccacattgaatctggcatttatttcccgaggcaggaacctagatccagtttgcctcgagtcaggatagaccctttatccaggggctaaccagaaatcacagggcacagtgaaccactcagctctggctggctgtggccagtgagtgaccgcatggcctgagcgggccacctcctcctggaccgatgactcagtctcacgtgtcgagtcgggcaccaggagactcatacagagttggccctgtaattttcttctacattcctcttctccaaaaggaaaaataaacatacaacccttcgttacaaattttaattcccggttttctgtaacccagactcatgcctcgcttttctcggagacagacataagtagaacatcgctgcagatgctcacggtgtgtacacccaaccaagtcttaatcagaccagaggcggtcctctcttcacatttatacatgacagccacgttcatgttagcccaataactaggaccattgaaaagatacaattttttggctgggcgcagtggatcacttgaagtcaggagttcaagaccagcccagccaacatggtgaaaccgtgtctctactaaaaaatacaaagattagccatgggtggtggcgcatacctgtaatcccaattttttgggaggctaaggcaggagaatgcttgaacctgggaggcagaggttccagtgagtcgagatggcaccgctgcactccagcctcggtgacagagcaagactccgtctccaaaaaaaaaaaaaagaaaaaatacaattttcacttcatctcttcttcctgccattgcttacctcctgaggaagccagaattggtggtaaaaggccaaaagagaagatggcaggaaaaggcagaatgtgaagcatatcattagaacaagcacgggtgtgtctcatcagtaaacttattgagcaattactatgtgcagggaactgtggaaacaaaagggttaagacacagcccttactctctatacgtactctctgattaaggagcgagatgcagaagaaaggcaaatctaatagaaagtgggagttaatgctggtcaagtgatacatacagtggaaatcaccatagaagctgggaagccaggatagagcttcagcctgtctgtagtggcaggtgcccaggctggacagggaaggggctgcggtatacctgtatgggcgccaaatgccagaatcaaccaggatacaggaatgggttcctttccatctgtctgttttgctccttcctgatctattctgaactcacagaaaatagctataggtctagtggggaaagttatatatctaattttgattttttttttttttttgagacggagtcttgctctgttgcccaggctggagtgcaatggcgcgatcttggctctttgtaacttccacctcccgggttcaagcgattctcctgcctcagcctcctgagtagctgggattacaggcatgcaccaccacccccagctaatttttatatttttagtagagacggggtttcaccgtgttggccaggttggtctcgaactcctgacctcaagtgatctgcccaccctggcctcctaaagtgctgggattacaggtgtgagccaccatgcccagctagttttgaattgtttaaggccacccaaacatttaccttatgaagttataggatttggaataaatgttacaggagtaattctactttctcatcctgttcctcacctggaatgtcacataagtctaaacggagaaaaggacccgaagataaaggaacagctagaacaggaagtgcgagcataagaattcaaacccagggagctggcacaatgagtgccccgtgcccaggacaatggaggccacttgtgtctgcttggagccccaggcaagccatccacatttccatggcacaggggtgcagtcgatgagctgcattagtccttcgctgggctgtgtttctattagtggatcctctgaggctggtgctgtgcctgagatcattaagtcagatgcgctgaaactttgtcaaacaaaagtgcttagggcacagcctgaggctctgtctgcttctcaaggaattgcccatcagtctctgccaggcgtgggtgctcatcactgacacctgtgtctcttcacaaggggctgttgtagcaggagggatgaggttttttttgtttttgtttttgttttttttgtttggaagacagagtcttactctgtcacccaggctggagtgcagtggcttgatcttgactcactgcaacctccacctcctgggttcaagtgattctcctgcctcagcctcctgagtagctgggactacaggcacccgccaccacacccggctaattttttgtattttttttattttatgtatttatttgagatggagttttgctcttgtcactgaggctggaatgtagtggcatgacctcttctcgctgtaacctctgcccactgggttcaagcgattctcctgcctcagcctcccgagtagctgggattacaggtacccacgaccatgcccagctaatttttgtatgtgtagtagagayggggtttcaccatgttggccagactagtcgcaaatgcctgacctcgagtgatgtccctacctcagcctcccaaagtactgggattacagccatgagccaccatgccctgcctgaaagattagtttttattttatttattttttatttattttcttttttgagatggagtctgtctctgtcgcccaggctggagtgcagtttgcaatctcggctcactgcaacctccacctcccgggttcaagcgatcctcctgcctcagtctcctgagtagctgggattacaggcatgcatcaccacgcctggctatttctttttgtatttttagtagagacggggtttcgccatgttggccaggctggtctcgaactcctgacctcaagtgatccgcccacctcagcctcccaaagtgctaggattacaggcatgagccatcgcacctggcctgagggatgagtttttaaatgacttccatagctgtcattaggttctgtcagccactggaacacactgctttgttcttttcctcctgcttggaaaacgccaaggctattgccaatgtagtatcttcagcaaaggaaggaggcagctgagtcaggagccggaagtacagaaagaagccacagctcatcatgcctgatgaagggaattcagagcagattcctaattttcaaaaattccatgctttggctcttcataatggaaaaatgcagaattataagtttaaactcaaatgggagaagcacctgtgaattaatattttgtgaaaaacaaaacaggaaacaatataatctacatactgcatgacgttttatgtgtgaagatgcacatagaagagaatattggccgggcgcagtggctcacacctgtaatcccagcactttgggaagtcaaggtgggaggatcacttaagctcagttcaagaccagcctgggcaacatggtgaaacatcgtctctatcctttttttagaataaaatttaatttaaaagaatattggggccaggcgtggtggctcatgcctataatcctaacactttgggaggccaaagtgggggtattgcttgagcgcagaagtttaagaccagcctgagtaacatagcaagaccctgtttctacaaaaaaaaatataaaaaattagcagggtgtagtggttcacacctatagtcccagctattcaggagactgagacgggaggatcgcttgagcttgggaggtcaaggctgcagtgagctatgatcataccattgcactctggcctgagcgacagagcaagactgtctcaaaatcaatagtggaatattggaaggaaatacatcaaaatattagctgtgggtaatgaaagtagggaatttttttcttttcttttttttttttagactgagtctcgctctgtcgcccaggcccaggctggagtgcagtggcaccaactcggctcactgcaacctccgcctcccgggttcacgccattctcctacctcagcctcctgagtagctgggactacaggtgcccgccagcacgcctggctaattttttgtatttttagtagagacgggggtttcaccgtgttagccaggatggtctcgatctcctgaccttgtgatccacctgccgcggcctcccaaagtgctgggattacaggcatgagccaccgcccctggccaggaagttttttctttgtttccaatgtttaagtttctgtcagtgaacatgcattatggctttctttttttttccactttttatttttttgagacggagtcttgctgtgtcacccaggctggagttcagtggcgcgatctcggctcactgcaacttccgcctctggggtgcaagagcgattctcctgcctcagcctcccaagtagctgggattacaggcgtgtgacaccacacccggctaattttttgtattttagtagagagggggtttcatcacgttggccaggctggtcttgaactcctggcctcaagagatccacccgcctcagcctcccaaagtgctgggattacaggagtgagccaccgtgcctggccacccactgtgttttaactcagaatagacagtgcacaggattgttgcaacgaaatcccagcgcccctgcgccgggtggaggagctgggcaggaggaggacttttccctctccctgagctcggtgatccccgtctctccgcaggaaaggccgagggggacggcaagatgcacatcaccctctgtgacttcatcgtgccctgggacaccctgagcaccacccagaagaagagcctgaaccacaggtaccagatgggctgcgagtgcaaggtaagcaggtcctgcctctgctggagcatcgcctcctcccagtgtctccagatggacggcagggattttgatccctggctttccaggacccgttaatccccggctcctgatctaagaccaggctctgggaaggtagagtcatcccaagagtaaggctgtctggctggggacagagcctttgacccctggtccctggagagccctgaggcacatctctgacaggggatgtctggaggccgggcgctgcggctcacgcctgtaatcccrgcactttgggaggccgagataggtgggtcacttgaggtcgggagttggaaatcagcctcaccaacatggcgaaaccctgtctctacaaaaatacaaaaattagccaggtgaggtggtgcacgcctgtgatcccagcaacttgggaggatgaggcttaagaattgcttgaatgtgggaggtggaggttgcagtgagttgagatcacaccactgcaccccagcctgggttgacagagtgagactctgtcccaaaaaaaaaagagggagatgtctggaaggctaggagatttgagagtaagagcatgaattcagctctgttacctgtagcttccagaaaaaggagctgtatggggagagagaatatggtcccatggagaattttctacaaatgtgcaagtgcaaacgcctgtgtggcttatgagaaggcactgcaggccttacgctktttccaacattcccgacattttcacacctgggttggtgtctatgtggggtctgtgtgttgagaayacctgaacacctgctcctcttaaaatgagcccggaggttktgccaggcacagctggagcagtgcagcgcctagatgtggctgtggaaggtgagattaccgcctccagggctcccaggctggctcctaccctgtgggctcctagcaccctatccccaccctccctgcaggaagcatggctgagtgctgggcacctcccaccctgggtcactcccagtgagtctgggaccaggagactctggtgaggctgtggggattggccttccctggggagctgcctggggctgccctccctcctgacggcccccagccccttctccgcatgttcaaaacaggaattctgaactcatagtctccagccacacgtatgttaagcgaaactcctctgtgcccagcatgaaatcaaaagcaagtttttcctttttctttccacggtggtgaaggcggtcatcctcttgtagcctagggttccttggccaaattgctagttgccgatgacctcggggctcggcttgcgagcaacactgggctggaatctgtctccaggaaacccaggcccttttattgttgctgtgtcccccagagggcagggccaagctgaggccattctgtcatgctcaggaaggtagaagatggcccaaagggaagcacacctgcagtaggagggggggcagcggtgggcagggcacagcttccctgcaggttagaccccctcgcaggccagctgcctgcycctgcaggaaccgtgggtctcgggagaggctgccatccctgcacatgacaggtaggcacattgccgggttctggacatgcccccagagcagcctctgcccaccccttcctgggtccctgactccgtccccctccgtgtgcccctccccagatcacgcgctgccccatgatcccgtgctacatctcctccccggacgagtgcctctggatggactgggtcacagagaagaacatcaacgggcaccaggccaagttcttcgcctgcatcaagagaagtgacggctcctgtgcgtggtaccgcggcgcggcgccccccaagcaggagtttctcgacatcgaggacccataagcaggcctccaacgcccctgtggccaactgcaaaaaaagcctccaagggtttcgactggtccagctctgacatcccttcctggaaacagcatgaataaaacactcatcccatgggtccaaattaatatgattctgctccccccttctccttttagacatggttgtgggtctggagggagacgtgggtccaaggtcctcatcccatcctccctctgccaggcactatgtgtctggggcttcgatccttgggtgcaggcagggctgggacacgcggcttccctcccagtccctgccttggcaccgtcacagatgccaagcaggcagcacttagggatctcccagctgggttagggcagggcctggaaatgtgcattttgcagaaacttttgagggtcgttgcaagactgtgtagcaggcctaccaggtccctttcatcttgagagggacatggcccttgttttctgcagcttccacgcctctgcactccctgcccctggcaagtgctcccatcgccccggtgcccaccatgagctcccagcacctgactccccccacatccaagggcagcctggaaccagtggctagttcttgaaggagccccatcaatcctattaatcctcagaattccagtgggagcctccctctgagccttgtagaaatgggagcgagaaaccccagctgagctgcgttccagcctcagctgagtctttttggtctgcacccacccccccaccccccccccccgcccacatgctccccagcttgcaggaggaatcggtgaggtcctgtcctgaggctgctgtccggggccggtggctgccctcaaggtcccttccctagctgctgcggttgccattgcttcttgcctgttctggcatcaggcacctggattgagttgcacagctttgctttatccgggcttgtgtgcagggcccggctgggctccccatctgcacatcctgaggacagaaaaagctgggtcttgctgtgccctcccaggcttagtgttccctccctcaaagactgacagccatcgttctgcacggggctttctgcatgtgacgccagctaagcatagtaagaagtccagcctaggaagggaaggattttggaggtaggtggctttggtgacacactcacttctttctcagcctccaggacactatggcctgttttaagagacatcttatttttctaaaggtgaattctcagatgataggtgaacctgagttgcagatataccaacttctgcttgtatttcttaaatgacaaagattacctagctaagaaacttcctagggaactagggaacctatgtgttccctcagtgtggtttcctgaagccagtgatatgggggttaggataggaagaactttctcggtaatgataaggagaatctcttgtttcctcccacctgtgttgtaaagataaactgacgatatacaggcacattatgtaaacatacacacgcaatgaaaccgaagcttggcggcctgggcgtggtcttgcaaaatgcttccaaagccaccttagcctgttctattcagcggcaaccccaaagcacctgttaagactcctgacccccaagtggcatgcagcccccatgcccaccgggacctggtcagcacagatcttgatgacttccctttctagggcagactggragggtatccaggaatcggcccctgccccacgggcgttttcatgctgtacagtgacctaaagttggtaagatgtcataatggaccagtccatgtgatttcagtatatacaactccaccagacccctccaacccatataacaccccacccctgttcgcttcctgtatggtgatatcatatgtaacatttactcctgtttctgctgattgtttttttaatgttttggtttgtttttgacatcagctgtaatcattcctgtgctgtgttttttattacccttggtaggtattagacttgcacttttttwaaaaaaggtttctgcatcgtggaagcatttgacccagagtggaacgcgtggcctatgcaggtggattccttcaggtctttcctttggttctttgagcatctttgctttcattcgtctcccgtctttggttctccagttcaaattattgcaaagtaaaggatctttgagtaggttcggtctgaaaggtgtggcctttatatttgatccacacacgttggtcttttaaccgtgctgagcagaaaacaaaacaggttaagaagagccgggtggcagctgacagaggaagccgctcaaataccttcacaataaatagtggcaatatatatrtagtttaagaaggctctccatttggcatcgtttaatttatatgttatgttctaagcacagctctcttctcctattttcatcctgcaagcaactcaaaatatttaaaataaagtttacattgtagttattttcaaatctttgcttgataagtattaagaaatattggacttgctgccgtaatttaaagctctgttgattttgtttccgtttggatttttgggggaggggagcactgtgtttatgctggaatatgaagtctgagaccttccsgtgctgggaacacacaagagttgttgaaagttgacaagcagactgcgcatgtctctgatgctttgtatcattcttgagcaatcgctcggtccgtggacaataaacagtattatcaaagagaacgtgggctctctccgtgtggctgtatccgatgttcagaacggccacttcctagctcaagaatgggaatcagcctctgcaaggagcctctcctgtccggcgggagggggcgccctgtgtcctccagagaaacaaggccagtgagctctgagtcaaatatgggatgcagaccaggtgtggtggctcacgcctgtcatcccagcactttgggaggccaaggcgggtggattgtttgtgcccaggagttcgagactagcctggccaacttcgcaaaaccctgtctctgcaaaaaataggcgtggtggcatgtacctgtggtcccagctattcaaaaggctgagataggaggattacttgaacctcggaggcagaggttgcagtgagctataattgcaccactgcattccagcctgggcaagagagtgagaccctgtctcaaaaaaaaaaaaaaagaaaaaagaaaagaaaagtgcgatgcagtggcagagacggggcagcagagatgggacaggtaaaagcaaatgtggtttccttaggtggatgaaggggcagaagtgtaggagagggtccccttcattcaacacatacctctggctttttattatagagacacgcagagccatgcacccgtctcacagcttcgacactgagggcttcatggccagctttagacctacactcagtcttcacccaccattcacgaaattatttggaagaaaaaattccaggcatgaagcagtctcatttataaatattccagtacacatatgtttaaaaaataaaaactactttttttttttttcagacggagtctcgctctgttacccaggctggagtgcaatggcatgatcttggctcactgcaacctctgcctcctgggttcaagtgattctcttgtctcaacctcctgagtagctgggattacaggtgtccgccacaacgcccagctaatttttgtatttttacaaaaatacaaaaagagacagggtttcaccatgttggtcaggctggtctcgaactcctgaccttgtgatccgcccgcctgggcctcccaaagtgctgggatgacaggcgtgagccaccgtgcccagccaaaaaataaaaactacttttaaaacctttttccaggccaggtacggtggctcacctatagtcctagcactttgggaggccaaggtgggcggattgcttgagcccaggagttcaagaccagcctggacaacatggagaaaccccaactctacaaaaaatacaaagattagctgggtgtggtggtgcatgcctgtagtcccagctactcggggggctgaggtgggaggatcacttgagcccaggaggtggaggttgcagtgagctgagatcgcaccactgcactccaatctgggtgacagagtgagatcctgtctcaaacaacaacaacgacaaaatccaaaatagctttatcacatgtcaaaaacttacttagaattcatcaatgtcatcaaatatccagtcagtgttctaacatctctgactgtctcatagatgcttttgcgtggtttatgggtttgaatcaagacccaaataagatccatccattgcagttggttgatctaactcctaggtctctctctctctctctttttttaaataactattgaagctcccccttctttctttcttttcttttctttttttttgtttttttttttttttcagacagagtctcgcctcattgcccagtctggagtgcagcggtgtgatctcagctcaacgcaacctctgcctcgagagtagctgagattacaggtgggcaccaccatgcccggcaaattcttgcatttttagtagaggcggggtttcaccgtgttggctaggctggtctcacacccctggcctcaagtgatctgcccacgttggcctccggtaagccacagtgcttggcctcccgggtctctcttattctccaggttgtttctccctgcccccaccctatccttgtgctgagaaagatgttcccatcataattcaaacttcaatcaaaagtctcataatacttcaccatatgaaattttttttaatttaattttattttttttgagacagagtcttgatctgtcgcccaggctggagtgcagtggcgcgatctcggctcactgcaacctccacctcccgggttcacaccattctcctgcctcagcctcccaagtagctgggactacaggcacctgccaccacgcctggctaattttttgtatgtttagtacagacgaggtttcaccatgttagccaggatggtctcgatctcctgaccttgtgatccgcccgcctcggcctcccaaagtgctgggattacaggcctgagccactgcacccagccatggacattcttcaatggtgtatttgaacagttagctgccccctggcccatgtgcacactgttgtgcagaatctgttattccaggggcagccagaagaatcgtgtttcctactgtgtgcagttactgcccaaaaagcaagaacaaacttacgacatctgaagtttgctccaatgtcacattaaatgtgatccacttaatatctactgcagaaatatttggattatttcttctgtatgtccaaatatgtagggaaaatggttgagtggtatactataataataatatcaaaactttccatttcatacaaatgaacttacttggcatttgcagcccacatttggagttttagtaagcagcacgccaggtgatttatacccttttcatatatttatgcatttaagtcaaacttaaagtcattatggaaaatttaaaacatatacaaaaatgcagagaatggtatgaccaactccatgtgtctatgatctgttttcaacaattatccatgttttgctgatctttgaaaacgatttaagattagtttgtaggccgggcgccatggcttacacctgtaatcccagcactttgggagggcaaggcgggaggatcacctgagttcaggagttcgagaccagcctggccaaaatggcgaaatcccgtgtctactaaaaatacaaaaattaggcctggcacggtggctcacacctgtaatcccagcactttgggaggccgaggcaggcagatcacctgaggtcaggcgttcaaaaccaccctggccaaggtggtgaaaccccgtctctactaaaaatacaaaaattagccaggtacagtggtgggcgcctgtaatcccaggtactcgggaggctgatacagaatcgcttgaacccgggaggcggaggttgcagtgagccgagatcatgccattgcgctccagcctgggcgacagagcgagactccatctcaaaagcaaaacaaaacaaaacaaaaaaattaactgggcatgctggtgcacgcctgtagtcccagctactcaggaggctgaggcaggagaattgcttgaacccaggcagcagagattgcggtgagctgagatcgcaccactgcactccagcctgggcaacagagcaagactctgtctcaaaaaaaaaagaaaaagaaaaaatcagtttgtagactcacatatggggtaacgacattgttagggacacaactagacaccattatttcctctcagtcttgtttaccctgtggaagaaaaatgcatggggacaggtgaggtcagcctcaacccatcaacagagatgtgtgcacccatgatggaaaagcagcaagagaccctgcaagatccaatctgaagggacatggagcctggtggtggagctggggagccaccaggactggttaaagaactttggagctggccgggtgcggtgactcctgcctgtaatcccagccactcgggaggccgagccagaagaatcacttgaaccccagaggtggaggttgcaatgagccaagatggagccactgtattccagcctgggtggcagagcgagactcgatctcaaaaaaataaataaataaaaataaaatactttggagctgatggaagaacttgagcctagttataggacacacagtagcagtatcttttccctcctaatttttaatggatatttttacctgatctaactttaaaaaataattaaatccaaacagtggtaattacaatattttactagcatcaattttatgataggcaatttgctgtgactatagattttttttcttttttttttttttgagacagtctcgctctgtcacccaggctggagtgcagtggcacaatcttggcttactgcaatctccacctctggggttcaagcgattctcatgccacagcctcccgagtagctgggactacaggcacctgccaccacacccagctaagttttgtatttttagtagacacggggtttcaccatgttggccaggatgatctcgatctcttgacctcatgatctgccctctcagcctcccaaagtgctgggattacaggcatgagccaccgctcctggccaccttctaaccatttttaagtgtacaattcagttaattacacttacaatgtttttatggccatcaccactatttccaaaactttttcaccaccacccagaaactctgtaaccatgatgcaataacccccgtcctcctcctcctagcccctggtaacctctagtctactttctgtctctatggattttcctattctaaatattctatcatcctgcatgattccacctatgttatgtccagctcactttgcacgtcttcaaggtccattggtattatagcatggatccatgcttccttctttttcatggctaatattccattgtgtgcatctattacattttgtttatccattcatccatcagtagacacttgggttgcttccgccttttggctattgtgaagaatgtggctatgaacatgggtgtgcaaatatctgtgtccctgcttttaattggcgtatatatacacacacacttagtatatgtatatagatatctatacactatagatatatgtagatatatatctactatagatatatagagccatatatgtatattcaacattaacctacattaatacaacattaatctttgaaggaaaggacattaagcttgtttcaaattcagcttctctgattcagcatacatatatctaaactactatatatttatatatctatatatacagtatatatgtatatacacaatattatgtatatttgtatatatgtagtattatgtataattattgcaatacagtccaggcgcggtggctcacgcctggaatcccagcactttgaggggccaaggagggtggatcacctgaggtcaggggttcaagaccagcctggccaacatggtgaaatcgcatctctactaaaaatacaaaaaactagccgggcatggtggcgcgacacctgtaatctcagctactcgggaggctgaggcagaagaatcccttgaatccgggagacagaggttgcagtgagctgagatggcaccactgcactccagactgggtgacagagcaagactccgtctcaaaaataaataaataataaaattacaatataattatacataatagtacacaaaaaattgtattgcaataattaagtctggaagcataatatatatatagatagtatctatatctacatacatagtatatacgtatatctatatgtatatactatgtatatatactgtgtatatactatgtatatatactgtgtatatactatgtatatatactgggtatatactatgtatatatactatgtgtatatactatgtgtatatactatgtatatagtgtagacatatatactatgtctatactgtatacatagtgtatatatacagtttatatagtatgtatagatagtatgtatagtagtcctatgtttcgcttttggaggaagcactgtcctgttttctgcagtgactgcaccattttacatgcctaccagcagtgtctgagggttggtccgctctaaagttattcttcctacacctcccaaagtggaattccaaaaccgccttgttagaccagcctgac

SEQ ID NO: 5708 - DNA, 66916 bp, Homo sapiens
  misc_feature (1)...(66916): n = A,T,C or G, or insertion/deletion polymorphism (see Tables 1-2)
aattatgtaaagtggttagaaatgggctagtgcatagtaaacaatgcagaaatagtacctgctatttttttaaactttttttcaaggacccgttgctttgctttgatttgccttccacttacccatttattcatttttttgagatagagtctcgctctgttgcccaggctggaatgcagtggcacaatcttagctcactgcaacctttgcctcctgggttcaagtgattctcctgcctcagcttcccgagtagctgggattacaggcacctgccaccaggcccggctaatttttgtatttttagtacagacagggtttcaccctgttggccaggctggtctcaaactcctgacttcaagtgatctgcccgcctcggcctcccaaagtgttgggattacaggcgagagccaccgcacccgactacccatttattcttgatcgttcaggttttcaagatctttatgttttcaacggccggtgtgtattgagaaaggctgagcaattctgttccagggagggaagttctgagagagagggatgggggaggaactggagctggagagctgaagctgcagcagtggtgacttcgagagagtcactgtgtaacctctggcaagggggaaggagtggacaggaagaaagttcttgtctggttccttgcaccctcagccccagcctcctccttcatatcccttctctctcccccacatcgtctcccacacggccccagagggatcttcctccacccagaactgaccctactcacagccttctagggctcccaccacccccagataaagtcccaactcctgtactcagccctgccagatccagcccttgacaccactgcagcctcatgtcctgcctttccttacacactaacttctccagcctgacctcggcccatgggctgtccctgggctgtggcactggagaggctctgctttgagcagctcgagagagtgagggagctagacatgacggctccaagatatcgttcctgaaccggctcatcaaccacctgctcccgcactccccattcagagaccatctcatcatctacccagtcccaggagtgtacccagggccctgtcctcgccccctccatagtcctgtctctcctgctccttggctgtctctgatatttgtagagcacttgggacagtacctgcacatagtaaacctagtgtgtctgttagctcacatactatacatacataaacatatcaacaaaattcttcaaggttctgcttactggttacctcttccaggaagccttccagaaccacccagtaagctttcaggtggagctgaccactccctttgtatcctcctctcatctccccctcaatctcactctcactactatgggccactatctataatttttttttgttttttggtctttgtctaccccattaagttctgaactgttcaagagccgagatcagtcttggattctaaacgtccagtgaagggcatgcacatagtaggtgctcaataagcatttgttacattggaactgggttctgttaataggtttcagattaggcctgagcttctttgagcttcttgcaagctctaacgttctaggtttctgggtgatgtgtgtgtttgatgctgttccactttcagatctccgagtctctgtttctagaataagtagtgagaaagaagttgcaagaatgtatttcacaatacatgtttaaataactaccggtgaaagagctgttaagagtgtgcttactctgtgctggatgcctttctgaataatttacctatgagatagacactattatgtctcccattttccacatgaggaaactgaggccacagaaaggtgaagtcactcactcaacagcatccaccaagcatcagcagcgcaatggcccagagtccatgctctcgaatcctgtaacagctatcacttaaccagccaccccatgttccaggcaccagggttatgtgtttttctcatgtatgatctcacagtatcctcacaatggccccatgaggcgggtatcgtgataaccccatttcaaaggatgagaaaactgaggcttggagatgtgaagtccattgcccaaagtcacccatccaggaagtcgtggagcatgtctcaggcagcctaaaggcagagcctgtgttcttaagcactctgttcttgtctacagctccccaaccaagggtctcaaactcacacacctactgggaccaggcaggcaaaacaagcaaaagacagtgctagggatgaggcagcagagagtggcagggtttggggcaaacctgggcagcaaagccccatccaagaggggtggccgtctgccaatggaaacatgggctcacctcttccggtgttccagtggaagctggaaacctaactgtgtggggaacaacccctgtttaaaactggggtcagaccaggcaccgtggctcacacctgtaatcccagcactttgggaggccaaggcaggcagatcacctgaggtcgggagttcaagaccagcctggccaacatggtgaaaccctaaaaatacaaaaattagctgggcatggtggcgcatgcctgtaatcccagctactggggaggctaaggcaggagaattgcttgagcccaggaggctgaggttgcagtgagtggagattgtgccactgcactccagtgtggatggcagagcaagactccgtctcaaataaaataaaataaaataaagtaaaataaaattggggtcaatttggctgggtgtggtggctcatgcctgtaatcccagcattctgggaggccgaggtgggcagatcacctcagcctccttgaggtcaggagttcgagaccagcctggccaacatggtgacaccccatctctactacaaatacaaaaattaggtgggcatagtggcacacacctgtagtcccagctacttgggaggctgaggtgggggaatctcttgaacccaggagttggaggttgcagggagccaagatcgcactactgctctccagcctgggcaacagagtaagaccctgtctcaaaaaaataaagactaaataaaatacaattggggtccattaaaatacccctggccacctgggtgtgattctggctctcctggatttctcacctgcccctctttgcacagttgtagggaactacctgtgagcttgttcttttaacgtcaatctttctgtccagtcagaaagtaccagaagggcagggatttttgtctcttgcccaactccatcgctccaactagaatatccccagcccacagcatgggacctggccccttattcactgaatagatggatccttttctttatcctgcggcttctctgcagttcagtctcccagtctctgtctcccagtctttgtcacgtgtacaaaacctggctcttctgtttccctggctgtctctggtgtctctgcctccatgtctccatgtttctggaattttccgtgactattttctcctcttggggtgtgtgtgttttacgctctgcctctcgaagtctctattacattctgtaagtcaggccgggcacagtggctcgcggctgtaatcccagcactttgggaggcaagacgggcagatcacctgaggtcatgagtttgagaccagcctggccaacatggtgaaaccccatctctacaaaaatccaaaaattggccaggcgtggtggcgcgtgcctgtaatcccagctactcaggaggttgaggcaggagaaacaacgcttgaactcgggaggtggaggttgcagtgagccgagattgtgccattgcactccagcctgagtgacagagcaagactctgtctcaaaaaaacaacacaaagcaaaacaaaacaaaaacaaaaacaaaaaaccacacaaaaattagccgggcatgatggcaggtgcctgtagtcctagctactcgggaggctgaggcgggagaatcacttgaacctaggaggtggaggctgcagatggcaccactgcactcaagcctgggcgacagagcgagactccatctcgaaaaaaaaaaaaaagtctgtaagtcgggcccacaccatctcttgctccgtgagtatctttgtctctctagctcctcttcttctctcagtacatgtccctccttgactcccgcctctctgcaaggtgtatttggctgcctcagttggcctctccccctctgcatctctgggtggggtgttctctgcccgtctcccacccacacccacccccggtgctccccttccccccagcaggacagcggctcaggttcacgcaccccacggcgggccggctgggcgcacgcacgtccttgcacacaagccgcacgtagctgtacttgagcacgtcgatgagcgtgtagagcgggggcgcactggcccagcggcagcgcgccaggtgcatggagctcttgacgaagaagagcgccagccgctgctggcaccacgcgtcgaagaagcggctgaactcggcccacgagaagaaggcccgctcccgcagctcctgctcctcctgccccgcagccgtgccgggtgggggctccggccgctccatcctgggggcctgcgtggaggaggggagaacaggtggatatcagacccattcccacccggggtatctcatctactccattcttggcctgccccgtcggttgctggtgcctctatcgaggtgggtagcccggggtcggacgtgcctgtttttctccaaatatataaatatcaacctccatcctatctttggcctcctcccaccgccttatccctggttcacttggagcctgtcatcttgattcctaattccaactcgtctcctcctccgcagatgtgacccttaggtacagttggaatctctcctcccaaaatacgacccttaagctcagatgtcccttaaggacatctcctcaaatgtgttctcaaattccagctaaaacctcctccccttccagctgtgtctctcacccaagagtaacttctaactctcgtattcatctggaactcctccttccatgtgccaacagttggctgtaacccctccaaagacgctccatctccagatgtgctcccacatccaggccacggacccctcacccggtcacatgcttcatgcacctgtggctccgcactccccagatgtgcctctggcgtgcagctgttgccccttcccccgattatgaccctatggctcgccacatgcagctgtagctggggcttccctgagacactctcatctccagatgtactccccacatgcagttatccacgcttcgcctacaggtgtgtgccccacttgtggctagttctcctcggaagtgtcaccagtattcacctgtggtcccctcctcctcagatgcggcccccagtccagctgtgggcccctcctcccagttacatccaccatcccccgcaatatgcatcttcgttctagacatggcccctcgtcctcggatgggctccttcaccccagatgctccccccacgtccagctgcgcgtctcccctcgagcagccccatccagcccgctcccgaccctcctactccccccctccccgcccgctgcggcaccttccagccccgccgtcccacctagctgtgcctctcccctccccaagatgtgcacccttcccgcccctccccactcacctacccgccccggagcggcgtccacctcccacaatgccccgcgcccaggcctggcccggcccttgctcccgggatgccccgcgcggtctcccgcctctcttcccgccgtgcctcgcgggggcgcttccaccgattcctcctctttccctgccagtcactcctcagaccctcagccacacccgctcatccagggcgagggaaagcgcgggcattttcccagtgtgctctgcgggagggctcgccccacttcaccccttttcccgccctcctcccattcgggagactacgactcccagtgtcctccgcgcgacggcggcggtgcggacggtgcccaggtcccgcccctaggctctgccccgcccccgcccgcagacgtctgcgcgcgaatgccgtggcgcgaacttgggactgcagaggcgcgcctggcggatctgagtgtgttgcccgggcagcggcgcgcgggaccaacgcaaggcaagtggggccgtccgcaagcagatgggaggcggagggcggcgggtgcgccgaatgcttggggcctatgcttcgccatgtcggggtgtctgcagaggagtgggcgtggggacgctgaggctgccgagagcgcggtggagacggaagagcgcgggctgcgggccgccggagagtgcagagaggtgtctcccagagggaggggggccaggtagagggtagacgagagacagagacagttggacaggtcctctgagaagaggccttgaggtgcgagttcacctggaagggggagaggccaaatggaactgaggggcggggccggggggggggaaaactgtgtgggcggggccagctggaaatcggaaggccccccgagggggcggggctatctgggagggggaggggctgaagggagctaaggggcggggccggggaaaagattgcgtgtgggcggggccacctggaagggggaggtgccaagggtggggctggctgggarccggaagtgctgagggggcgggggccacctggaagtgctgagggggcggggctagaagaaggtaaatcgcgggcagcagcatcacctggaaggagtgggccctactggagggagatgggtggtgtcagggagaggtcagtggtaaggtccaggtctaggtaaagggctcgtaaaagatggagaatcatctgaatggggagacgtctggcctaatgtatgcttgataaagggatggagcttacctcttgtttttactttttattttgaaataattatagattcaaggaagttgtgaaaagagtatatccatcttcccctaatggtgacatcttatgtagtcccaatatcgaaaccaggaaattgacatcaatacagttctgttaactagattacagaccttgttcagttttcaccagtttgtgtggtgtgagtgtgattgtgcatctgtgtgcccgtgcagcttgattccttgtatagatttgtgtaacccccatcgtaattgtgatatagaacagttccctctccacataagaactcctccccaggcccctggcaaccgctaatgtgttcaccatctctagttttgtcattcggagattgttatgtaaatggaatcatatattattaggatgttaccttttttctactctgcacaatgccctggaggtccacccaagttgttgcttgtatcagtgcttcgtttctttttattactgagtactgtttcatccttacttgatatttttcctgtcattatctcttcattttggtaaccgctttattgagatataattcacaattatacagtttgcccatttaaagtgtacaattttgcccatttaaaatgtacaagtcagyggttttcagtgtatttaaagtgtatttcagtgtatttaaagtgcccatttaaagtgtacaagtcagtggttttcagtgtatgcgctgagttgtgcagttattaccataatcgattttaggatatttttatcatccccccaaaaaactcctataccttttatccatcattcatttaattttaaccctgaacaatattctaccatatggtattccagtaatgagggaaccagttccctaagggtagacattccaccagtttccagtcttctctcattacagttagtgctgcagcaggtaactttgtgcctcacttggtccacctgtgagggtctctgtgggccaaatacacagaagtggggttgccgttccgatagagacgccaggtggtcctccagaggcatcaaccagtttgttccccccaactcagcagtacacagagttgagaagccagccttgagtaccgtggtaaggagaaaggaacgtgggctttggagccagccacaccgggttttgaagccttgcctgaaccccagctatgytcctctgtcctcaktaccttcatctataaagtggggatgatctcacctgtcttggagggctgacttgaggattgagggtatttgagaatgtgatcagcctgtcaggcatagagtaggcttcccagtaaacgcttatgtatttctccttcccttgcaactcagtctggtggttaagaggtgagctgtggagcaggccgacytggggtggaacgtactatagatgcaggttaagttcctttgaaaacccctctgtgccttagtttctgtaacagagttgttgtggagagtcagtataattgagaatgtcaagtacctaggcagttgagcactcaggagggatcgtaatagttttctcctttgccctcaggattttggtggctaagtccctaacctgctttctgtgtgaactgtttggttgaagcattgcttacttcctgctccccaactggccctgagaaactctgtttggaaattgctgagtttcttttttgtttgtttttgttttgttttttttttttttaagacggagtctcgctctgtcgcccaggctggagtccagtggtgcagtctcagctcactgcaacctctgcctcctgggatcaagtgattctcctgcctcagcctcctgagtagttgggattacaggctggcaccaccatgcctggctaattttttgcatttttagtagagatggggtttcaccatgcgggccaggctggtcttgaactcctgacctcgtgatccgcctgtctcagccttccaaagtgctgggagtacaggcgtgagccacagcgccggcctactgagttttttgattccaaaattgagtttgagttgtggtgccaacatgtggcggccaaggctgtagagagtagtggagacttagaggygtgtggtgcgggacagagagtactgattccagaaaacgaaaggggaccccatgggttgaagaagatttctgtgcaaaggaagggaaagtcaaagaaaaccatttctgttgcccaggctggtctgagctggtctcaactcaagcaatccacgcagaggtcctgctagtccttttttaaaaaatatattcatagtggaaggaaatataatgtaaataattataattacataattataatgtgtaatttattttcttccattataaatattaaagatatagaaaatttataattttttatatctttaatatttataatggaaggaaaggctcagttccaattagaagtttacaagaataaagtcgtaatttctttcctgtcaaatttcatagaccacttgagttctgctcttggactcctgggttttgtggaccccagattaagaaccctttcttttctttttctttttctttctttttctttcttttttttttttttgagacagagtgttactctgttgcccaggctagagtgcatgatctcactgcaacctccgcttcctgggttcaagtgattctcctgcctcagcctccccactagctgggattacaggtgtgcaccaccatacctggctaatttttgtatttttagtagagatgaggtttcaccatgctggccaggctggtctcgaactcctgacctcaggcgatccacccgcttcggcctcccaaaatgctgggattatgggcagcagccaccacgcccggcctaggaaccctttcattagagttactctaaactgtggaagccccagtgactgttattgatttcattaaataacagactttttaaaaaagtatttaatttttaaaaatatattgtgaaggggtaacgtattccaattgttctgcctgcaaaagcatgcatattaaaaaatctccctccagcgtctgtccctcctgagrcracagcattaccagttttttgtcttccaactgagatgttctgtacatatacaagatatgtggatacatttatagtctttcttttgtttttgttttttgagatggagtttcactcttgtccaggctggagtgcagtagcacaatctcgggtcactgcagcctctacctcccgggttcaagcgattctcctgcctcagcctccagagtagctgggaatacaggcgcgtgccaccgcacctggctaatttttgtatttttagtagagacagggttttgccatgttagccaggctggtcttgaactcctgacctcaagtgatccacccacctcggcctcccaaagtgctgggatgacaggcgtgagctactgtgcctgrcctatagcctttctcttttacacagttcagtagcacacactctgtgatattctgccctttgtttgaaataacagcataccttagaaactgcccaagagctartttatgtagaccagcgggtacaattttataagcttccacagttgtttcacggaattatgtcatcaccttaaaacaatttttcactaacctttaaacttaactccaaaaaaacccatttcaggtcctcagtctattcctcatattagatgaaaaacagtcttcttatggtaaaggaggcctcttatctttttctctgatttggagcttttattctgcaccagtaaatctcaccagcaaattattttggttcataaaaacaggagtttctttttgaaggggaaattcatgtttctgtttttttttttttctttctttcttaaagaaagggttttatgtgtgtttagatctctgcacaaccartcacctcaacaagtgtttggatttctgttccaggagcagctgacagacgaagaaaagtgctggacaggaagggagaattctgaygccaacatgcagcgaagtatcatgtgagcaccctyccttgcccctgagtctttccttctccaagtcctctgtttctttctctaaatctgtacttaaaaaaacaaacaaacaaacaaaaacycttacgttagattttgagttggaatttccaggagtcaagtagtatggaaaatgagccgtgggatatggaagacagtgtattgaacaacagtttttagttgcaaggagcagaaaccctaacgcagtggttctcagtcagcagcaattttgctccccagggaacatctggcagcgtctggagattttttttttttgagttggagtcttgctctgtcacccaggctggagtacagtggcgcaatctcggctcactgcaacctccgcctcatgagttcaagtgattctcctgcctcagcctcctgagtagctgggattataggcacgtgccaccacgcctggctaatttttgtatttttagtagagacggggtttcaccacgttggtcaggctggtctcaaactcctgacctcgtgatccgcccacctcggcctcccagagtgctgggatttcaggcgtgagccacggcgcccggccagtgtctggagatatttttggttgttacaacctagggacagagggtttgccattggcatctagtggctaaaagccaggcatgctgctaaacatccttcarttcataggacagcccccccaacaacacagaaccatcaggcccaacatgtcaatagtgtctaggttgagaaacctcgtgttaatgcagtccggcttcaggaagacaagaaagggcatgacttgacttatatcattgaaacctgctggagtaaacagcctcaggcttggttcgatccagttgccaaaacttcctccctgggaatctgtctctctccattgttcagctctactgtccttgaggttgtcctcaccctcaggcgggctctcccctcttagcggtccccttggaaagakggtgttagagcccagtttcactggcccagcctgggccacatacctatccctgaaccagccacagggatgcagcctggatcacgtgtccacccctggtcacaggcraaagggccagcccactcaaatcgtgtgtactgagagaatgtggggtaagaagcatcccaagaggaaaacggaggggctgttaccaggaggaaaaaatggatggtagagagacccagacaagggcatccatcccagaaacctgggcggtagtggcttacacaaatgctgggttccgtttttctcccgtgatgaggaatctggggattgtctctccagggctgatggtgccttcgattgctttctgtccactggcttttgcatgatttttccttttctttttgaagattaaataaacctcttattctggaataattttagaggtacaggaaagttgcaaagacagtacagagaggtcctgtatacccttggccagtttccattgtcaatatcatacattactatgatccgtttctcaccactgagatactaatgtcagtacattactcktaactgaactccatactttattattcagatttcaccagattttttttttaatgttcacgccttccaacatttttttttttttttttttgagacagagtcttgctctgtcgcccaggctggagtgcagtggcgcgatcttggctcactgtaagctctgcctcccaggttcaggccattcccctgcctcagcctcctgagtagctgggactacaggcgcctgccaccacacccagctaattttttttgtatttttagtagaagcagggtttcaccgtgttagccaggatggtcttgatctcctgacctygtgatccgcccacctcggcctcccaaagtgttgggattacaggtgtgagccaccatgccaggcmccaacattttatatttagttgtttgcttaatatttctgcccttcaccagagtgttagcttcttgaaggcaggaacttcgtgtgtctgggtcactgccaaacccctcaggcccagaacaggccctggcacataataagtgcttaggtaggccgggcgcagtggctcacacctgtaatcccagcactttgggaggcaggaggatcacctgagatcaggagttcgagaccagcctgaccaacatggtgaaaccccttctctactaaatgaaaaaaattagccgggcgtggtggcggccacctgtaatctcagctactcaggaggctgaggcaggagaaacacttgaaactgggaggccgaggttgcagtgagccgagattgcaccattgcactccacccttgggcaacaagagtgaaaactccatctcaaaaaaaaaaatttttttaggctgggcgcgggggcacatgcctgtaatcccaacactttgggaggccagggtgggtggatcacctaaggtcaggagtttgagactggcctggccaacatggagaaaacccgtgtctaccaaaaatacaaaaaaaattagctgggcgttgtggtgggcacctgtaatcccagctactcgggaggctgaggcaggagaatcgcttgaacctgggaggcagaagttgcagtgagccgagatcacaccattgcactctagcctgggcaacagagcgagagtctgtctaaaaaaaaaagatttaaaaagtgcatagttaatatttgttgaataaaacttgggatgtatcatatcttgcaggtgcgttagggcagaaaaattagtgttgcctcctttgtctgagtctgagtttccttatcagttaagttaaagggcttatttgaaattctctgttatgtgctgagatggaaatggtgttagaagttataggatgcggccgggcgcggtggcttaygcctgtaatcccagcacattgggaggccaagcagatcacaaggtcaggagatcgagaccatcctggctaacacggtgataccccatctctactaaaaatacaaaaaattagctgggcatggtggcgggtgcctgtagttccagctacttgggaggctgaggcaggagaatggcatgcacccaggaggcggagcttgcagtgagctgagattgcgccattgcactccagcctgggctacagagcgagactctgtctcaaaaaaaaaaaaaaaaaaggaagttataggatacagcatagataggcagggtattggtgctgttattctcctttttttacccccttttatgctcctctaggtcatttttccaccccaagaaagagggtaaagcaaagaagcctgagaaggaggcatccaatagcagcagagagacggagccccctccaaagtatgtcacagggctgggatatggtgaattttttcctttagcagtcaggattgtcttggttgcaagtgttcaaacctaatgcaaaatgtcttggggcccaaaaaactttttcagccaggtggccagaagtccaagagcaagagcagctgcaggcacagctggatccagggcctcggagttgtctgtacgtctctgtttctgcaggtcttggcctcgttctagaaccagacattctccataatgcagagaagctggccgctggccactggccacgtcttgatgctgtctcatctaagtagaagacaacagtactcttttttttttgaaatggagtctcactctcacccaggctggagtgcaatggygtgatctcggcccactgcactccagcctgggcgacagagcaagattccatctcaaaaaaaaaaaaaaaaaaggcatcccaatagatgctggagaccaatggcaaccttaggcagggactccatttgctcctcagcatcacccatcacagggcaggcactctggagacttccagagatgtgtgatgggtgggtgagtggatgagtgggygggtggattaatgcactgatggatgaaatgatgagatttgctgaggagacaaccagaaaatgttcattggatgcttgaaaggaagggaaggaaacagcaaagaaaccaaagtgtttgygggcagtgcccccactctgcctgctgtagtygcccctttacacccccatttccccaccttccagggcggcactgaaggagtggaatggagtggtgtccgagagtgactctccggtgaagaggccagggaggaaggcggcccgggtcctgggcagcgaaggggaagaggaggatgaagcccttagccctgctaaaggccaggtaggtccccatcaccctgcccatttttaccagaagaaactaattcccattaacctttggaacagagtgcagcagctgttcaggagaattctggagaaattgcccgggagaggtagatgtgtttcctggttgtgtcgggggcagacacaacctggtcctaattgcccctgccctaggacctcgggtgggctccttcaccacgttaggtcttggatgcctcaactgtaacatgcagctcctggtaacaccttcctcatagggtgactgggaagatgaaatgagtcgatttacatacagatctgagaataatgcctgatggtaaaacaagggctcaaggcccagcacaatggcttacgtctgtaatcccagcacgttgggaggccaacgtgggaggatcacttgaggccaggagttcgagaccaggctgggcaacatagcgagaccccatctctacaaaaaaatgttttaaaaattagccaggtgtggtggtgcatgcctgtggtgctatctccttgagaggctgaggcaggaggatcgcttgagcccgggtgttcaaggctgcagtgaactgtgattgtaccactgtactccagccggggtgacagagcaagaccttgcttcaaaaaaaaaaaagcaaaaaaataagggttcaaaagtatatctagcctctcctgtggtcagagggctttttaacttctccaaatacattggaccactctcttcccctgtttaagtcatttaatgcttgttcattgctttgtggatgatgtccaaagcgtggtgctgcttattctgtcagtggtgaggtcaggtcctgtgactccctgcccaaaccccctggtattaccaccacaggccaaagccaggccttgtggaaacctcccaggcccctcctgctgctcctctcttcccccgcccatcacatctgcagccgcatccacagctcctcctcagctcrctccatcctggcttcccacaccyaccaggtgcacttccacctctgggccactaccttctttcccagcctaaaactctctttcccagatacacgcctggctcagtcccctgctttcttccatgctttgctcagatatcacttcctcagcgaaactttcctcaccacctatgttagcttcccatttgctgccataacaattgaccacaaacrcagtggcttaaaacagtgtcagtttattgtcttacagtttgggagtcgtgagtctcaaatgggttgcactgggctaaactcaaggtgtcagcaggtctgcgttcatttctgggggctctgggggagaatccaggaattgccttttccagctgctagagatccccttttctccgttttcaaagcaagtggctgggtgtggtggctcacgcctgtaatcccagcactttgggaggccgaggcaggcagatcacaaggtccggagattgagaccatcctggctaacatggtgaaaccatgtctctatcaaaaatacaaaaaattagctgggcgtggtggcgggcgcctgtagtcccagctactcgggaggmtgaggcaggagaatggcgtgaacccgggaggcggagcttgcagtgagccaagatcgtgccactgcactccagcctgggtgacagagcaagactctgtctcaaaaaataaataaataaataaataaataagcaagtggcattgcctccttctgtgcctttcttctgtggccacatctcaccctgactttcctctcctgccaccctcttccactttgaaggcccctgtgactatatcaggcccacctggatagtccagggtaatcccactatcggaaggtcagctgattagcaacctcaattaccctttgcyatgtaacctaacatattcccaggttccaggtattagaatagagatctcttttggagcttagactttaccctgaggcttctggggagctaggaagagttttgggcagaagagaggcagagatcatttagtcctgggcagtgtttaaaatattcatctggccaggcaygatggctcacgcctgtaatcccarcactttgggaggccaaggcgggtggatcacgaggtcagaagttcgagagcagccaggccaacatagtgaaacctcatctctgctacaaaagttagccgggcatggtggcacgggcctgtagtcccagctacttgggaggctgaggcaggagaattgcttgaacctgggagatggaggttgtggtgagccgagatcgtgccattgcactccagcctgaacaacagggcaagactccatctcaaaaaaaaaaaaaaattatctgagacctgtatctccatcagggtctcaatgggagacagaaaccataccagtgatttgaacagagggagtttaaaggatggtcactaggtatgcagttgttaaataggtaactgaagggctaaaaagagaactaactctaaggcatcatggaggtagcaactgtggggtgcagtgaccatccctgtggcttttgagctgaaattcacacctctgtggtgggactgctggcaggtctctgagcttagagaaggtgccccgagagcctgcaactctgatctttcaggaagggagcactgggtgggagatgccagggtctctgatcaggtaccacgtggcaagccccgtgaatgttagaaaaaactgtcagtgggatccagcagctgcccccggcaagccggctgtgcctccagtcatgcagtgccctctgcttccctccattggcactgcctgatgcccaggtggcgccagagcaagaagaagatttgtggagtcccggtcctggcagcatgaaggagactggacagtgacaggtttggagctgagagaaaatcacttaataactggcacagggccctgtaagaagataagtgagtggttgaaaccgagacacggtagcagtggcttaggcaagacgcaaacttatttttctctctcctgagtgcagagtccgggattcatgtgaccgtctcacagggtcagaggcccagrcttcctctgtgctgtcrtttgctctctgtagatgcccttgtccctgtgaacatccatattctgccaacaggaagaggagggcaccccactcaacattaagtggatgttatttgaaccaggaaatgcatgttagtccattttgcattgctataaaggaatacttcagaccagttaatttataaagaaaagaggtttattttggcccacggtcctgcaggctatacaagaagtatagtgccagcatctgcttctggtgagagcctcaggatgcttccagtcatggtggaaggtgaaggaggagcaggtgtgtcacatggcaagagaggaattttaaacaaccagctctcatgtgaaccaggagaggaagaactcggttcctaccacaaggagggtacaagccattcatgagggatctgcccacgtgacctgaatgcctcccgccaggtcatacctccaacattggagaccaaattgcaacatgcgatctggagggaacaaacatctaaactgtatggagagaaggctgggcacgggggctcacgcctgtattctcagtgctctggaggccaaggcgggaggatcgcttgagctcaggagttcgagaccagcctggccaacgtggtgaagccccatctctataaaaaaaatacaaaaattagctgggcgtggtggcgggcgcctgttatcccagttgctcgggaggctgaggcaggagaattgcttgaacctgggaggcagaggttgcagtgagccgagatcgcgccactgcactccagcctgggcgacagaatgacaccctgtctcaataaataaataaataaaaataaaactatacgaagaggtgtacatcatttcccctgacatcccattgtgtagagctggccaacatagtgaaaccccgtctctactaaaaatacaaaaattagccaggcatggtagtgcaggcctgtagtcccagctacttgggaggctgaagcaggagaatcgaagattctgttactgtagaaaacagaagagctatgggggtccttgatgggaccatgatcctgcactggagggcgggatgatggcccaggtgagaagaggccacccctgagttagggctgagaccayagggtcagaaaggagggtagacagagaggtttcagtcccctctactctcaacttttggaaaatggrgtccctccttcccccgctcactctagaactgttctttcctcttccagaagcctgccctggactgctcacaggtctccccgccccgtcctgccacatctcctgagaacaatgcttccctctctgacacctctcccatggacagttccccatcagggattcygaagcgtcgcacaggtgagaacacacgggcccctgccccttcagtcgcctgcctttctttttctcttttttttttttttttttttttttgagacatagtctcgctctgttgcctaggctggagtgcagtggcatgatctcggctcactgacctccgcctcccgggttcaaacgattctcctgccttagcctcctgagtagctgggactacaggagcccgccaccatgcctggctaatttttgtatttttagtagagacggggtttcactatgttggccaggctggtctcaaactcctgacctcgtgatccgcctgcctcagcctcccaaagtgctgggattacaggcgtgagccaccgcacccagccagtcgcctgcctttctccccacttggattcccatccaaggtagtcatccttacaacagctctggtcttagtgttgtggttaagagcacgggtccaccatccactggctgtatgacctgggacaaatgactgaccttctctgagcttaggttgctttatctgtagagatgatgataatgayagcacctaccgcacagaaatatctgagttagaagataacacgtgtacgctgctcagaactgggcccagccctcagtcggggctcagtcattgtgggtcattgtgactgtagttatgcgctgagatggaggcctcacagctcatgtgggaacacaagcgcggggccatggctcaagggagacttccagaagagaggctaaccaagctgagccctttaggacaaagaagaggcaacaagcaaaggaggaggggagcatgctaggcaaggggaacatagaaattgagaaggcctgggggctgctgagggcctggtgtgctggcgtgtagagygcaggattggggatggtgagcaatgaggtgagaaggtcctggaaaaccagcttggggaacagcgtctttgtcctaagggggacttggaatgtttgctgtggggkaagaacagggcgagagacccattcgtaatgcggggcagtgtgagcccttgccgtccggtctagcctattgagcgctttagcgtggtgagtgtgacaggggagctgaatctttcatgttagatcctttcagttgaatttacatttgaaagctaatatgtgattcagtgcgtaaagactttgcactttttccacatcattttggaacagctttggtatgtgaatagctgtacattttatgaaacctacacagatcatgttgccgatgaaaatctggtgtccaacttgagatgtgcagtgagttcattggattttgaagacctagcatgaaaacagaatgttggaatcatactgttttagatgtattgagcaaaayagactcttcaaaccaagttcaacctggttttttccccctttttattaacgtggctgcaagaaagtttaaggttacatacgtggcttgccagatctttccatcggacgatgctgggtgacgcagggtactctgggagctcagaagtcaagcagcccaggggaggtgatggctgagccgagtcttagaagatgggttggggttggccatgttgagaaaggacagatgcatgcatttcagacaagaagggcacgtgcagaggcctcgagatgggaacagcatgggatgtttggggcctctcatctacttccttgtttctggagaatcggatgcgacctgggaagcagggagagtttgaggatagcacgtggtgagaggtgagctagagaggagagtgggggctggatctcaaaaggtcttgcactcccagctaaggagcctgggcttcgtgctgtgggtcctgggagccatggaagggctgtgaggtggggaggcaggttcatccctgaatgaaaggtggccataaggaagtcacagtgtggctgagggcatgctgggagctccaggtggacgctgaggttggccctgggggtgtgtcaggggatcttgttcagagggagcaacattgagctatgtcccraacctcacatgctgaggcctggaggggtgacacagcttggtgtgtctggaaacaccccagtttagcagtgatataaaagaaggtggagtatgtggtgtgggaagggttagaaggtcagatggagagagattaggtaggatcggggtagacatcaaaagactttatcctggataaagcagagaatgtggagtcatggaagggttttgagcagggagagacagtgccagccatgctgatagaaggtccctctggggccacgtgaaggagccactgggggccgggagaccggggaccaggtggcgcaatggccaacatgagatataacagtgaagatgggtacaactgcctttgtgtgagctcttcatcatgggttagtatctgagtttagaggcttttagaagcaggttctgaagctctgaaacagggattcaagtgcaagtggtttgtttaggaggtgcagggaacagagggtgattcaggacaggggagcagccaacacaggatgtgctgttgggtctgctatgtgttgggcagctggagcttagttttgtgggattctctggggaacggtgtaaatgctccagagtgacccccgagatgcgaggcagctggggtatttatacaccaactcctgccgatcgtggggtgagggcctctcctggggctagtttattycctgccacttccagacttctgaggttccggggaagctgtctggaacacttggaggcagttaagatctgaggggagcagtggggagctcaggggacctgctggaatcggtactgtgccaagtacattacatcattgtttactcgtggggattatttctattctgcagtcgtgagagagcaaagcacagagaaattaagtaacctgcccaaggtcacacagccaggaagcaggagggattgaagggtgcggcctgcactggggcagtgactgtgtgcaggcagagaaggggagagggcccagagccttccagaggctacatcagtgggtgtgagctctccgggatgggagcacacgagccagcgaggtcagatacaccaagccctttgcctccccagctcggaagcagctcccgaaacggaccattcaggaagtcctggaagagcagagtgaggacgaggacagagaagccaagaggaagaaggaggaggaaggtgagcccccagaaggagagaagtgtgtgtgtgtgtgtgtgtgtgtgtgtgragccaagaggaaggaggaggaggaaggtgagcccccagaaggagaggggtgtgtgtgtgtgtgtgtgtgtgtgtgtgtgtgtgtgaagccaagaggaaggaggaggaggaaggtgagcccccagaaggagaggtgtgtgtgtgtgtgtgtgtgtgtgtgtgtgtgtgtgtgtgtgtgtgtgtgttttggatctgcaaggkcaggggcctgagagctcaggatgtttggaccctgccgatttgatgcctgtgtccaggcatccaggaattccacctaccaatatgggaacttttgttctgaaaacattgtgggatatatttgtttggacatcttaatttagtaataattcaggcacagtttcccatttttatttgctatttttatatttatttaatggaaactattttcctctaaatgatttccttttccttgtaaattttaccataaagttgcagttcccaaacattcttagttcacagcacccttgatgtcttagtaatttttttmtgatgctcctaggccaataccttatcagttctattaagtagttatgtccaaacaactattagatactatacatacattggaaaaaaagtaatatttgtgctttttttttttttttttttttgagacagtctcactgtgtcgctcaggctacagtgcagtggcacagtttgggctcactgcagtctccacctcccaggctcaagcgattctcccacctcagcttcccgagtagctgggattacagacacaccaccacgcccagctaatttttgtatttttagtagagacagggtttcactatgttgaccaagctggtctcgaactcctgagctcacatgatctgcccacctcggcctcacaaagccctgggattacaggcgtgagccactgcgcccagcctgtattttgttcttaaataaccataattacttgtgggaaatgccttggatactctgtaacatcttaaacagtggaattcaattgaaaactgccaacgtcatttcctgttctatgttgatttttgtacagtacttgatttttatagcagcaacctatgaaaacccagctttgcagagatgcaatgtcattgcaaggaatgtgatttaatactgaaaactgaaatacctcgaactagtagttcacacactggccagcaggtgtcgctgggtttcctttgaaaaatctaaaatatcttgcagygcccagtgagttccctgcatgttggtgaacccaccgaaaacagccataaagatctgatcgattgatcatctggggcctgcatgagattacaccaattgcagcctttaacgtcgtttggttttttgtttctgcaaacaaataaaaggtccattttccagggcagatttaaatttggttaagatctgatttcttggccaggtgcagtggctcacgcctgtactcccagcagtttgggaggccgaagcgggtggatcacttgaggtcgggagttggagaccagcctggccaacatggtgaaaccccatccctaccaaaattacaaaaattagctgggtatggtggcatgcgcctgtagtcccagctactcaggaggctgaggcatgagaatcccttgaaactgggaggtggaggttgcagtgagccgagattgtgccactgcactctagcctgggcgacagagggagactgtgtctcaaaaaaaaaagatttgatttcttattgacaatttttagtacaaattttattgtaaactacacttttagccactgtcagtgtccagtgaggggtggcgggggtggcctctttctactaaggcagatttttcccaagttggtttttgtagtttgtattgtgaccctagaggtaagattttttttttaactttgaagatttttatttttgtctataacaggctgtcatttgcatttttaaccctttcagattctattttggggtgaataacactaaaggaatcattggtaaggaaagacacaccatttatgtctcggctacataggcaaacgggctggaccccctcaaggtcgctgccttgcttggggttgacaaggagcagggtcttacgtggcccactgctttacaggcacattggattggcacaagatagaactgtaagacctgcactttgggaggccaaggcgggtggctcacctgaggtcagtagttcaagaccagcctggccaacatrgtgaaatcccatctctactaaaaatacaaaaaaatagctggatgtggtggtgggcgcctgtcatcccagctactcgggaggctgaggcaggagaatcgcatgaacccrggaggcagaggttgcagtgagccaagatcacaccattgcacyccagcctgggcggtaagaaygaaaytctgtctcraaaaaaagaacagatgacagatgagggcagactgtctccagagtcaaaatgcccttgtaggttcaatgggatttttttgccatctgaccgttctgtctatcgtcagaagaggagaccccgaaagaaagcctcacagaggctgaagtggcmacagagaaggaaggagaagacggggaccagcccaccacgcctcccaagcccctaaagacctccagtgagtttctggtcctctcctccgccctgccccacctcctgattttggggtcagaagtctttggaggatgattaatttaaacaaggcatagattctcaaacttattgcttaaatgccgaatctagaagaataatagtttttattactcgggtttttttttttaattattatttttccccatgcatgtgggaaaggaggaaagagccagccattctttaaaaaatcttcctaggccgggtacggtgcctcacacctgtaatcctagctctttgggaggctgaggtgggtggactacttgagcccaggagttcaagaccagcctgggcaacatggcgaaaccccatttctaccaaaaaaaatacaaaaatgacctgggtgtggtggcacgtacctgtagttccagctacttgggaggctgaggtgggaggatcgcttgagcccaggaggtggaggttgcagtgacctatggtcgcaccactgcactccagccttggccacagagcaagaactcccccgcctcagacaaagtaaaagataaaaagtattcatagctttcagaagtcataggtgtaaattaaatgttattaattaagttagacaaccaaactgagttacaggattttagaggctgaagttaccctctcagggtggtccaagtgtccatgaggcccctgtgttagaaacaacacttgccgggagaattttagggatacagagttgtatctgattttctgcagctgctgggaggagtgggaatattttcttctcatgacgatgagatttctttttaccactattcctaagtctcctatttcaggccaagtgctagaattcckctagttagcactgaggagtagacagcaggcctgagatctcagctcaaagctaacagaaaggaaaagggtaggtgtagttatatcttccatctgcagggtcagaatgatcttgggggtaaaaaaaaagaaaaaaaaagtctcagggtcaaagagtttgcatcaccgtctgagctctctcaccgcagaagcagagaccccgacggaaagcgtttcagagcctgaggtggccacgaagcaggaactgcaggaggaggaagagcagaccaagcctccccgcagagctcccaagacgctcagcagcttcttcagtgagtttcccttgctcaccccacctcccggggttgtacaggcaggaggctggtgagcctctctccagaggcctgagatgctgcgaagacccttcttcctttcctgctggttggaaagtcggccttgtctctaccagcctgtctcccatctccctgagcactggggtggtgctgggtgcagaatggatgggaggtgggggctaccggaaggagaaaagacccactgttttctgtcttcattcctagccccccggaagccagcagtcaaaaaagaagtgaaggaagaggagccaggggctccaggaaaggagggagctgctgaggggtgagtcagtgtccaggtctggaaaggttcttcgggatgtgttcccttctctgcattccgacagccccacccccagctcaggcttcctcctcttgcaggacttggcaaaccttttctataaagagccagagagtaaatattttaggctttatgggacacatttggcccctgttgcaaaaccattmttagatcccagaacctgtagaaacggtccagggtyggagtttgctgaccgtggccccagccaccctctgaccctgcctccagtctttcatcctcagtctgatccccgtagagcctgggggatctttctaacacccagagttgactctgcccctctagggttccccagagccgtcaggagaaaatctaagcccatttggccactggctgycacctccctctctggcctcacttcctacctctctgttcctctggctctgaactcaccagattttttatttttgagacagagtcttgctctgtcgcctagcctgcagtgcagtggtgctgtctcagctcaccacagcctccacctcccaggttcaagcgattctcccaggtagctgggattacaggtgcatgccaccacacccagataatttttgtattttcagtagagacacagtttcaccgtattggtcaggctggtcttgaactcctagcctcaggtgacccacccacctcggcctcccaaagtgctgggattacaggcgtgagccagtacacctggcctgaactcaccagatttagtgtatgtgctggaagcctgcaggcgcrtctactctgccttaaaattcactgaacaccccttctttgccagccctgggcggcccacgaggatgaaccatagagagccggccgccctgccccakccctcgtgatgtgcttagtgtgctggggctgtgggacactgaataggttgttaagcaattaattgcttcactgtarttttgttaattatttgaagagatgtctgggctgattcccacgacatctaacatgcacacaggaggcygcactgaagactggctgaatggatgattggatgcgtgggtggataaatatcctataaagtaatgaggtcacccccccatctctgccatgctcaaaacccatctgcgattctccccagcatagaggatatgctgggcttcccagtgccctcatgagccagccctgtccaccttacattgcagcctcctggcatctgcagccttttcctgctccctctgcacaccatgtccccacgtgctgtcattcctccctgctttttttttttttttttgagatggaatctcactctgttgcccaggctggagtgcagtggcacgatctcagctcattgcaccttcaacttcccaggttcaagcgattcttctgcctccacatcccaagtagccagaattacaggygcctcgccaccaagcctggctaatttttgtatttttagtagaraccgggtttcaccatgttggccaggctggtctcgaactcctaatctcaggtgttctggccgcctcagcctctcaaagtgctgggattacaggcgtgagccaccacacccagcctcctccctgcttctgaacatgcttgaccccggcctacaacactgtccctaacccaccctgcccagcaggcttccctcaggccccaactcctattgcacctgcttagggaagccgggtgcctctcccttcatgtgtgagaggaggtgygtsyccccagcacttgagtcagactgtcttttatgtcttgtcacatggtaaagagcctccctaaccagacataagctccttcccacagagccagggctgtgggaggtcccagccttcttagtcttcttgcctagctcccagcactggggctggcccctaggaagcccaggaaatctgccatgaaagaaatttaaatgagcactttcagattttttttttcactagtcaatcatggactcatttatttactcagtaagtatttacaaaggactgattacgtgttagctactggattttaggtgcctgagatctggtaggaaacaaatcagacaaaaattcctctttatagaacttargttttttgggttttttgttttttgtttcttgttttttttttaaagacagggtcttgctctgttacccaggctggagtgcagtggtgctcctgggctcgggatcctcccacctcagcctctcaagtagctggaactacaggcatgtaccaccatgccgggctaatttttgtttactttttgtagagatggggtcctactacattgcccaggtcgagctcctggactcaagtgatcctcccacctcagcctcccagaatgctggaattacatgcatgagccaccacggccagcctgatttcttacataatcatatatccatctgaagttatttttttcctctaaagattgtgttttcaaatacaatgtgatggtgttagcagcgtggacttcatcccctcttgaattcttgatgtcctgaaagctaaaaaaaaattaacggaaaaggggtttggaataatccctgctgttcagcagaaaggacaggtgggttaaaaagtatgacgcagtgagtccaaaatctctttgatgtcacgcctctacaaatgaaacagataacgacaagaaattctttcagctttaacrtttcatgattacagtttaagtctaacaaaaaagtgttcggaggattcttgacatcaattttgtacccccaattgagaccttatcaaggaggttaaatagcacgttaacgtcctctctgcagtattcctgtggaggaagggagcactttagccattttacacacattgacatgattagcccagagaggttaggtcgggcctcgccaggtcacacagggaggtgggggtagggccaggcctgggaccctaaggaatgtttttgattcctagcagttatttcttccccattgccatatcgtgcctcctgagtgtgtgtccgtgtttgtgtatttataaatatgttttccaaataaaatcagtgtcctactgtatataaagttctgttttctatttcaagtgatactacgactgcttttctttcttttgagacggagttttgctcttgctgcccaggctggagtgcagtggcacgatttcagctcaccgcgacctccacctccygggttcaagtgattctcctgcctcagcctcccaggtagctgggattacaggcatgcgccaccatgccyggctacttttgtatttttaatagagacagacacttttttgttagacttaaactttaatcatgaaatgttaaagctgaaagaatttcttgtcgttatctgtttcatttgtagaggcatgacatcaaagagattttggactcactgcgtcatactttttaacccacctgtcctttctgctgaacagcagggattattccaaacccctttaatttctccatgttggccaggttggtctcaaactcccgacctcagtgatctgcctgcctcggcctcccaaagtgctgggattacaggcgtgagccaccacgccaggcatgactgcttttcttgcaccattcctagcctggtcacttcccctctgtctccaatggctgcctccaagagacaggcaaactttcccactctccaatttcctcacctctcagatgggggcacagtgatgagaggaagcatgttcttccacccactcttccccacgtgccaggcactcagcaacgggctttccctgacscaatgctccaaatcctcacaacactgctgggagtagattctgttgttatcctggtttcctgggtgagaaaagtaaagcggggaggtgggacagtattgaggacyggctaggaatcccagctccacctctctcagctgtgtgaccttgaggaagtgacttagcctttctgtgtctctcttctgaggatgtgaaacacttagcccagggtctggccttgattatgaccagcatgttgtcacggtaactgctgctactattcttatttgtttttaatgccatgctcaggccacacaggtggggagtggcagcattgtggttctagccaggctgactggctctagactcccctgcccaccacactctgctgcctcattgtaatgccggccaccgcttgttaaaccccaagttcataccaaaggccatgcacagccctgcagtggcactrtctgtcttggccatccatgccctgtgtgagcatnagaatcagctgaagagctgaaaaatatcctgaggtctctttctcccccccaacccttgtccccattttggtacagatgtaggcctggggctggggagtcctcattgttccatgaagtgcacccaggagtgggaaccctcactgtcattttttatgtaaccttcaggacaacctgtcatagtagggaccccttagctccccagacagatggagatgctgtggttcagagaggggaagctgcttcctcagcaggtacagctggccggggcagagcagattggaacccagatgagtctgaatgcagagtttggctggggtcagtgtgagctacttrcgatataaaggttgaggccgggcgcagtggctcatgcctataatcccaggactttgggaggtcgaggtgggaggatcgcttaagtycaggagtgagacaccagcgtgtgcaacacggcaaaaccccatctctacaaagatcagtcggrcatggttgcttgcacctgtagtcctagctactcaagaagctgaggtaggagaatcccttgagcccwggaggttgaggctgcagtgygcattgctccactgcactctagcctgggcgacagtgagaccctgtctcaaaaaaaaatagaggttgggaactgtctctagagctgygctgcttaccagctgtgtggccatgggtgagttaatcactctgtgccccagtttccttatccggaaaaggaagttagaaaggtcccttctggccaggcacggtggctcacgcctataatcctagcactttgggaggccaaggcaggcagatcatttgaggtcaggagttcaaaatcagcctagcgaacatggtgaaacctcgtctcttctgaaaatacaaaaaaatcagccaggtgtggtcgtgtacgcctgtaatcccagttacttgggaggctgaggcagaagaatcacttgaagccaggaggcagaggttgcagcgagccgagatcatgccactgcactccagcctgggcaacagagtgagactctgtctcaagaaaaaaggaaaggtcccttcctcccakgtctgattgttaatcgatgtggtgttagcatggcacctggcactttgcgacacccgggactatacgcacctccctctgtcccagctcagctacgcaatcccttttctgtttctcaagtttgtctgcacctcagcgcctttgcacacgctattctctctgcctggaatgctcgtcccctgctgcccactgtgctaacccctccctcattctgcccagatgtctccggccttccctgaccaccctgtgaagcagcaccctcatctcatcctcttcctctactcggctttcttttgttttctgaaagatttttttaacacctaaaattaatgwtgtgtttatgtgggggctttttgcccactttcctctgactctcctgctggaatgtgagctccaggttagcaaactttgttttcatccagctctgcaccgtgtgccttgaacagagcctggcacatcacagttggaaggaatgactttgctttgacccagggctctatgcaattcartctccgttttgcctccgtagacccctggatccatctggttacaatcctgccaagaacaactatcatcccgtggaagatgcctgctggaaaccgggccagaagtgaggtttctcccttttcagactgtccccctccggtccctgttgccaccggaggctctctaagcagagtcttggttgggagaaatggtcaagtctctccctcctgtgttttggcgacaatcagcagcattgaaagggacagagagrcagccctgggaagtgagctcatgcatttgggtattggcaagggtgtcccgaggaggcgtgaggaagcaagggtgcagacgggcagcatggtatagcctgcaccactgtcrctcttgcgtctcttttccttccctagggttccttacctggctgtggcccggacgtttgagaagatcgaggaggtgtctgctcggtaactaatgaggamtgcctgggtggggggcggggtcgcttctgggtctgtcctctgcatggcggtcygtgctgccttgttccgccaaaccctgtcaacttggcctctgaccccgctcgggcgtatgatcatggatgtcagacatggtcacaaaagcggctgcaggtcctcttgactttctgcctcattctcatggtcagagcaagacacaaggggcgagcccagatgtgcagggtaaggagacaggctccatctcgggatgactggcaccattgcacacagtccgtgattacttctagtccaccctgagtcatcaaaagtgacttcagtcttgcttacatgtctccatattcacaaaagaaggtgaggtctcagttatagcgaggaccccctactcattcacagaggttccctgcagagcgtcccaccccagtgatgcccagtgcatagcactgccccaccctggtccttctcarcagcatgttagcatcgctggtccctgccagcccccttctctgtccccatttcctcttctctccttgtcctcctcacccccagcactcgcccctgtgtatttagtttatataaatattatcatggaggctgggtgcagtggctcatgccttaattccagcacatcgggaggccaaggtgggtggatcacctgaggtcaggagttcaagaccagcctggccaacatggtgaaaccccatctctactaaaaacacaaaattagcccagcatggtggcgggtgcctgtaatcccrgctactcaggaggckgaggtrcgagaatcacttgaacccaggaggcagagattgcastgagcygagatcacgctattacacyccagcctgggtgacagagtgagactctgtctcaaaaacaaacaaacaaaattatcatgggtacggctcattctgcttgccttcactatcaaacccgtttccacatgtgtccatgttggttgagtggttcgagcctgttgtgactgctctgtagtgtcccttcgttctcacatggcacatgccatttctcagttccccaacatgagtggagcatttcaggctgttcccagcactctgtttttttttttttttttttttttttttttttgagatggagtcttgctctgttgcccaggctggagtgcagtggcgcaatctcggctcacttgcagctccgcctcccaggttcacaccattctcctgcctcagcctcccgagtagctgggactacaggcacctgccaccatgcccaactaattttttgtgtgtgtgtttttagtagagatggggtttcactgtgttagccaggaagatcttgatctcctgacctcgtgatccgcccacctccgcctcccaaagtgctgggattacaggtgtgagccaccrcgcccggccctaattttgtatttgtaatagagatggggtttcactatgttggccaggctggtcttgaactcctgacctcaagtgatcsgcccgcctcggcctcccaaaatgctgggattacaggcctgagccaccacacccggccctcttctgtattttgtaaggatgctttttggattcagagcctaccttmattcactatgctctcatcttaatctacaggtacatccgcaaagaccttctttccaaatgaggtcatgttgtgaggctctgagtggacctgaattttgggggggctgttccatccactgcaccatccaatggtggcttttgcctacaatgattactgagggatttccctgatgttggtttttgtatttcttctctgcaccttaaaaacctcggtaatgagacttctgtaggaaaaacccagcttctgtttctaatgaggcyccctaagtttttcagtaacaaagccattctttccagctttgaagttttagacagaaacacggttttcgttttagaggtggtgcagcttggtggctgggagcacagtcctcaggcacacggccttggtgtacatctcagcttcatacttactcgctctgtgaccttgggcaagccacggactctttcggtgcctctgtttctttatccgtaaaatggaaataataatggtacctacctcagaggggagctgtgaagattctatgagttaaaaggtgcaaagggctggccgtgttggctcacgcctgtaatcccagcactttgggaggccgaggcgggcggatcatttgaggtcaggagttcgagaccagcctgaccaacacgttgaaaccccgtctctactaaaaattaaaaaaaawtagcygggcatggtggtgcgcaccggtagtcccggctactccggaggagaatcacctgaacccacaaggtggaggttgcagcgagccgagatcgtgccactgcactctaccttgggcgatggagcgagactccgtctcaaaaaaaaggtgcaaagtgctcaaagccagctcctgaatttagaaaatgctccgtagcatcagctgtcgtttctctgggctgatcatcaccatcttcatcattgttaccgtcacaccaagttactcccccactgtaaccgtccggtgggttcaccttgcccgctgcctagacagagccgatttatctagacgggggaactgcagtggagaaagagtcattcccrcagagctggctgtgcgggagaccggagtttcatttttactcaaatcagtctccctgagcatgtggggagcagagtttttaaagataatttggcgtgtaggggcttggtaagtggggagtgctgattggtcaggttgaagatggactcacagggggtcgaagggaggttttcttgctgtcttctgttcctgggtgggatggcagaacttgttgagccagattacagtctgggtggcgtcagactgagtgcagggtctgcaaactatcttaagcactcatcttaggttttacagtagtgatgttatccccaggagcaatcggggaagccagaggctgcgtgacccctaaacctaaatttctaatcttgtagctaatttgtgagtcttgcgaaggcaggtccttaggcaaaaaggggtcttttccagaaagggctattaccaatttcgtttcagagtcaagccacgaaccaaattccttcccaaagttagttctgcctatgcccaggactgaacaaggacagcttaaaggttagaagcaagatggaatcggttaggtgtgatttctttccactgtcataatttcctcagttacggttttgcaaaggcggtttcacctccagcaatctgtgattgtcctcatggctccaggccccagagcctgggactgttctgagccctttcctcttctttctccatttctttctagtgtccacccccttaaacccaccccaccccgacaccacactttgaccttgaggaaccacgtgttcatacccccgtcccctcctccaggctccggatggtggagacgctgagcaacttgctgcgctccgtggtggccctgtcgcctccagacctcctccctgtcctctacctcagcctcaaccaccttgggccaccccagcagggcctggagcttggcgtgggtgatggtgtccttctcaaggcagtggcccaggccacaggtaagggggactgtggttggagggaccagaaggacaggagctcagccagagaaaatgcagaggtcaggtggatcggagagatggtggagagaggctgtgaaacrgggttgaggagaaggctgagagggaggagagcctgatggggacagatttgcaggggtgtgggagagaacacaggggcagcagttcaggtgagggaggaccaggcatgtgctgggacrgggggtgtggggtgcagggaaggggagggctggggaaagatgctggaggcagagacagcaggatttgggggctgagatggaaggttggggcttagagaggtctgaaaggactttgactggagggattggaaggagtgggaggaaagaacatggtgtgtggggggccagcagcctgaaggggcccagccgccagtgstgggtggaaaggctggtgatgcggatggcccgcctgccaagggcctggagtgctcggtgcttatcatgaggacactggggagccatggaaggattgtgagcaggcaaggggcagcatccagggggaagaggagctggaccccagctgtagagaagagagaagagggcaggagagatctggcagacagtggatgtcagggtgaggaggcaggaggaatgcctccaggatctccctgggtgactggatggatgacaaagccgtcggcagcttgggaccctgrtgaggggcaggcacctgcagggggcattaatcaccccagygtggggcaggcatgagcaacctctatctgtgggcccccagggccatccaggaagtttggaaacgggtctgaggctcaccaggtctggctcagagcccagggttcgggctggtcagtgtaggagggatgaccacccactggtgggttctcatccrcctggggagaggatgtgctgggagcactggagctggcttagggccatgggcaccaacatttagggaagkcrggggtttcaggctttcatgagaggacagagggactgagaaaggttgacttggatcaggaaagagttacgggcttatgggagccagaggagatgagactcaagattttctcactcattcactcaagatgtgtttcgggagcactgacgtcataccagacccagcacacacggggtcggttaagaatactctgagctgcrggtaacagaaaacccaactacattggcttgsacaaagaaggatctgtttttcycacaaaagaagttgcagatgctggctttcctgcccaacaatccatggcagctggggcctcttccactgtctcatgcctccacccttgatgggtcgtgttcacactcacactgctctccgtgccgccttgtggcccccgtggctgtccaagtcccgggtttgttgtgagttgttggccactttggagaatcccgtcccctttgatgtgtgattcgataacatcccattggtgaggctcacactgtcggctctcccatttgtggcagtttcgcttcaggcgcgaggcccaccttcatgtgctctgtgccgcggctgagcatctgtggactgaaacgcgcacttgttcgttcattacggattgctttccctttcattcttttctgtgttagggttagggcgttatctcgataggtgtaggcaggttatgttatctccacatttyatttcagaccagaaaagaggtgacacacagtatctggtgacaagggtgtgttggttctgataggttgagagctgcttgtcacagctgtcaccgtgacttgaggctccatctscccagctcttacacccaggcgcccatgggacccagctctggacagtaagtggggccagagcacatcccacgtgtgtaagctggtggctccaaaacaagccgaagggtctttggtcactgccagagatgttcatgacccgccaraggaaagggtcccttggccttctctgctctgtccacactcacttccctagtgaccttgtcccgcctgtggctttaaatcccatccgcgccctgatgacaccggcccagatgtctcccctgagtgtggtcatgctcgttcwtccacygctttcctggctccacgtgcatgtttgctgacttcctacagccagcrtggctgggggcacgttccccaagccatttctaccaagtgggtgagcgttagacacagggaggtgcagggactcgccacaagcacacacagctggagaaaattcatccaggccgcgagagaagggagacacgcagccacaactgtcaccctygacacccccacccgcgctctcccctgaaggtcggcagctggagtccrtccgggctgaggcagccgagaaaggcgacgtggggctggtggccgagaacagccgcagcacccagaggctcatgctgccaccacctccgctcactgcctccggggtcttcagcaagttccgcgacatcgccaggctcactggcagtgctgtgagtggggcgggccgctcatcccggaccccagacatcttggggacctgaggccacgcgtgtgtcaggaaggcttctgggtagaycatcagctgggtcgcatcagtccttctcatggggtgcacagcttcctctcctccttcctgcacccaakcctaggggagtctcctcttcagagtctagcagacctaatgccatggctgccacatgacaggactcagtaaatacttcctggataaagggagagggaggcaaggaggagagctagctcgttcttactgccctaagagtgggcggccatgggagctgggacatggggatggggtgagggaaggagggcaggtattccaaaatgcagggcagcagcacggctggtggggtggaggtgtggtccctgccttcaccaggcactgacrgctcttcccctgactctccagtccacagccaagaagatagacatcatcaaaggcctctttgtggcctgccgccactcagaagcccggttcatcgctaggtaagcgtgtgggcctgtgaggctacagagsgggactgcaggctcggaggtgaaaggagggagggactggcagctggaatcatcacaaatgccctgaccatccttggatgagaaaarcatgagcaggaggcccagcccctaaagagtgggaagggacaccatttcctttcacaggccagcttctgtcccttggtagtgctgtctagagaaggcccctgggcccctgtgggtgaagcatgctgtgattgattggtgaggtctgcctcggcttgggcgcgggccctgcagcaggaagccagggtttgtttgccatgacagtgagagcaaatccattgagggctcacatcatggarcatttcttgggagccctgccctgtgccccgtgccttacctcatcagttcctaccagcaactctgtgagactggtcttgttaccctcacctccagtttatagaaggggaaatggagacatggggaggcaaactaagccacttgtctcctgccactggctcaaagcaaggaccatgctggggtcctgaccatyacagtcaccagggcgggcgccaggctyagttctctccctgactcatcctcctcaagcctcgccaacccctcagggcagctgagatgggaggtgctggtgcacctacttgtgcccctccccagtctatgctagtgggcaggatcattactgcctggctcagtttcctcatctgtcacatggggctgtgtgatatctggggtcccttccaggctctgmagattcttctggtttttgaggagagggtctacrtacatcaaggtcgaggagatcagagaagggaggaggcaagattsgggaggtgcagacaagcccccttccctggcctgctctctccccaggtccctgagcggacggctgcgccttgggctggcagagcagtcggtgctggctgccctctcccaggcagtgagcctcacgcccccgggccaaggtgagctcctgtggcccgtctctgcatccctcgctggagttacctcaggcttcccycctcctcttcagaggcccatgcccgccccttccccagcgggcccctgccataccaggctcctctctcctgggtgggggggagggggcgtcttgggccgcggcatctgcattccttgccatacagcaaaccacccactgcaccctggtgtagccaaggatgtgggtgccttccaaagcctctggtgggtcttttcttagaattcccaccagccatggtggatgctgggaagggcaagacagcagaggccagaaagacgtggctggaggagcaaggcatgatcctgaagcagacgttctggtgagagctggrcagtgggtggagttgccaggggctgtgggcagagtgccagggtgggggtggagccagaggagcagtgggtggggccagtgaagtgacggacaggcatcacgagtgccggtcacggggtgactgagagcagaggtggtgatctagacaaggctggtgcttgacacaaggatggtgacaaagatcaggaaggtggcaaacagtgaagggtcartgaccccaggagaggtatagaaagacrctggcagcggccaggcacagtgkctcaygcctgtaatcccagcacttgggagcctgaagcaggcagatcacttgaggtcaggagtttgagaccagcctggccaacatggtgaaaccctgtctctactaaaaatacaaaaattagcctgtaatcccagctacttgggaaactgaggcacaagaatcatttgaacccaggagttggaggctgcagtgagctgagatcacgccactgcgttccagcctgggcaacagagtgagactgtcttaaaaaaaagaaagacgctgacagcaagggagggcagccggcaacatgaggtttctgagtkccagacagggctgtgcatgcagaaaggccttaagggacccagagaggagcaggtgactgacacatggtgaagggtcttgacagtcatggagaggacatccgtggagcggccacgagggctccagagagagccatgtggagggacctaggccagcagctgacccagggctggtgactccaagatcatgactgccccagagaggatgtcagaggcaggagggccgatggcagttccacagatggcctcagagcacctgctctgggccagggccccccactgggtgctgagcagagagtggtgaacaggcccgggcagcaagctcaactctgcctgcacgtggggctctatcagctgctgacctcaggcctaccccacaccagctacatcaaaatctttgtaggtggaacctagccttgaaaacctttgtctatttttattttgtttgagacggagtctcgccctgtcatccaggctggagtgcagcagcacaatctcmgctcactgcaacttccgcctccagggttcaagtgattctcctgcctcagtctcctgagtagctgggactacaggcgcgtgccaccacccccagctaacttttatatttttagtaaagatgggatttcaccatgttggctaggctggtcttgaactcctgggctcaagtgatgcacccacctcggcctcccaaagtgctgggattacatgcctgtaggcatgagccaccatgcccggccaaaaacctttttttaaaaactgtattcttgagtggtctcmtgtgtagccgagtagagaatcgctggtctcgtggtgacagatagggaacaggggcaaggccagactaagggagacaaagcaacagatagtgacacgaagggagagcacagagacagggtggcaagaggagcttggcaggtggtgactcagtgggcagaggcatccaggagcccaggcttctgggagcaggccgagctctctttccaaactgtgtgagttctagaaaggcttcccctatcttgttctcacccgccaccccagcgaggttcccgacctggaccgaattatccccgtgctgctggagcacggcctggaacgtctcccggagcactgcaagctsagcccaggtacaggccccaggggcgctcaccagcctggcagcagccctgctccctcctgagtcggcgtgagggtggccatcgtaggcgcccctctcagaacttgcagagtcctctcccccaccaaaaccaaatgctcctccctggtgctgaaacccactgcttttctccttggaatttccccttgtggagtagatagggtgtaggtgacactgctgtgataaacaggagccgggcgtggtggcgtgtgcctgtgatcccagctactcgggaggctgaggtgggaggatcgcttgagcccaggagttcaaggctgcagtgagccgtcatcgcgctactgcactccagctgggcgacagagtgagacaataaataagtaaataaaaatgggccagaaggcagtgggtcaggccagatagaatttctttctgtcacacagaagtgtccagagcaagggaggtggccagggaaggtacaggtgtgcagytgtgtcccagggatgaccyggggacccaggttcctgtgtccctctgmcctccaaaggttgtcrccccaatgtctgtgatcaaatgtggctcacttccctgttctaattgtgggaggagggacgcagaggagggaggggaggcaaccagattccttgcaaggatgtgagccagacattgcacatgctgcgtgggttccaatcacatggcctttcccacctggaaggmaggccgggggctgtagtccccagtgggaggctaggtccccttctaaaacgtgggaggcttcgtgactgaatagcaagaaagcagaatggtcctggggcccattagcagttctcctctccatgttccccctctaatccattgccttccctctcctctaactcactctcctcctttcccagggattcccctgaaaccaatgttggcccatcccacccggggcatcagcgaggtcctgaaacgctttgaggaggcagctttcacctgcgaatacaaatatgacgggcagagggcacaggtatggggagtgggacatgtcccttccayagacaggaaaacgtcaaagagcaggggtgtggggtcactgaggcctgagcttcaagccggcctgcgccacagactgccgagccctcgctcatctctctgggcttcagcatccacctccatgcagtgagtgtgttctttttttttttttttttttttttttttgagacagagtctcactctgtcatccaggctggagtgcattggcatgatcttggctcactgtaacctcyacctcctrgcttcaagtgattctcctgcctcagcctcccaagtagctgggactacaggcgcccgctaccrtgcccggctaattttttgtatttttagtagagacgaggtttcaccatgttggccaagatggtctcgatctcttgacctcatgatccacccacctcagcctcccaaagtgctgggattacaggcatgaaccatcgtgcctggcctctagggtgtggtcttaactacctcaccagcttatccgaagctacaatcctccagagtcctgacygatgatagtgggagctcatgaaacgtgggctccgctgatgctgctggtgggtgtgttcattttaacagccgttctgggaggtgcctacatgaccccttcatgccgtgacgtgcatgtgtgtcctgtgatccagggcctcaggcgtccttggtcctggggtctgtaagaatgtgttgtgtctcttctgtcctggcaagtgtggggccttctcacctggggataggtaagcaggcaaagtgggtgggagccacagggctcggggcagttasaggaagtggacccctgaggagaccagcctggccaacatggtgaaaccccatctctactaaaaccacaaaaatgagccagtgtggtggcgtgtgcctgtagtcccagctactcgggaggctgaggcaggagaattgcttgaacccaggaggcagagggtgcagtgagccaagatcgtgccactacactacagcctccacgataagagtgagactccatcttttaaaaaaaaaaaaaaaaaagggtggatccaacagacacaggatcagagatggatctccaaaatagtgttgagaaaaaagacacaagatgatttacgatagtgacaatgatttcttgacaactgttcctggaaataataacaaacatataagatgctatatatgccgccctgctcaagggctgtgaccggactgtcttaaaataaatagacatagaggctgggcgcagtggctcacgcctgtaatcccagcrctttgggaggctaaggtgggcggatcacctgaggtcgaaagttcaagaccagcctggctctactaaaaatacaaaaattagccaggtgtggtggtgggcgcctgtaatcccagctccttgggaggctgaggcggaaggctctcttgaacccgggaggtggaggttgcaktgagcagagattgcaccactgctctccagcctgggcgagactccgcctcaaaaaaaaatcagaatgagatctagagcataatgacatttaaacaaatcagcacccacatgcagcaaggtgcaygtgcctacatggggagaggtgtagggattggaaatgaagaagaaaatgatggtagggccttccagagcagggctgggaggtgctgttggaactgaggagatgattcgctcaagtctctgcaccagttcctcctccagagcttccagaaccttctaccagtgcaggtggggtcagaagagaaagctgaggccacatgaggggactcagctgatttcccctcccttctcccatcgtgacagatccacgccctggaaggcggggaggtgaagatcttcagcaggaatcaggaagacaacactgggaagtacccggacatcatcagccgcatccccaaggtgggcgtctgccwcacacttgcactctgccaggrtctgtggtcaggggtgcaaaggcctgaggcccatctaggccagtgtggcacagtgcggggtttattgggaggagatcaggttgcgtttggctgcaaatgacagagcactcagtcctgcgtggtgtragcccatrtgattttttctcacatctagaggtgggcaccccagcaccgacttggctgagcactgatgtccccctgaaccaagcttatcgctacctctatcccctgctgtccttggctggttggcttttagtgccaatgcttgtccccttagagtttcccaaacagatgtcattcttccagacagaaagagggaaaagggattctagcttgagttaacactttcctggacacctcccacccacaacccctcccccgccgtggactgcagctgggagtcactgtccagcactgggttccatggccaccctagtgcaacaaagcctcrgaaagccagagtctaactctgcagcctctccagccaggaacgcggggaggaggagtcaggacgagtttggagggggccagcctgtggataggccccaagcctcagaaatagcagctcagagtcatacagggctgggcctcacaggccccagagttggggacttctctgcacccagtaggggtctcgtgcctgttcgaggagtmccctatcaaagagcctttctctttgcctgcccctaattaaataggaaataagttatttaagaaagyagggggcacggtgcccatcattctgcctgttagagacagtgacrgagagaggcacagttcagtgcacgtgttaggggagctcctgttccgtgccaagcactgttctttaaatcaattttcttaagatgtaatttccctaaaagttagtgattttcagtgtgcactatgctgtttgatgagttttgaaaagttcatacacccaagtaaccgacaccccaatgaatgtataaaatatttccacattctcatcattctaacatatttccgctgggcgcagtggcccacgcctgtaatcccagcactttgggaggctgaggcgggtggatcacctgaggtcaggagttcaagaccagcctggctgacatggtgaaatcccrtctctactaaaaatacaaaaattagctgggtgtggtggcacgcacctgtagtcccagctacttgggaggctgaggcacgagaatcgtttgtacccaggaggcggaggttgcagtgagctgagatcgggccactgtactctagcctgggtgacagtaagactccatctcaaaaaaataaaaataaaaaatcaaatatttccttgtgtccctggccaagcaaggccccctcctctgyccaacaccatgcatccaccagaggcaaccccaggtctgctttttggtcgccacaggttggttttacctgttctagagcttcctgttggtggtataatatggcactagtctcttgcatctggctgcttttgctcattcgttcagcaagtatttactgggcatctgctccgagctaggccccatgctggaggctgggagtgtaacaggcctgccatggtctctgccctcactgagctcacagcccagcagagcaggcagaccttcaccagagagtcctgcagctggctctgtaaattatatgtggagatccgggctccacaggaaaggaccagcattctgtgagcctatgtaacaaacaggcctggcyggtgacagtggctcctgtaatcccagcactttgggagggcaaggcgggtgaatcacttgaggttaggagttcgagaccagcctggccaacatggtgaaaccctgactactaaaaatacagaaattagctggatgtggtggcrtgctcttgtagtcccagctacttgggaggctgaggcaggagaatcacttgaacgtgggaggcagaggctgcactgagcggagattgcaccactgcacgccaggctggacaacagtgggagactgtctcaaaaaagaaaagaggccaggcgtggtggctcacgcctataatcccagcactttgggaggccaaagcaggcagatcacttgcggtcaggagttcgagaccagcctggccaacatggtgaaaccgtttctactaaaatacaaaatttatccaggcatggtggcatgtgcctgtaatcccagctactcgggaggctgaggcaggagaattgcttgagcctgggaggcagaggttgcagtgagccaagatcgcaccactgcactgcagcctgggcgacagagctagactctgactcaaaaagaaataggtgtggcttagacttggtgtcagggaagctacctggctccaggatacaacatgaatgctgcccccggcttgggcaacagtgttcccttgagggaaaagaaggcttgccagtggaggagacagacaggggcaggggttctagagggaacggcacatgcaaaggcccagtagtggaagaggcattgcccayttatttgagaaacagagaggctcacgtgctggggtgaagagaggctcagggggccaggtgaggcgagggacgacccaggctgacccgggagagtccccccagctttggggaatcatggggatggtttttagcagggaggtgctgtgatcggatttggggcttgccagtgtcaccctggctgctatggggaagctggattggaggggatcggtgcaggacagggaagcccagtaggcgaggctgagcagggagttggtgggaagtggayggcttaggaaatcatcaggttcactgaggaactgaatgtgggtgacaggaggagggagatgacaagagctcctaggtttccagcttgtgagaccaaatattacattctcagagacattagtttctgtctcctcttggtggggaataaaagaaaagcatctrtgtgcacctgcctctttgttagtgcatcttgagagctgcagaaggaaaagggaatttatctccccgtgtttgtctttccacctcatcttcyacctctctcaggccctgggtctctcccttcacttttcagattaaactcccatcggtcacatccttcatcctggacaccgaagccgtggcttgggaccgggaaaagaagcagatccagccattccaagtgctcaccaccckcaaacgcaaggtagcatcacccgctccactgcctgccaaggccccgtacttcctcatcttccacccagtcctggctgtgggtcctgcccagtgcccagaagggcagagtgtcagtctggatgcacttctctcagccttctgcagaatggctgccacagctccagccatcgcattctcatcccagcatcccaagtaggaagaggggaagggcccttttcgggcatctctgttgttttactatgaaagaagatctgttctggaaaaccccacaacctgcaccccacaggtttccccttttccatctcattggccagaactgtgccatgtcactgccattagctgcagaaaagtctaggagagcaaatatctggtgaaggggaatgaggttgtcggaattagctragagccgttaasgatccagcacctggagccagcagcatggccgccytcacagatgggcagccagttaggtggcgagagggagaccggtagatgaatgctgtcggcctcaggcacagtgccccgtctcaccttcctgcactcacgaactccgttgtgccccaacccaggaggtggatgcgtctgagatccaggtgcaggtgtgtttgtacgccttcgacctcatctacctcaatggagaggtgagttccagcttcctgtccaggggcagctgaggggtgacggggtggggtgtgagcctggcagctgcccctctgacttccatttccgactctgccacttcacatggccaggaagccacacttgggcagcagttctcaaagtgtggtctgaggacccctgaggttccttaagattctttcaaggacatcttcaaggtccctctctttccaactccacattggcgtgaggtggatcttcctcaggtcctgcaacgagaagagtgtgtcgtagaagcacgcaggagaatccrgcctctgttaagccagatattagaggatttgcaaaagtgtaaaataatgcctctagtctcaccactttctcaaaacttgggttatgtttcatcaaaatatgttatttagagccaggcactgtggttcacgcctgtaatcagagcactttgggaggtgggaggatcgcttgagcccagtagttcaagaccagcctgggcaatatagaaaagaccttgtgtctattcmaaaaaaaaaaaaaaattaatattatttgggtgagcatattggatttatttttttaatttctcattttaaatttctaataggtgtaactataatattatgtaacccacatgaacaagctctatggagtgagtcttgaatttttttttttttttttgagataagagtcttgctcagtcacccaggctggagtgcagtggtgagatctcagctcactacaactgcctcctcccaggttcaagtgattctcctgcctcagcctcccaagtagctgggattacagatgtgcaccaccaggtccagctaatttttgtatttttagtagagacggggtttcaccatgttggccaggctggtctcgaactcttgacctcaggtgatctgcccaccttggcctcctgaagtgctgggattacaggcgtgaaccaccacgcctggccttgaataatttttaagagtgttaaagaggcctcaagacaacagtttgagaacagcttgctttaggatgtcaggaatctggagccaggccacatgccgtcatatcccagccctaaccttcctagcggcatggctacagatgaatgactcagcctctctgtgtgtcagtttcttgatctacagtaaggagctaacagtggcaggtgctttrtctgttagggtgagggctaaacagtgggataggggtgtggaactcagtagttagtacatggaagctctcaaaaaaaattagctgyaatcatcaatatcccagataatcttttttttttttttttttgagatggagtctcactctgttgcccaggctggagtgcagtggcatgatctcagctcactgcaacctccgcctcctggggtcaagcgattcccctgcctcagcctcccgagtagctgggattacaggcgtgcaccaccacgcctggcgaattttttgtattttagtagagacggtgtttcaccatgttggccaggatggtcttgatctcctgacatcgtgatctgcccacctcagcctcccaaagtgctgggatttacaggcgtgagccaccacgcccggcccatcccagatgatcatctggtagatgaaccacgatcttgtggtaacttggtcacttctgtcttattaatggatattgatgatcaatcatcttttcaggtttgttggccgcgtgcatttgttccgtgacttgcctccgcgtgtcttttgcctgcctgtctggtgggttctcactcatgtcttcctggtctgtaaacgttttttctccgttaggcccatctgtccttcgccgggacaggtggagctggtagtggttctaatgcagagatgcctttgatgctcaaacccccaatttcatgatgcagactgatgtttcactacatgaaattactgtaggaagacagtcagagtctgatttttgtttcccgtgatgtctggggagaggaaagtcaagtatcaggtgctttccaaacactggatactttgtgggtttttctgcaggatttgatcatccctgctcagctggttcctttgtctcccatgagcatttcaaatatttcttctcattccttcaaatattccttctttaaaatttattgatggcctattttgttgtataggacttgtttgagctattacttttacaaatttttttattagtagtagttgaacatggatgaactatttttatgtagtcaagtatatcattttttttctgtttaatgtgtcctcatccccatgattttttttttttttttgagacacagtctctgtcgcccaggctggagtgcagtggtgtgatcttggctcactgcagcctccgcctctggcgttcaagtgattctcctgcgtcagcctcccaagtagctgggattacaggcacccaccaccacacccagctaatttgtgcatttttagtagagtcggggtttcaccatgttggccaggctgatgttgaactcctgacctcaggtgatccacccacctccgctttccaaagcgctgagattacaggcatgagccactgcagtagcctacatttctaattttagagcttctagtagccatattaaaaggtaagaagaaacagrtaaaatcatattttctttaatccaatgtctaagatattatcctttcaatgtgtgatgaatataagaaattattaacatggaattttacactcttttcttggattaagtcttctaaagccagtgactgttttgcccttggcacatctccgattgaacttgctacatttcaagggctcaattgctacacatggctggtggcggctacactgggtagcacgggctcagctgatcttcccagacgtgccctgagtaggtattgctgcattttacagatgggagctctgaggtacacagagggaaacgcttgcctgaagtcaccagctaggaagcgtgtggctgggatgtaaacctgaaatggtctgaccccagataaattgtacctgcttaacccttgtggctcctctctctcatcttttcatacaaaatgttcatgagcacaattttacaacagaaaaaagctgtccatggaaaacacgtgaatgtccccctggagggcaagtggtgaaggtagtttaacatcatcacagagaagccctgagcaaagggcagaccagaaacactgcgcgtgggtggggaccgatcgaacaaaagagaaaagcaattcaaagccacaagacggattagtcagtgttgacatgtggagacaactgctttgtcctttgtttaaaaacaytcagatcacctccttcctctctgacacacactcttgcaaggtccagctggaactgatttcaaagcaaaacacaaaactgtaaatgtgctggaaaaactcagtgaaaacttttggaattctaaggaaaggaggactttttttttttttttwwaattatcttggggatgaggctggatgcagtggctcacgcctgtaatcccaacactttgggaggctgaggtgggtggatctcttgtgatgtgcacctgtagtcccagctactcgggaggccgacgcaagacagtcgcttgaattcaggaggcggaggctgcagtcagccaagatygcaccaccgcactccagcctgggcgacagagcgagattccgtctcaaaaaaacaaaaacaaaaaacaaaactgatgagatgcccgtaaagtgttaattcaagctccagcaaggccgcagccccccgtctgatgctcctgaagtcaccgactctaaatggtgtcgggccctcttgccagtgactagccccatgctttaagctctcagaatccttctgacatcagggttcttccctctcaaggctttccacgaacsctgtcactagttgtgacccgcacatgtcctgttcgcctcacatttagggcttattgtctttattctcacaaagatgtctyatctctcttctccctgccggccctgcagtccctggtacgtgagcccctttcccggcgccggcagctgctccgggagaactttgtggagacagagggcgagtttgtcttcgccacctccctggacaccaaggacatcgagcagatcgccgagttcctggagcagtcagtgaaaggtgagggtgctcacttttctctcctgaggtctgcagcttgcrctgaccccggcctcccagcctgtccccagtcctggaccgtttgaccagaatcctgcctgctccggcgcttgtgagccagggcttcccaaggaccacgcttctrtgtctccctcagactcctgcgaggggctgatggtgaagaccctggatgttgatgccacctacgagatcgccaagagatcgcacaactggctcaaggtgattctcgacccccaactgggccttctccaccccgggtctggaggtctgtcccagctaggcagtggatttcgagcctccactgtgtaccctgtctgagctcagggccccttttcacaatcccaccccagccccctgctgcaactgagttcagaccttctccctgctgcgagcccttgctcacgagttctgatggagaacagccccagcccaagcaccgcacatcccacgaggtgcagcgtgatgaggtgtctctctcctgagcctgccgcccgtgtcgggccaggctcttgggcaggaattaagccaggacatgaataagagaaagtcaggcaggagtgggcgccatgaagaaaagcaagtcagctccgggccagcaaggcggggctgggagtgccccggatgatcaggaagagtctttcccaaagtgagggacagagcactagggaggaaaacccccggtgcagagaccctgagggaggagcagcctctgcgtgtgcagggagcaagggcaggcgaggcgggaggtgagctcagagtggggagcaggccccagatgaggcagcacctggggccactgtgagataaaactggatcttcctcttgaaggtttcaggaagtcagtgggggttccgtgccgggagtcacaggttgtcattgtgcgaagctcctggggtttcccctygagtggaggacgggtgtgttgagggccagcgagcaggagcctgtcatcagtaagagttgatggatgtttgagtggagaggggcagtgaggggtggacaaggggactggagcgggaggcattgtggcactgagccggccaggcctgctgactagctcttcctgtgtacttatgtctgtctgtggctggtttccctccagcacagacctttcctgtctcaggaaatagcactgttgtgcccccagggctgagcttctgcctggcacatggttagcacttagtgaacgtttctgaaygaatgggaaaatgctctccctttggaggagtggccagagtgagttggccacgtctctgtcctgagggaaagacggcggcaaggctgactcctgaggtcccatcgatcccgcctgcgtttcccatttgttcttatttatttatttatttattttaagacggagtttcactctcattgcccaggctggagtgcaatggcacgatcttggctcactgcaacctccgcctcccgggttcaagcgattcccctgcctcagcctcccragtagctgggattacaggcacacgccaccacgcccggctaattttgtatttttartagagacggggtttctccatgttggtcagactggtctcgaactcccgacctcaggtgatccacccgcctcggcctcccaaaatgctgggattacaggcatgagccaccgtgcccggccccatttgttcttatttaaacctagaaacccttcccatgtccagtctcttcycaggggccatccttggggttccttctggaagttcccttcagacttacttctagtccctcctcagtccactgaggagcccctccccagcagtgagggccccrccttgggcgctcccccttctcatctcttgcctccccttctcccagctgaagaaggactaccttgatggcgtgggtgacaccctggacctggtggtgatyggcgcctacctgggccgggggaagygggccggccgrtacgggggcttcctgctggcctcctacgacgaggacagtgaggagctgcaggccatatgcaaggtcctggggaactggggctgatggcagaagcaggagggaaggagattagactcccgggggtatttcctattgcacaacccagaccgaggggtgctcacatccccctgtgaaggatccgttctccccagtttttatttactttttctggttctatgagcaactcttgcttcatatagaaaaacaggctgggatagaaagatgtcaggaatgtgtgtcagtgagagattgagattagctacaaatagtggtggctcacataagaaaagaatttttttgttatgaaatgagaagtgtggagggggcagtctgatgccattagggattcaggttcctcctctccccacatttttttttgtccccacattttttttttctgccatgtgcctctggcctcatcatcacaatgtggctgcaggagttccagccctcatggccatgcctgctccacgcaccagggaagagcaaagggggttsgaccytgagtcagcctcagccagtgaacaccttctgctcaagttctgttgctcatcactttgctccatggctcacccctagctgcaaggaattctgggaaatgtaaagtgatttactttttttcaagttaaagtttttcttaaagctgtgcacattttggactagattttcttacgtatttcctatattcccctctccaacaaatttgggtcttttgccacagaaacagaacaaaatatcacctagaatcgtaccacccagagacacgcagtagtgacatttgagggaatgttttatttacatttttgcaaagttgtgatccttctctatgagtaattttcttttctgcctttttaccctggaagtactttgttttcagtgttgtatatgcccttaagcaatatggcaacaggacctgaatgcccgcacaagagttttcaagtgctgtgccccatagcacatagtgctgtgtcctgaaccagctccccgtggctgtgtggggaagttgttgccggctttgttctgatgggtaatgtgattacttagtgtccgttaacctaaacgatcagtgacagaagtgacttttataaatcacaaatgttttggccaccaatctacattgtcaccattttgcattatttagaatagatttttaaatgagctattgtcaggacaaaaggcaaaaagaatccttaagactctcaatgcaaaaggggctttccaggtgaygtttatattggtgattattgcccacttgctgcgtatctgccagcatccagcattactgctaatttttagcctttcctattttggtaggtgaaagaagctcttggcagtgttaacattggagatgggctgggcatggccactcacgcctgtaatcccagcactttgggaggctgaggtgggaggatcacttgagcccaggagttcgggaccagcctgggcaacatagtgagaccccacctctacaaaaacttttttaaaaaattagccaggcgtggtggygcatgcctgtggtcccagctacttgggaggctgaggcaggaggattgcttgagcccaggaggtggaggttgcagtgagccaagattgcaccactgcactccagcctggataacagagctacaccctgtctcaaaaaaaaaaaaaaaaaaaaaaaaaaagactggaagtgaggacagccagttactgggcagtgaggatgtgggtgagcataagggagtgacttcctggggccagggagacagtggaagcagcaagagtttctccataaagcagaagacagggagtggttcacggcaggcctgctgggagaacattcccacccgggagtctctggatggatgctccgcacccccagctccctacttccctggttttctgtggatactgcgtagaccagagyggggtgggggccatgagtgtacacagctttagatggcaggagcaagtgctgggcctgtggcyggctgagcctctgacctcccgcttcctccctgcagcttggaactggcttcagtgaygaggagctggaggagcatcaccagagcctcaaggtgagccatggyggctgcrcctcagcctccacccctctccyccctgcccctgacagcacagtccttccatgcagggctcttggcttccaccatcttggggctccaggtgtgggcaggagggcagcaggcagtggagctggctttggagtccagcatctccaggttcatgtctcagcactgccrgctactagctggtgaccctgctcaagcagcctcacctccccaagccctgtgcctcattcacaccaggggttagccaaaggacacagcaggtgccatagctgctccttgtgaagtgcctgtgagccctgatcaatgtgaatgaatgttgtcatggtcacaggcatttcaggcatgagtgtctgtcctacatattggatctgtattagtttattttcatactcatactgctatgaagaaataacccaagacttgccgggcgtggtggcgcatgcctgtggtcccagctacttgggaggctgaggcagaagaattgcttgaacccaggatgcagaggttgcagtgagctgaaatcatgccattgcactccagcctgggaaacagagtgagactctgtctcaaaaaaaaaaaaaaaaaaaaaaaggatcatttataaagagaggtttcctggactcacagttccacacggctggggaggcctcacagtcatggcagaaggcgaaagaggagcaaaggcacatcttacatggygccaggcaagagagcgtgtgcaggggaactgccctttataaagccgtcagatctcgtgagacttcctcactatcacgagaacagcacgggaaaaacctgcccccatcgttcagttacctcccaccaggtccctccaygacacatggggattttgggagctatgattcaagacaagatgtgggtggggacacacggaccctgacaccatctctgtcccactctttggttctctctctccattgccctctctctctacatctctgtccctgtcccactgtgtctctgtctccttcctccaggtctctggccctttctctgcctctttttgtctttaatgtcctgcctcagcccccagggcctttcatttctttccatctcccattcctcccaactcccacctttctcaactttttacttcaagggggtcttgtttcttttcccttctttcactttctgtttctctttctatttctgtttacttcaagggggtgtcttgtttcttttcccttatttcacttcctatttctgtttacttcaagggggtgcctgtttttttcccttcctccctctccccagccctccaacacttggccttgactttgagattccagaccctctgttcctctcttcctctgctcactgcaggcsctggtgctgcccagcccacgcccttacgtgcggatagatggcgctgtgattcccgaccactggctggaccccagcgctgtgtgggaggtgaagtgcgctgacctctccctctctcccatctaccctgctgcgcggggcctggtgagtggcagaggacctggccgtggccctgtgtgggattctgggcgggcacacagagagcagagtagggaggggaccttggctcacatctgctcttccaggtaaggatcaggaagatgagcttgcattttatttgagtgtcagataaaaagatcaaaacattttttctttaaaaatgggccgggcatgggggctcgtgcctgtaatcccagcactttgggagaccgaggcaggcagatcacttgaggtcaggagttcaaggccagcctggccaacatggtgaaaccccatctctaccaaaaatacaaaaattagccatgtgtgatggcgggtgcctgtagtcccagctacccaggaggctgaggcaggagaatcgcttgaacctgggaggcggaggttgcagtgagccgagatcacaccactgtactccatcctgggtgacaaagcaagactctgtctcaaaaaaagaaaagaaaattcttttcttaaataaaagaattcccagggcaagcacagtggctcatgcctgtaatcccagcactttgggaggccgaggcaggcagatcacttgaggtcaggagttcaagaccagcctgaccaacacggtgaaaccccacctctaccaaaaaatagaaaaattagctgggtatggtgacccgtgcctgtagagacggggtttcaccatgttgactaggctggtcacaaacacctggcctcaatccgcccacctcggcctcccaaagtgctgggattacaggtgtgggccaccatgcccagccaagaacttacatttttgatctaatttttaaaaatgttttaccatgctgcacgttagacagccagggacccttagtaacaaggcacaggagccggtgtgtatccagcccttgctgtgcagtgggcactgtgtggtcatcagcgtgtcactcatagacactcatttaatcctctcaaaatccgtaagacgtagtgacacaaacatctccattttacggtgaggatgtagagccctagagagcctgagtaactgcccctgcatcacgcggctcctgagagttgggagctgggattggaatcccacagtcagattctagaacccataccctggcgccgtagttcagcctctcagcccgaattaccgtcattatcgtaacggctgtagcaggtggcattttttttttttttttttttgagttggagtctcgctctgtcacccaggctggagtacagtggcgcaatctcagctcactgcaagctccccacctcccggattcacgccattctcctgcctcagcttcctgagtagctgggactacaggcgcccgccaccacaccyggctaatttctttttgtatttttagtagaggcggggtttcaccgtgttagccaggatagtctccatctcctgacctcgtgatccacccgcctcggcctcccaaagtgctgggattacaggggtgagccaccgcacccggccaacaggcagcatttcttgagcacttactgtgcccgggtactgttccaagcactttgtcaacttgtttaatccttatgacaacccatcgttcggccccgtcatgtggatcaggaaacagtccagagtggaggagggaggagactgagcagggggtcgctggggctggaccgcaggagtctccatcccgcttccgcaggtggatagtgacaagggcatctcccttcgcttccctcggtttattcgagtccgtgaagacaagcagccrgagcaggccaccaccagtgctcakgtgaggtcctgggaagcaggggtgggccgcccagctgcttggccctaccagctttttagcgtggtggcctctctggaaccttgtggaggtgggagcagccagggagcttctgaccaccccgtcccaccctctctccgcaggtggcctgtttgtaccggaagcaragtcagattcagaaccaacaaggcgaggactcaggctctgaccctgaagatacctactaagccctcgccctcctagggcctgggtacagggcatgagttggacggaccccagggttattattgcctttgctttttagcaaatctgctgtggcaggctgtggattttgagagtcaggggaggggtgtgtgtgtgagggggtggcttactcyggagtctgggattcatcccgtcatttctttcaataaataattatyggatagctactttgtgacagggtctgtgctgggctctgggggcaaagctgtcatgggtgtcacctgcatagcatgtagccatgtagccatggcctaggaactgccagagccagtgccagccatggaactgcctgcagtggtgggcgtcttctctatctgctctgtgcagtgtgaccgccactggccacctgcaatgcccgagcccttgacaggtggccagcatgacagaggatgcgaatttgttttgttttgttttgttttgattttgttttgagacagagtctcgctctgttgcccaggctggagtgcgatgatgagatctcagctcactgcaacctccaccttccgggttcaagtgattctcttgcctcagcctcccatgtagctgggattacaggaatgtgacaccacgcctggctaatttttgtatttttagtagagatggggtttcgccatgttggccaggctgatcttgaactcttggcctcaagcgatccaccctcctcagcccccctaagtgctgggattacaggcgtgagccaccacacccagccataccaaatattttatttaattgtattggacagcagtagtctaaaatctttacatacatatatttttttaacttgtttaaccttccagccatcccacagggaggcaccatcgtgagccctgttaaggaagacaaatgcagtgtcttaaaataacacagatgtattccctaaacagtttcggaggtcagaagttcaaaatcagttttactgggctaacatcaaagtggtggcagggccggttccttctgggagctccaggagagaaactgtgtcctttttccagcttccagaggccacctggttcctaggctcatggcttcttcctccgtcctcaaagccagcagcatcgcacctgcaaatctctctcctgaggtcatcaggtcacgtcctctcctccatcagatctctgtttctctcttccaagtactcaagtggttacatttagggccccctggatgatccaggataatctcatttcaggatcctaactcaatcccaaagtccctttagtcacataagatcacacattcacagaggccaggcacagtggctcacgccttggggaggacttggggaggctgaggtgggaggatcacttgaagccaggagttcaagactagcttgtccaacacagccagacttcatctcctctaattttattaataaaattaataaaaatgtaaaagggccaggcgcggtggctcacgcatgtaatcccagcactttgggaggctgaggcaggtggatcacctgaggtcaggagttcgagaccagcctggccaacatggcaaaaccccgtctctactaaaaatacaaaaattagctgggcatggtggcgcgtgcctgtaatcccagctactagtggggtgaggcaggaggatcacttgaatctgggagacaggttgcagtgacccgagatcgtgccactgcattccagcctgggcgacagagcgagactccatctcaaaaaaaaaaaaaaaataggtcacatcaaaggtttcagcgattaagacctggatatctatgggggctgttattattgcagccaccccacatgggatgatatgttagaggaaaaccatcgggaaatggtcagacaaggcaagcaggatgcctggaacacccacccagccctgggcaccacggggctggcttggggaaaacggctgcacgcggagcggggcccaggctcgggtcttccagagcaggaggcctctaaccccggggcccagcgtggaacaggagcttccgggcatgagagtgtcagggtgtcctgatactcccgcaggggggacacagggctcccagctgtcccctgcccctcacactctgtttctgcctctcacatctgccctccctccttcccttctctctcatcaggttcctctgcccttgtctcccacccgccctctctccccttccttctctatctgcgaggctttgctctctgccgtgcaagtctgtgccaggcttactttgctgtctgtcactgtgactcagcctccctgtctctcttcctgtgtctccatcatggtctcttgtgcacacaatctcttgggcattctgtttctatttgttgtagcccaagaagacaacattgccttccgagtctccttggggctagcagtggccctgtagccctgtgtgggcagacccaggggacataagcacaggggctgctggggacttctggagaaacatctttcctgaccaaaaaggacagccctggttgtggcagctcctcccctcctcctgccttgactagagatgatggctggagccaagtcaccaccttgtaatgatgaggaaaaagagtaacaaactctcctgacgaccctaaaccggcgaacctagggcagcagctgcctaactgtgggcttttgttcatgggagtaggggaagaataagccccagggcgattatgccactctaaaacatggctttcagccgggcacagtggctcatgcctgtcatcccagcacttcgggaggccgaggcgggcagatcacctgaggtcgggagttcaagaccagcctgaccaacatggagaaaccccgtctccactaaaaatacaaaattagccgggcgtagtggcacatgcctgttactcccagctactcaggaggttgaggcaggagaatcgcttgaacccgggaggaggaggttgcagtgagccgagatcgagccattgcactccagcctgggcaacaagagcaaaactccgtctcaaaaaaaaaaaaaaaaaaaaaagacttgtttctcatagctaagagttcctgatacagctctgccttaaagaactggcaaattagtgtgcatttgtgtttcaatttcaaataaaatgtttaaggcaaaaaaaaaaagtaaatgttgtatgtcaggggatccccacattactggctttgtgtggagaccatggttcctttgggcttggctcttcctccctgcaccagtgcagggccccaggaacacatctgccacacacggccgccatgtccctctgctgaagctagtcagggtcatcctcactcctcagtgaccctcatgatggctccaccaggtaggtacttttattctccccatttaacaggtgaggacactgaggggcacagggatgtaagttaccttccctaggtccactatctaggaagtggtgggccagggtttggtccatgctgtcagctccttgaccctgcatctataactactaactatactatggagagcctcatgagctcctgcgaggtgtagaaccttatcccgcaggcggggcagtggcatggtcaggtctaggagtgaaaagatcctgcgatggttggagttgcgggcactgaagaggtgagcctggcgttagggggagcaggggagaccatcttccccctggtgaaatcctgttctaaaattggtgatactcctgccttggcctcccaaagtgctaggattatggcctcatatctatttttaaaaaataagaattcaagctgggtgcggtggctcgcgcctgtaatcccagcactttgggaagccgaggcaggtggatcacttgagttcagcagttcgagccagcctggccaacatggtgaaaccctgtctctactaaaaatacaaaaataattagccgggcgtggtggcagatgcctatgttcccagctactcgggaggctgaggtaggagaatcgcttgaacccaggagacggaggttgcagtgagccgagattgcaccactgcacaccagcctgggcgacaaagagtaagactccatctcaaaaaaaaaaaaaaaaaaattcaaaacccatcgagttgggatgacgcttagtgctgggcttcaggaagagtaggcaggagggtagtatgggaggtttctaggagccactcttggaagcggtgctccccacagatgcccgattgcactgactggaactcggtcacatgaccacataactcgctcacatgaccacacctagctgcaaaggtgctgggaaatgtggtaccctgttgggaggccacttctgggcttcaaaccttcactgtgaatggagctcacaggttttctaaaaatggacattaaatgaaccagagttggccctaaggatctggctcactgcaacctccacctcccaggatgaagcacctgcctcagcctcccgagtagtagctgggattacaggcacatgccaccatgccgagctaatttttgtatttttagtagagaaggtgtttcaccatgttggccaggctggtctcgaactcctgacttcacatgatccgcctgcctcagcctcccaaagtgctaggattacaggcgtaagccaccacgcctggcctcaatatttctttttctgggtatttgagtatgatattatatatgatggttattagacagccagatgcataggaggattagctaatctgttttgaggaatacttatctccaatatagttatataacgacaacattctttttttgaatactggtctcgggtgcctaatgacagaagggtgacatcactaaggaagcctggaaagtcccagccctccacgtgatcccacggatgaaaatagctccgggtgagctctggaacagctgaaaaagctggagcaaccaagcagggcctacaagccgaggagggctgtttaaaggcgcaggggccattttaccctccaggttggccctgctcaggaccaggaggaaacacctccagcccgcgacctcctcccacagggggaaaaggaaagcaggaggaccacagaagctttggcaccgaggatccccgcagtcttcacccgcggagattccggctgaaggagctgtccagcgactacaccgctaagcgcagggagcccaagcctccgcaccggattccggagcacaagctccaccgcgcatgcgcacacgccccagacccaggctcaggcaagccgtgggggcagggagggctgtttcatcccgctggggcggccataaccaagtaccagggattgggtgcaattaaataacaggatttctttttcttttttattttattttattttatttatttatttattttttttgagacagcatctcgctctgtcgcctaggctggagtgcagtgacgcgatctcggctcactgcaagctccgcctccggggttcaagcgattctcctgcctcaacctcccgagtagctgggattacaggcgcacaccaccacacccggctaatttttgtatttttagtagagatggggtttcaccatgttggccaggctggtctcaaactcctgaactcgtgatccaccccactcggccttccaaagtgctgggattacaggcgtgagccaccgcgcccggctaggaatttattttctaacacttctggaagctagaagtccaagatcaaggtgttggcagggttggtttctcctgaagcctcttgcagaggccctaatctctccttataaaaccaatcaggctgggcgcggtggctcacgcctgtaatcccagccctttgggaagacgaggcgggcggatcctgaggtcaggagatcgagatcatcctggctaacacagtgaaaccccgtctcaactaaaaatacaaaaaattagctgggcgtggtggcgggcgcctgtagtcccagctactccggaggctgaggcgggagaatggcgtgagcccggaaggcggagcttgcagtgagccgagactgcgccactgcactccagcctagggcacaaagcgagactccatctcaaaaaaaaataaaataaaataaaccaatcaaaccaaattccaggccaccctcaggaccccactttaacttagtcacccctttaagagcctatgtctggccgagtgcgatgactcatgcctataatcccagcgttttgggaagccaaggtggaaagctctcttgagcctaggagttcaagaccagcctgggtgacataacaagacctgatctctacaaaacat

SEQ ID NO: 5709 - DNA, 26667 bp, Homo sapiens
cagttacttgggaggctgaggcaggagaatcgcttgaacccagaaggtggaggttgcagtgagcccagatcatgccactgcactccagcctgctgacagagggagattccgtctcaaagaaaaaagtaccacagatcaggtggcttaaacaaccgacacttattgtctcacagttctggaggctggaagtccaagatcaaggtgtgaacaggggtggtttctcctgagacctctctccttggcttgcagatggtgcctccctgtgtctacacatgattttcctctgtgcctgtccactccccaccttctcacctgtagaactcagggcttatttatgcttatttgttgactctctctcctcataataaggtgtgcagcagtgtggggtcaggaaccacatcactttgctcaccatggtgttcattctttcattcattgattccacaaacatttcctggatgcctgctagatccagtccgcccaggtcctgcagccgtggctgcatacaggtcagatgaggctcttgctcttgtagaatgtacctcctcccgggggggcaacatgacataaacaggtaaacaaagaagtcaacaggatggccatggagagtaagtgccatggagacgaccgaacgtgcggtgtgctgaggagtgaagtgaaagctttttaggaaagggtctgggggtctgggaaggcatcctgagggagagacctttcacctggggctgaatactgagaaggggtggccatgaggaagtcttggggaacagaattctgtgcaaaggaaaagtaaatgcaaagtgtctggagtgggaaagaccttgatctgtgtcttacctatgtctataacattctgtactaatataaaggcatatctgaggctcggtaatttataaaggaaagaggtttatttggctcatggttctgtaggctgtgcaagaagcatggcgcctgtatctacttctggtgaaggcttcagagagcatccaatcctggtggaaggggaaggggggctggcgtgttacatggtgagagagagcaagagagagagaagggaggaaagcaccagtttccttttaacaaccagatctcaagtgaactaatagagcaagaactcactcattaccgcagggaaggcaccaacccattcatgaaggatccactcccatgatccaaacatctccctctgggccccacctccaacactggggatcacatttcaacatgagatttggagaggacgaatttccaaactatatcagtctattcgaggaacagaaggaaagctgttattgctggatcagggtaggggaagcacggaatgaaatgtgattggagagatggacagagatcagaacttgtgaattctggcaggtatcatgacattcgatgtaggccaaagagttacctcctagcccagctcctgatacatgcttaataagcgtagtgttggataaataaacgtttacgtggtaaaagtagatcacaagagctccacaggaggaggtggtggagctccaggtcttctcaatgaatgaaagaatggatgaatgtctttctcctaagtcatgtatgacctgtagaggcttccaggtcttctaatcttatccagtgtgcaacactgcctacaaagcacagtggtaacttctaactttcctttctccccaggctctactacccgaaggatagtgcccgaagttgctgcttggcatagatgagcctcagcttccagggcactgtgggcctgttggtctactagggccctgaagtccacctggccttcctgttcttcactcccttcagccacacgcttcatggccttgagttcaccttggctgtcctaacagggccaatcaccagtgaccagctagactgtgattttgatagcgtcattcagaagaaggcgtccaaggagctgaaggtggtgaaatttgtcctgcaggtccctcgggagatcctggagctggagcatgagtgtctgacaatcagaagcatcatgtccaatgtccagatggccagaatgaatgtgatagttcagaccaatgccttccactgctcctttatgactgcacttctagccagtagctctgcacaagttagctctgtagaagtaagaacttgggcttaaatcatgggctatctctccacagccaagtggagctctgagaatacaacaagtgctcaataaatgcttgctgattgactgatggattagctgtgtgtgtgtgtcttggtctgccaccacccctgctgcggcccttttcaccctctgtgtaccctttacttgttcctttcttcccttccccctttcctttccatcttcttccatctatatctcagcaattaagcatggtggttccacagctgggtttggatcttacttctgttatctgcttaccatgagaacatgggcaagagccttcgcctccatgccccagttccatcgtctgtagaatagaccatcacggagcctgtatcctagaaaggcttaaatgagttcatgagtctcaagaccttagaatagttagtctggcaccgacggagttccagagcaattattattcatacaggctttccagaattaaagcaggactgttatgggatgaattgtgtgtcccacccccaccaaaagatgtggccattgtaacccccagtgcctgtgaatgtgaccttgcatggaaataaggtctttaccaatgtcatcaagtgaagatgaggtcactcgtgtggaccctaatccacaatgactagtgtccttatgaaaaggagagatttcgccgggcgcagtggctcacgcctgtaatcccagcactttgggaggccgaggcaggtggatcacaaagtcaagagattgataccatcctgaccaacatggtgaaacctcatctctactaaaaatacaaaaattagctgggcatggtggcacacacctatagtcccagctactcgggaggctgaggcaggagaaccgcttgaacccaggaggtggagcttgcagtgagccaaatcatgccactgcactccagcctggtgacagagtgaagactctgtctcaaaaaaaaaaaaaaaaaaaaaaaaaaaaggaaagaaaaggggggatttaggggagggagagcattatgacaaatacctaatgcatgcagggcttaatacctaggtgacgggttgattggtgcagcaaaccagcatggcacatgtatacctatgtaataaacctgcatgttcagcacatgtatcccagatttgaaataaaattcttttaaaaaagggggggggatttaaagacagagacaggcatgtatacagagaggaaaccatgtgaacatggaagcagggattggggtgaggctctactgaccaagggctgccaaactattgccagcaaaccaccagtcatccgaaagaagaccttgatagcagaaggatcctgttcagaattctgtgttgcattcagtcgtagcttttttttttttttttttttttttttggacagagttttgctcttgttgcccaggctggagtgcaatggcacgatcttgggctcactgcaacctccgcctcctgggtttaagcgattctgctgcctcagcctcccgagtagcagggattacaggcatgtgccaccatgccgggctaatttttttgtatttttagtagagacggggtttctccacgttggttaggctggtctcgaactcctgacctcaggtgatctgcccacctcagcctcccaaattgctgggattacaggtgtgagccatcgcgcccagcctcggccatgtcttcttagtctcctccaatctcgaacggttcctcaatctttccttgattttcatgaccttgacatttttgaagcttacaggccagttattttgtaaaccatccctccatgtgggttcgtctgacgtctgattatgatgagattcaggaatcttacagaagcgatgctgttctcgtgacatcctgtcaggtggtgtgaaattccaacttgtcacattactgatgatgtccactttcattgactaagatggtgtttgccacgtttctccactataaagtaactcctttgaaattggtattttgtagggaggtattttgagctctgtaaatatcaaacttctcacttagctttttatttatctgagtatggactcctggtttcttctgtggtcctgtataatttgttactatcattatttattttgactctcaaactgcccagtatggccaatggagcttcttcaagcagactcctgtgttctttccacatgttctcacaacactttgagcaatttcttgctttaagcataggacgtttgtaggctcatcttgttctttttttgctctagacatggaatcagccaaatttcctaggcactctggttccatttggtggagaatggtatatagaagtcaagatttggatgctagtggtgctcattcgtatgggccatcattgtttctatgttctcttagtggagagagctagagaatatgtgtacaaatgttcctatacacactgaaactatgtgtttatttttatctctctatgtataattgagatccatgaggacataccaacgcctccagttatagtccaacaccacagggctcattcgactttcctcctttctgtcttagtaactcccttttccaacagtaggagacctggcccccattccccttactcactgtgtgtagccaatttcccttttcctttgccatttcacccctgtggggatgtctttcccagcctagtctggcttcaacaccatacaccatgctattcccatgagtggacatttctctctctgcttgggttatgacaacccatgccagatcccctctatgtggcctccttcctaattgccttacagtgcaaacctccaccccagacaatgcctgcatataaatgcccccgccccactcagctcatgttccaacactgcacaccaagctgcccatctgtggatttatccccaccatctccagccccaacaccctgggtcatgctgcccctctatgtggacttctcctcaccccactaccccactggaatgctggctctccacgccagatggcccccagccccctcctcccctaaccctacctagtgtggagtcgcaaaacccctttgggctttgacaccaccataacttcacaccctccctgacacccccaccttgctttttccctctaaatcattcaggaaagacagaaggaaagagatgaacagaggaagagcaaatgccatgctcttagtcaccgtgtacgcccacttcctgaagtccatgcttgcatcctgctcactctcacacattcccgactcacccaggaaaactccctgaggccaggggtgctgagctctccatctcactgcccagaggccagtgttggagtgacccttcacatgcttgttggaacattgaataaatgatgccgtctgctctaatcctccattttcttttcttttttttctttttttttctttttttcgagacagggtctcactatgtcagccaggctggagtacaatggtgcaatcgtagttcactgcagcctggagtgcaatggtacaatcatagctcactgcagccttgaactcctgggctcaagcaatcctcccatctctgcctttggagcagctgggactacaggtgtgcgccaccatgcacggctaatttttttattttttgtaaagacagcctctccgtatgttgctcagctggtctcaaactcctgggctcaagcaatcctcccacctcagcctcccaaagcgctgggactacagacatgagcaccacatccagcctctaatccccatttataaaatgcactttccaattccactctggggataaaggcgtcacagaacctgactctgcatttccccacccatatcattcaagccagatggggaggcagggacagctctggtccctccccaacccgggtagagatttccagcccagctgtcacagctctaagacaccgggaccgaaggagaagccaagagaggcaggaagaggtggcaaaggagtgctggagaagataaggaggctgagctccgacagggagcagggaggaggggccatcttgagactggtgccctgcgagctccaccccacccctccatgcagttccccatgggccccgcctgcatcttcttgaggaaaggcattgctgagaaacascgggtgaggtggggagtgagggggaagggcggtgggcggggcaaagggagcaggggtgtgggacaaagaaggggacatgatggtgccacagaaccaggggaacaggtggatagagcaggagctgagaaggtataagaaattccaaggaccctggtggggtcatgtaagccagtgagataaatgggtgggggtaaaatcaaaagtcaggagcaaagagaaggagagaaaaggaagaaaaatgaaaagggaaagtgggatgatgtcattgttgagattaccatcattcttttctatggatgctcattgtgataatggtggtgatgatggtggtggtggtgatgataatgatgacgttaataacaatagctgccacttattaagtcattgttctgtgcccagccctgtgcaaagggatttgcacacctgatgttatttacacctcagaacaactcatgaggtcagtgactttcattcccattttacaggtgaggaaagtgaagctctgagtcatgaagtcatttgccttaagcttacacagttagtaagtggcagggtcggccaagtatagtggctcatgcctgaatcgcagcatcttgggaggcagaggcgggaggatcacttaagtccaggagtttgagaccagcctgggaaacacaagaccccatctctactaaaaatacaaaaaaatagctcagcatggtggcatgcatctgcagtcccagctactcaggtggctgaggcaggaggatcgcttgagcccaggaagtggaggctgcagtgagccctgattatgccactgcactccagcctgggcaacaaagtgagactttgtctcgttaaaaaaaagtaagtggcagggtcgggtttgcttgattcctgtgggcatgctttttaaaatttttttatttttccatatataccaacttgtccagatatgtgggcatacttttcattgttaggctttaagatcaccaaaaaaagagaataaaaaaggccaggcagtggctcacgcctgtgatcccagccctttgggaggccaaagcaggtggatcacgaggtcaggaggtcaagaccagcctggccaagatggtgaaaccctgtctctattagaaatacaaaaattagccgggtgcagtggcaggcgcctgtaatcccagctactcgggaggctgaggcaggagaatcgcttgaacccgggaggcagaggttgcagtgagccgagttcgtgccactgcactccagcttgggtgacagagcgagactgtgtctcaaaaaaaaaaaagagagagagaatgaaaaaaagggtgataagggaccgcaaggaggggatcagatgaaagagaagctgagggaaaggctccagggataaagggagatgggaaggctaaagagaccagaggtcagtagaatttccttgttaacatgccatgtatatgtaagcccaacccttcaggtatgtgcaggagtaggtggggcagcaataactggacattctcagagtgtttaggaactggtcatgctggcactgaccctcctgcctgaaagccattgaatgctgtttccatgcacagagattctaacctttggcaggaagattggaggcaggtgagaaaggagtgaatgggggctagtgtgaagaattctgacttgggagtcaggagccctgaattcaaatcccaatactgtgtctgacttgccccatgacctccagggagcaggtgaatgccttcctcccttgggaggggatctgctgcttgtgagctgtgtgaccttgtgcaggttccttaacctctctgttcctcagctttctcatgggtaagatggaaacgagatgtagatctgcatcacagagcagtactgaggtttaaatgaaatgattgtggaaactgcctggcacagagtcaccactctgaatgagttagctgtggttgtgaagtctcacttttttcatctggagattggactccccagtgtttaagaccccctttgacacaatgtgatgggtgtttgtctcagaaagggagaaaaagggagattgggattcgtgggtgggagagagacatcgagaggggggtggggagccaagaactgtggaacaggagtcaggagatgggaaaaggaatgggagggatggaggaggagagagagaatggaaagagaaccacgagagcgtggggaggagcttgggagaacaaggagaccctttggagaatgggtgaccctctctccaaattccctctcatctgcattcctttccaggaaagaccactgggacaagatgarattgaaggtaacaccgtcttccccagttgcttccacgttgccatccacccacctgacctgccctcagtccctttgtgcatttcygtataaattccattacatggaatttttacaatccctctctcttcccactcaactgtaattttgtagaactctttctcgtggcagttgaaggacttcccaaagtatttcgaaggcatatccatcctcaagtatctccaagactcaggagtgaaaacaaatgagtttctctcttggtgactttgaggttccccataacttcatccaggaatctgaaggacgccagtgctctcatttagtggtctcaggaatgatgcctcttttgctaacacatttcatacatcactcctttttgaatttttttttcttttttgagacagagttttgctcttgttgccaggctggagtgcaatggcacgatctcctctcactgctacctccgcctcccaggttcaagcgattcttctgccttggctgaggcagcctccctagtagctgggatcaaaggcatgagccaccatgcccrgctaattttttgtatttagtagagatggggttctgccatgttggtcagtctggcctcaaactcctcacctcaggtgatccacccacctcgacctcccaaagtgctgggattacagccatgagccaccacatccggccttggtttttttgttttgttttgttttgtttctaatgtacgctcctttaaggagtctctagttggagcctcattgatagcttcaagagatgccactcttccccactgactgcttcaagttcccccaaagttctctcttaactttcagagctgcgggaagcatttcttgagttcgataaggaccgagatgggttcatctcttgtaaggatctggggaatctcatgaggackatgggttacatgcccasggagatggaactgattgagctcggccagcaaatccgcatgaacygtgagtccagggaatgggagggatggccggggttagggaagggatcagggcagaattgggaaggatgtagaggttaagagtagagttsggggtggagaggaggatgagagggactagaagtctggaagaaaacaggtcagattcgactcaggaaggcagcatttgaagtggttaaaagcttttagagataggtctgggttcaaatctcagttctattatttactaattacagtcattttgaaaagtgaagttatccgctactcttgagtttccatttcctcatctatagaggaagatgcctctctccttacctcatgggactgtggaaaggaagagaaggaagagataaagatgctgatgcagttaaagtcttagcctccagtaaattcttattaaaggtagttattactatcaccactaagattcatcagtggagcacgagattggagctgtattggatgttggaaacaaacttggagctggagctaatgttggtgaatacagctgcaaaaaggatggatggatttttggatggagatcataactgatttttagattttagctagaataaaattcctattgaggctgggcgcagtgtctcacacctgtaacctgtaattccagcactctgggaggctgaggtgggcagatcacctgaggttaggggtttgtgaacagcatgggcaacatggtgacaccccgtctctactaaaaatacaaaaaattagccaggcgtgatggcgtgcacctgtaatcccagctactcgggaggctaaggtacgagaatcgcttgaacccgggaggcagaggttgcagtgagccgagatcgcaccattgcactccagccttggcaacagagtgggactctgtctcaaaaaaaaaaaaaaaaaaaaaaaaaaaagctattgggtttgcttctgggcatgtaacgaactaaacaaggttgaattcaaggtaatgatagtattcatatctgaaaaaaawttgtatgctcatttaattcatgctcctctttgtacaggtctacagaggaggagaaacatcttaaccaactgtctgaaagtcacacaggcagttacttccaccataccacaccctatccactcctgttcaggctagagggacatgagtttggagcttggagttagctgctggagggaggaagtcaaagacggctcttatagggcagggagaagggagctgatctaactgactcgaagcacaaagtgaggtaatggaaggccagggcttgtggggtctcgctaatcctgtgccatcytcctcagtgggtggccgtgtagactttgatgactttgtggagctgatgacccccaaattgcttgcagaaacagctgggatgatcggtgtccaggagatgcrggatgccttcaaggaggtgagttaacagtgtcatggtgctggtgatggtagaggcagaccctctgakgtctgcctgtaattagccaatgccatggacagcacccaccaaccaggcccccacctttttttttccagccatggtgggatcrataaatagggaagaaaaataacrtattccaaacacctgcaatggatcaatgcctctgtatactttatctgatttaatcctcaaaaaaacaaacaaacaaaaacaaaaacacrcacacaaacacattaggagtaagcaagcagtcatgtatcccaattaaacagatgagaaaagtgaggctcatgaagattataaatyttatccaagatcctgccatctctagaataaatgttaggactttwtttttttgagacggggtttcactgttgtccccaggctggagtgcaatggtgcaatctcggctcactacaacctctgcctcccgggttcaagccagtctcctgtctcagcctcctaagtaactgggattacaggtgcgcgataccacacccagctaatttttgtatttttcgtagagacggggtttcaccatgttgaccaggctggtctcgaactcctgacctcaagtgatccacctgcctcggtctcccaaagtgctgggattacaggcatgagccaccgtgcctggccagggcctctattcttagtgcctgtaacaggaagaatccaagaatttgagatcccagaagggaatgcaaagtggtcatmtggtacgaaccacttgctgcagacatactaaaaaatatcagacccagtgagaataacagacttgcttatatcccctgataaaataccttctcgttctgagagctttcagcaacacaaggtgaaaataaagagtagtagagtgtttgggagcaaaggatttggaaccaggcaaacatgggttcaaatcctaggaggcctccacctattggctgtgcaagtgcctcccccagcttcttataaagatctacagctggccgggctcagtggctcacacccataatcccagcactttgggaggccgatgcaggtggatcacaaggtcaggactttaagaccagcctggccaagatgctgaaaccccgtctctactaaaaatgcaaaaaaatttagccagacatggtggtgggcgcctgtaatcccagctacttgggaggctgaggcagggaattgcttgaacctgggaggcagaggttgcagtgagctgagatcgcaccattgcattccagcctgggttataagagtgaaactccatctcaaaacaaaaagaaaaagttgtctggattgagaagtgctgtaagtgtaacgtgaacactgtattaagacttagtatgctaatataattagcataacgtacttgtatacttaagtaaacttctaggctaagtatcctaattaagcatgctaagcacctactaagaacttagaacttactgccttatgaaatccagtgtgtataaaaagaatgctacttacatagctaaattaataatttttaagtggattacatgatgaaaggataacactttagatatattgtgtcaaataaaagagaatattaaaaattagtttcatttgttccttttaacatttttttaaacgtcactactagaaaattttaaggccaggtgcagtggctcatgcctgtaatcccagcactttgggaggctgaggtgggtggatcacctgaggtcgggagtttgagaccagcctgaccaacatggagaaaccccgtctctactaaaaatacaaaattagctaggcgtggtggtacatgcgtgtaatcccaagtactcaggaggctgaggcagaagaatcgcttgaacccgggaggcagaggttgcagtgagccaagatcgcaccactgcactccagcctgggtaaaaagagcgaaactccacctcaaaaaaaaaaaaaaaaaaaaaaaaaaagctgaatagtattccattgtgtacttatgccatgttttctttatccactcttctgttttgatggacacaggttgcttccataccttggctattgtgaatagtgctgccatgagcaggggagtgcaaacatccctttgatatactgatttcaattactttagatacatacccagaagtggtattgctgggtcatatggcagctctaggtttaattttctaaggaacctccataccattttccataatagctgtgctaatttccatacccagcaaaagtgtaccagggttcccttttatccacatcctcaccaacacttgttattattcatctttttaacagtagccatcctaacagatgtgaggtgatatttcattgtggttttaatttaaatttcccaaatgattagtgatgctgagcatttttttcacgaacttgtttgccatttgtctgtcttctttagagagatagctgttcacgtcttttgcccatttgtcttctttagagagatggctgttcacgtcttttgcccatttgtcytctttagagagatggctgttcacgtcttttgcccatagttattagattgatgcaaaagtaattgtgattttgccattaaaagcaatatttgtcattatgcagtattattaattataggcacaatgccacacagcagatctctagaacctatcttgcgtaactgaaactttatacccatggtacaatatctccccatttccctgtcctcctaacccccagcaactatccttctactctctgcttctatgagtgtggttattttaagtacttcatatgtaagtggaatcatgcagtatttctccttctgcgtggtatatatttaaatgcaatattcagccttacaaaagaaggaaatcctgccccacacaacaacacaaatgaacctggaggacagtatgctgggtgaaataagccaggtacagaagacaagtatttctaagtgtcttgcttgctgctccgtgctcagtcccaagaacggtgccttccacatgggcactactgacacatttttttttagcaatatggatacatatgtgttgaattaatgaactgcctccaaagctctgccctgcacacccttaactagtctaccagaaagtctagtacgttcaatttccaaaacatcggggagtgaactctccttcttgagctctgctggtgctaactggctcaaaccacaaccatctcctaccaggatgatcatggcggccctctaattggtttcctggctcccatcgtggtcctactgtggtctgttctctacacaacagggtttcatgctcacattcttttaaaatgtatatcagatctggtcactcccctgcttaaaattctccagtggcttcttgtcttactcagaaccaaatcctgacaacgtcccatgacacacaagcccctacgtacttgggccctgccttctgcaacactgagaccttgtctatttcatgctcatttctccccagctcacgcctccctaaacactccccacttctgcctcttcctcaagtacaccttcctgccttacggcacttgttaacttgcagcttcctcagcctacagctgtgtcatccaaaataaatacaatgtaagcagcatgggtcatttaaaattttctttctctttttttgagacagttttgctcttgttgcccaggctggagtagaatggcacaatcttggctcaccacaacctccacctcccaggttcaagcgattctcctgcctcagcctctcgagtagccgggactacaggcatgcgccaccacgcctggctaattttgtatttttagtaaagacggagtttctccatgttggtcaggctggtctcgaactcctgacctcaggtgatccacccgccttggcctcccaaagtgctgggattacaggcatgagccactgagtccggcatattcagcttttaaaaagaaggaaactctatcatttacaacaacatgaataaacatgaagcacattattctaagctatataagccaggcacaaaaggacaaataccacatgatgttacatgcagaatcttaaaaaattgaactcatgcaaataaaaagaaaggtggttagcagaggctggggagccacagagaaggaatggacagttgcttgtcaaagggtacaaagttttggttagacaggaggaataacttttgagatctattgcacagcaggataactatagtaaataataatrtatgtttcaaaaatcacytaaaaagtaagttttaaatgtatcgctgggcactttggctcaggactgtaagcctagcactttggaaggacaaggtggaagggttgcttaaggccaagattttaagaccaacctggccaaaatagtgagaccccgtctcattaaaaaaaagtttcggccgggcacagtggctcaagcctgtaatcycagcactttaggaggctgaggcaggtggatcaactgaggtcaggagttcaagatcagcctggycaacatggtgaaaccctgtctctactaaaaatacaaatattaaacaggtttggtggtgcgcgcctgtaatcccagctactcgggaggctgagggacgagaatcgcttgaayccaggaggtgaaggctgcagtgagctgagattgcaccactgcacttcagcctgggtgacagggtgagactgtctcaaataaaaaaaaaaaaaaaaagaaagaaaaaaagaaaaaaaaaaacagaacaaaactgtcttttggagctgacgttctagtggctcacattcccaaagcttttatctcagtgcttgacccacagtaagcgataggtaaactccatcatctcgtggctatcatcattgtcattgctgatataatctatttctgcttctattcagtttgacacgaatggagatggggagatcaccctggyggagctacagcaggccatgcagagactcctggggragcggctcaccccccgggagatctctgaggttgtccrggaggctgatgttaatggagacggcacagttgactttgaaggtgacattgacggggcgtggtggggagcgggggcagccaccgcaggaatccacttccaactcactgtcagattttccaagttggccactccttctcactcctctccaagtttgagaatggaagcgggtggcaggttttggaagcatytgttctgtccctttcttcccaggctattcatttcaaagagctgggtgtcscycacttctggtggctccgaggaacacctcagccaaggccctttccttcccatgctcaggacgcccttcygccttgcccattccttgttagtttgcagggcaccttttatcctaggaagaacttgtcccatcagaaagagactggactggctagcagctggagctctggggtcaggttcaggrgcttcaaattcaggatcatcgctgactcagcatgtggcttatgctactccctttttctctttaagggtcagttttcccatctgtaaaatgaggtggatgatgacaccttttggagaaaactaaaagaaatcatgcacaaagcaccactgtatttttaaattwtccttccctgtctttgctcragttgtccttccgtctggaataccctttcccctctcccctggctaaytcctagttatgttcctggaaggtacctcccacctctcttactgggctccgtgtccctctkctgkctccccagtaatacctcccgcttgcttctgcagtaatacggattcgtggcatctctagagtttattgcctatttccttctgagaccatggaccaattccttcatcatcactatatccccaaatcctagcactgagcccagcatgagtatattggatcactgaataagtgaaaaggattggggttctacatggatgagacgtggggttcttttttatgtgaggcataggaaggcatgtcggccggacatggtggctcacgcctgtaatcccagcactttgggaggccgaggcgagtggatcacctgaggttagtagtttgagaccagcctggccaacatggcgaaatcctgtctctactacgaatacaaaaaaattagccggaagtggtggcaggtgcctgtaatcccagctacttgggaggctgagacaggagaattgctagaacgctgggggcggaggttgcagtgagctgagatcgcgccattgcactccagagcaacactccgtccaaaaaaaaaaaaaaaaaagcatgtcaagttctaattgtgacattctttggttcaaagatctcagcacctatctgctgcttatggacaaaaatccaaaattctggccgggctcagtggctcatgcctgtaatttcagcactttgggaagccaaggttggcggatcacctgaggtcaggagttcgagaccaggggggccaacgtggtgaaaccccatctctactaaaaatatacaaattagctaggagtgacagtgcacgcctgtagtcccaggctatacgggggctgaggcaggagaattgcttgaacccaggaggtggaggctgcagtgagccgaggtcacaccactgcactccagcccgggcaacagtgagactccatctcaaaaaaagaaaaaaagaaaaaaaggccaggcgcgtggctcacacctgtaatcctagcactttgtgaagctaaggcaggcagattgcctgagctcaggagttcaagaccagactgggcaacaccgtgaaacccatctctactgaaatacaaaaagttagccaggggtggtggcatgtgcctgtagtcccagctacttgggaggctgaggcaggagaattgcttgaacttgggaggcggaggttgcagtgagatcgccccactgcactccagcctgggtgacagagcgagactccgtctccagaaaaaaaaaaaaaaagtccaaaattatttgtctgatatgcaagtctatccatcatctggcctcgcccacccacccagcctgtatcttctgtagctattctctgaacttttaagttctggcacaaacttggtgcctgctttatgttctccaacctccgttcctaggcatcagatgctccgtccacttaccacatctttcagtctcatccatccctcaggaactcacatcaaggcaacctttgtcaggaagcttctctccatccttccctcatgtcttcctcccagctgtgaagtcttacagaagtttttctgttcctctccatggaagttatcacagcagaccttgctgtgttgagttgtattagcttccaagrcctccatcctagatagagaggaggaagggccattctctaaaccatatatgctgtatgtcccagtatggaaacayagtagaggctggttggacacctgctagatctagccaggattaggtgtgcagtggacatcaagtgacatctggagaaggtggggtgggggtgggagatgatcctcaggccaaccaaaggcaagggaaggtcaggatgacctcaagaccygggtgggcagcaagatcgtcttgagccacagcaaagtcaggtgcaacctgcrttccttccagggttcaccattcactatccacgtggcctcaggyatgttggtgaccctcgctggcgtaagtttccttatctgtaaagtgacacttatccctccaggatggttgagatgatgaaatctsatagtgacaatcacaggttttttgggttttgttttttagatggagtctcactccgtcacccaggctgcactacagtggtgcaaccttggctcactgcaacctccacctcctgggttcaagcaattctcctgcctcagcctgtggagtagctgggattacaggcgcccgccaccacgcctagctaatttttgtatttttagtagagacggggtttcaccatgttagccaggccagtctcaaactcttgacctcaagtgatccaccctccctgacgtcccaaagtgctgggattacagttatgagccaccgcgcccggccaacaatagctgtttatgggatacttaatctgttttgtgagcattatgccattaatggtcttaaaaaccatataaggaaatagcaatactaggattcccattttttaaatttaatgttttatttacatgcaagattattttcataacagaaatgaagaaactgcaacatactgaaattagtctttcagaagtaggagcataataataaccacagtagtttacatggggtgactgtgatggcaggcacggttctgagcaaattttatttacctatttaattttttaatttttttgtagagttgggggtgtcgctatgttgcccaggctggtctcgaactcctgggctcaagcgatctgcccacctcggcctcccaaagttctgggattacaggcgtgagccaccgagcccagcctgtaagccaattttatctcaacctcatgaggtagmtctattaaacatgccaacttgacagatgagaaactgaggcacagggttaagtaacttgccacagagatctgattcccatttcatagatggagaaatggaagcatagagggattaagtaatttcccagggatcaccagcagtgcctgccacataggaagggctcaaaaaataatgttgggggcttttacaacgagatgccttactggggattyttttttttctttgcagagtttgtgaagatgatgtctcgctgaggaggtcctggaagctccagaccctctccacctggtcaacatggagcaagcgcttgtggagaaccaaagcccmaaagccccagatcsccttaaagcagagagggagggcaggcgggagggagggcattggcatgcggcgctgtgcatggggtgagacccagagcggtatctttgccaggatgggggcgtctgcagaactagrttaagaaggaagagtctgtggatggaaataggaagcgtgggagggtccagttgccacccccaaaaattccaatgattcttgacatcttttcacttcacgtagtcctaagtccctgtgacctgccagagtctcttccccagcttccccttgggtgaaaatagtctcttctcctgttgggtatcaaaaggttcagaacgtagtctctactcttcccctgcctgcatcaactgttgcaaatcccgtttctctctcccggtaaggggacaaattatactttattcaggtgatggttacatgaacagcccagacttcaccactacgcaatatatccatgtaacaaaaccgcacttgtactccctaaatctatagaaatacaaaatgaaataaaaaggatgcaaatcagtcacagagctggaaacagagttgttgttgaggctgggcttggaaatggctcgtgcaagtggcattcaaagtcaactccttccttttcctgatttcctggaagcactgtctggtttctctctctctctctctctctctctctctctctctctcsctgtctgtctctgtctcccctcccacatcccttcctttgtgtaagatactcaggggactgaattaaaccacaaatctggattatcaaggtttagagctagctgatccttggggaattaatcccctgaaaaaatgtcatcatgcaaagagagagatgacaggatcccccaaatccccagttcagccaggttgttgcaaagtctttcctagaagcctcctacctccgcgctggtctgtcctggaccacccagaggctgtgtctctgttagatgggtcgtctgttccgtccctcacgtcctgacatcgatctgtgccatgaaacagaaaagagagattcctcctgacctccgcccaaagcaagacactccagcaatgcaaaggttaaaataaaagtcaaaataaagaattaacttcatgccttcctccaactttttcttgctttgaagtccatgaattagatgtttaaaatgagtcatctggttcaatagctttgttttattttattttattttatttttgtatttatgtattatgtatgtatgcatgcatttatttatttatttttgagacagagtctcactctgtcacccagactggagtgcagtggcgcgaattcggctcactgcaacctccgccttctgggttcaagcgattcttacgcctcagcctccagagtagctgggattacaggcgtgcactcgtgtgccactatgcctagctaatttttttttttttttaagtagagatggggtttcaccatgttggccaggctgtcttgaactgacctcatgtgatctgcctgcctcagcctcccaaagtgctaagattacagacgtgagccactgcacccagcctatttatgtatttatttttgagacagggtctcactctgttgtccaggctggagtgatctcacctcactgcaacgtctacctcccgggctcaagccatccacccacctcagcctcaccctcctcagctgggaccataggtgcatgccaccatgcctggttaatttttgtatttttttttttgtaaagacagggttttgccatgttgcccaggctggttgcaaactcctgggctcaagctatccacccttttcagctcccccaaagtgctgagattacaggtgtgagccaccacacccagccaatagctttgttttataaaataaaaaaattaagaaaaagtggagcccttggggaagccgaggagggagggtcacttgaggctgggagttcacaaccagcctggcaacatgagaccctatctctacaaaaaaaaaaaaaaaaaaaaagaaagaaagaaaagaaaaaaaaaatagccaggcatggcagtgtgtgcctgtgatcccagctactcaagagactgaggcaggaggaaagcttgaactcagaagtcaaggttacagtgaaccaagatggcaccctgcactcagcctgggtgacagagtgagtccctgtctctaaaaaagaaaaagtggaagcagaataatgttatttcctaatctcaagctctttcctcagctccatcccattccatccacacatgcacccatccgccccttcatttcttcagtcacccattcaaaaaagattttctaagtacctggtctatgcctgacattgtttcaggtaatggaaatagagcaaggacaaggtatttggcctcaacagtctcatattttagaaccatgcaattcaatagaatcttctgcgaggatagaaatattccagacccgcgctgtttattatggtagccacatgtgactactgagtattaaatgtgtgagcaaggctgagaaactaaattttattttatttttatcaagtgagaacagttttattaatgaatacataagtgcattagtctgttttcatgatgctgataaagacatacccgagactggataatttataaagaaaaagaggccaggcatggtggctcatgcttgtaatcctagcactttcagaggccgaggtgggtggatcatctcaggtcaggaggtcaagaccaacctgatcaacatggtgaaaccctatctctactaaaaataaaaaaattagccgggtgtggtggtgcatgcctgtaatcccagctactcaggaggctgaggcaggagaatcacttgaacttgagggggtggaggttgcagtgagccgagatcatgccacttcactccagcctgagtgaaagagcaaaactccatctcaaaaaaaaaaaaaaagaaaaagaaaaagaaaaaaaggtataatggcctcacagttccacgtggctggggaggcctcacaatcatggcggaaggtgaaaggcacgtcttacacagcagcaggcaagatagaataagagccaagagaaaggggtttccccctataaaaccatcagctcttgtgagacttattcactaccatgagaacagtatgaaggaaacttcccccataattccattatcttccaccaggtttctcccacaacatgtgggaattacgggagctatgattcaagatgagatttgggtggggacacagccaaaccacatcaataggtaacatgggaattatgggagctacaattcaagatgagatttgggtggggacatggccaaaccatatttccatcctcgcagaagattctattgaattgcatgtttcaaaatataagcttgttgaggccaaataccttgtccttgctctatttccattacctggaacaatgccaggcatagaccaggtacttagaaaatcttttttgaatgggtgactgaagaaatgaaggggaagatgggtgaatgtgtagatggaatgagaattgtgggagctatcattcaagatgagatttggttggggacatagccaaaccatatcggtaaggaatgttattaattacttaagttaaatgtaactagctccttatggctagtggctactatattggacatcacaatttcatgttatatgcctgggattattctaggtcctggaatgtgcccagcaataaggtcttttggtttcttgcaggctacattccagtgccaggggagtaaaaaattaaatccatcagaagcagctcagattgggacaaatactttgaggataaattgggatggttggatacaaagataatttggggaaggggcttaatcagagtggtcagaagggacatctctctatttttttcttcagacagagtcttgctctgtcacccaggctggagtgcagtggtgcaatcacagctcactgcagcctcaaactcctggactaaagcaatcctcctgccttagtctcccaagtagctggaactacaggtgtgagccaccaaacccagctgatttttgtatttttttgtggagatagagtgttgctatgttgcccaagctggtctcaaactcctggcctccagtgatcctcctgccttggcctcccaaagtgctggggttacaggcatgagtcaccatgccctgccagaatgggcatctcttaaagatgagctgtctcaggttgggttccccagggctcctcctctgtccaagagcagagacagcaggcaggaggcttatcagggagtttccttgggatcagttatggaagggaagggaaggaactgggattggacagagggagaggttgagccacggtgcaggctctacaacctcagcggaacagacgggagctctggatgtagctctttttgagttatctcacttggactggaatagccaggcctttaaacccagcattggtcattcgttagttgtggcctaccctgggaagggcatggtttgggcgagggaggccattttgaagctgagaccatctctgatttgggctgaacaccaaaggctgcctgcagacagcactcactggagctgggcagcaagtcctttcttgaagggggatctaggaagcccacgtctatctccatcacaggggcaattccacggacaatgagtgaagggaggaggagactgcaggaagacaaggggtaagagaattccagcacaaggaagacacggaggcggggggaggaggaggagagggagaaggagagggaggaggagaaggaggaggtgaagagggaaaaggagaaggagagggaggaggagaaggaggaggagaaggagagggaggaggagaaggaggtggagagggaggaggagaagagggaggagtagaagaaggaggacaagagggagtaggagaggagtaagaggagacatggaggagaaggaggagaagatggaggaggaggagagggagaagaagagtgaaaggaagaagaagaaagaacaagaacaacaatgtgaatttccatctggactgagagggaatcagattctgtaatcagttcttgatatctgccatgggcacagggagggaatggttgaggcagtcttgtggtgaattttctaccctctgtttacttcctaatttattcattaataatttaatatgtatctacaaacaccccacccaaatctgtgatttccctcagaagacagagcaggctgtaatgactcctagaggtccctggcctgagagtctgacctctccacactatgagactcgacagcctggctaccaatctttccttccccacacattcaccatcggtctcatcttaggaagcagaaaaggcagatcccagggttaaatcaagactcctttattggtggttatgccgcattctctctacgttcttcacaaaggaccagctgattgaagcaggtggtgcagagggtatttctaaaggtggttatttaagcttgacagatgcaatgaaaaagacaaatctgtgctcagcctcagtatggcggcagtcttcctctgaagatatttctcctttccttgaaaatagaagcaaagatctgagtttaatgaataagtaggcattgactcaaagaggaaggtgaattaaaaatgactttgtattggttttccagacttagtcggaagcagctgagctgagaggaatcagacgcccccacccccacatccctgcctagctcataggagcaaggagatcaatgaacaatgagctcctcaatctcacctctatgctaaggggaaggggacctgcaaagtgccagttctgctgtgatggacagaagtcagaggctggacgctgttcctagtcctagccacagactgaacgccactgtgggtgttttttaatatctaccctgttaagatggtgcccagagttccaaaccccctcctttccctctcctctattccaggaagatgattttcattaccaaggcaaaattcaggaagggcccgctaatttagtgtcatccataagccacatgcattgtaaggacagacattgctagaaccaccagggttttccaccccaaagggaggagggatggggttttgtctacacatctgatgataagggcttctctttttttatttagattccagaagtcacagagcagtgaggtcagttgatccatgcgggagatttagagaccatttctacaggctggagaacatctttcaagcttaaataaccacctttagaaataccctctgcaccacctgcttcaatcagctggtcctttgtgaagaatgtagagagaggaaaagactagaagaaaaggagggataggccaggtacagtgactcacgcctgtaatcccagcactttgggaggccgagttggatggatcacctgaggtcaggagtttgagaccagcctggccaacatggtgaaaccccgtctctactaaaaatacaaaaaaaaaaaaaaaaaaattgctgggcatggtggcacacccctgtaatcccagctactcaggaggctgaggtgggagaatttcttgaacccaggaggcagaggctgcagtgagctgagattgcaccactgcactccagcctgggcgacagagtgagaccccgtctcaaaaaaaataaataaataaaataaagaaaaagaaaaaaataaagaaagaagaaagaaaaaagaaaaaaagaaaagagggataaagttggttctgtggaggtacttgatgaccagcgggctgaggtggggcaggaggcccaaatggtgaaggaagagaaataaaccccatttttcccttggtcagctactcagtgatgggggcaatggatgcacaccatggtgtcttggcttctgggttatccttcctttccttgcttccttccctccttccctttcttccctccctcctttcttcccttcctctctcttttcctccctctctctttccttccttccttcatctttcttccttctttccttcctttcgtccatctttctctttttctttcttagacaaggtctcactctgttccccaggctggggtacagtggtgtaatcatagctcactgcaactcctgagttcaagggatcctctgacctcagcctcctgagtagctggg

SEQ ID NO: 5710 - DNA, 66686 bp, Homo sapiens
gagcctatgcgcctacaagctgggatctcttgagtcagacagctgaggccaaagactggcatcaccctgtggagcagcgagtgtgggggagatttgggctgggtgctctgttgcctttcaggagatggctcttaccctatggtgtgatgcctgagcacggctcattcccactgaagaaaagatttgttatggttcatgaatgagtgcccactaggacaggggtgaaactaggagtgttccagggatggacaagtccctggatgaagaaagggagaccctcacctgatgtcaggcttaccaatgaccttgggaggggatggatagggaagcaaggtctgggtgaagatctagttctcatcttctaggaaatgggggtggccctcaggacagataagctcctttgcaaatgtacagacatcttgcgaggagagatacacgggggagggaaggcagagcccacctaggccaaaacatcattgtgggctttaagtttcaaactaggcttttaaaagtcgacaacagttaaggctagtgttgtggtgtacacctgtagtcccagccactggggaggctgaggtaggaggatctcttgagcccaggagttcaagccttcagtgagctatgatcatgtcactgcactccagcctgagtgacagagcaagactccgactctaaaataaaattttaaaaaattcaaccaggtaaatctatagggttaaagctaaaaaaatataaaaggcatatagaaaagtctccccacattcctctacccccatctactccacctacccccagaaaacagaaccactattatgagtagatctttgtgtagtttccgagaaatttttatgcagatataaataaatattttttgccttctttctccacaaatgctggcatactctacatgccattctgcactttgaattttcttttttctttttctttttgagacagagtctcgcactgtcacccaggctggagtgcagtagcaccatctcggctcactgcaacctccacctcccgggttcaagcaattctcctacctctgcctcccaagtagctgggattacaggtgcccaccactatgcctggctaattttctgtatttctaatagagacagggtttcactatgttggcaaggctggtcttgaactcctgacctcatgatccgcctgccttagcctcccaaagtgctgggattacaggcgtgagccactgcacccggccactttgacttttcagttgaacactgtatcccagggaccttcccacatcagtgtatgcagagtttccttgttccgttttatggctgtacactgttccacttcatgattagctggaccataattttctttaccattcccccaacagagggcactaagtgctttccaaccttttttaatgtaaacaatgccaccatgaaatgagcaagctggtatacctttcacttttcggggtgcggctctatcatcaggataaagataaatttctagaagggaaacagctggatcagagtgggtgcattggtagctctgagaggtattcataaatagttctccaaaaaggagacaccaatttacactcccttcagcaagtaggggggtgttttactttttctttttgagatggagtctcgctcctcgcccaggctggagtgccgtggctcgatctcggctcactgcagcctctgactcccgggttcaagcaattctcctgcctcagcctcccaagtagctgggattacaggcacccccaccacgcctgactcattttttgtatttttagtagagtcaaggttttaccatgttggccaggctggtcttgaactcctgacttcaggtgacccatctgtctcagcctcccaaagtgctgggattacaggtgtgagccattgcacgcagtcgtcttactcttaacatacccaaagtgttcaacttttcttccaagtctgcctctcctccttctgtcaccaccatcacccatttgctcaagtctgaaggcaggacgccacctttacacctccacccttgcaccccagcagaacgccctgacagtacttctagaagaatctgtcccttcctgccttcactctggttacatctggagttagcctcagcccctctcacctggacacctgtgcaggtcccctgcctctccactctccaccctcctcgccagcccaccccatcctccacactgcaagccaaggggctacaaatgtcgcagccgggtgggctcactctcagcccatcatagggctgagatccctctgcaggatccaggctgtttggcatatccctcaaaacccaggccctgctgtaaggcctggaccgggtggggtcctagaggtcatctccctgcacccatgtgaagcttctgagcatttgtccttggggttttgccccatggcatcccagagccacccaggcactatgttcacctcctgctgcccttcaagatgaacaagaagaagagaaacaaagggagttcgccacaggcctgagtgtggaggagacagagaaagaacagcacagaaaagagaggccaggaaggccccagatgccaggtcaggttcatttcatgtagaaatcacttcagcagattgctctgctaaagagaagaaaatacacttaacatgatgcatggcccccgcttggctcaaagctgattgcatctctaggctagcgacaagctggcagagcttattaaaaacagtgcacatgattctctgcccaagctcagagccctttccctctgagccactcagggcatttcccagtgtgggtgaggaagtgtgcaaggcctggtagaccttagactgcatggctgcagtttctgtaactattgttcatcctgagaagtgaaggtttggaaaactaaatgaagacacccaagaatgccatctgctttcttgaggcattggttcaatgtttactcagcaaatgtgcatcgtgctcctgccctgcactgggctgagctgggagcaggattagacgctaagacaaagtcatggagaagtccggtgccatgagctctgcaggaaagatggacccagggctctgtgggcagacattgggcaggaagaatgatgaggctgtaaatcctgagaatgcactccctcccgcagacattctcagagtcccagagtgttagggggcaggaggaattccagctgtggttctggaggattgttaaacctttttggtgtgtttcctactctgaggcatgtttgttttactcacaatgatgatgcaattctccaattacctagcaactatactaagactctaaagaaaaaggcaggttcttccaatacatagataagtcccaggtggaaggacaagaccccagcctggagaggtgtttgtatcgggaggagaatgagaacgtaaatccctgaagctgggagtgggtctggtgctgagcaaaccctttacagttctggtcagtgctgaaatttacttcaaggtcctttctcagttgctggggcatttgaaggggatgctcccagagatctgggctggtaatcatttccctgccgaggtgtcaccagaaatggatggccctcacattgccacacctgtctccctaggttgccctccttaatcacttcgaaacagagccgtctgccagggcagtgggcaatgggacactcctgggcagctccatcatctctagccaagaatcatttggactggccagaactgcactctggtcccagccagaggaccccagttccaaagtccttcattgtgcaaacaaagagacaaaagagatgccttgcaagttgaggcaagtcaggctcagaaggagaccatgaaattcagcagcatctgtgggaggggcagggggtgcagagaggataggggaaagggaggaatcagcagctcctgatcccctccatgtgccagactttgcaagtggctttgcttccacaaacccgccatgcctctagcaggcagcaccgattatcctgattcacagcttggaagcagggacagacagcatggataactcgcccaagatcaccccagggaaaactgggaatttgtcttagttcattcaggcttctataacaaaacagcacagacagggtggcttataaacaacagaaatgtgttgctcacagttctggaagctggaagtccaagatcaaggcactggcagattccatgcctggtgagggtctactttctggttcctgtgtcctcacatggtggaagggaggagggggccctctgtgacctaatctttcataatgacaccaatcccattcatgagggctccactcttctgacctaatcaccccttagaggccccactttctaataccattaccttgcagggtatgggttcaacatacaaattttggcggggtcgggggggtggtgcggaatacaagcaatcaggccatagcagagtaaaacccaaatatccccaactctaatgtctagacctcccctgtaaaaccatatgcaggatctactagacagaacgtgtgtcagactgagtgcacactcctgggaactgtgagcttatataaaaattcacatcatggccttttaactgtacccattaactcaagaccccttgtctccaaacctcaactttgactagttagagaatcacacagaaatcattataaagtgcttagaacatcagagttttcacgtggtgactaatacttttattgacttatttttattgatacataatatttgtacgtattgatggggtacatgtgctattttgttacatgtgcagaatgtgtgatatcgagttggggtatttaggctatctatcccctccagtatttatcatttcttttcttctttccttctctctctctcttttctttctctctctctctcttttttctttttttttttttttttttttgacagagtctctctctgtcacccaggctagagggcagtggcacgacctcagttcactgcaacctccacctcccaggttcaagggattctcctgcctcagcctcccaagtagctgggattacaagcatccgccaccacaccgggctaattttttgtatttttagtagagacagggtttcatgatgttggccagactggtcttgatctcctgacctcgggtgatcaaccctcctcggcctcccaaagtgctgggattacaggtgtgagccaccacacccagcctgtataatcatttctatgggcaaacacatttatcaaaccacctccatcctctaacatttgttttttctcagacgtgagatcctatttgtaggactataacaacaaggaactttattaatatgatgtctagagaatgaaagaggcacatgtgccctagaggaagagccgatgtcctctgtgagttctcctctatcaggggtcaggttggatgaaatctaacccccacctgcctttgtaaataaagttttattggaacacagccacacccattcatctgtgtcacatctacggctgctttgtcactacaacagcaaagttgagtagttgcagcacagactttgcgtggcccacaaagctgaaaatattcatggtctgggcctttacagaaaaggtttgctgaccccagtgctgaatcactatgggattgcctgtgcaggagctgtgccagctgtgttcacataatgcatcctgctttcattcaccaacctcccttccgactacaaaactctgccattctctgatgcaggagatgggactcaagaccacaccgtgcacttctccgtaaagccacctcctggaccagttgggtttcttgctccttttccttctgaagcaatcctctctctcccatgaggccccctgagcgcactaagcagaggtgccgcctctgagtggaatgtgccaggccccagagctgcctctgagtctgcaggagtgcagagtgggcagagggctctctctgctgttttccatcagggcgtgtcccatctcagtctaacagggaggtgcccagaaaataggtggaggtgagggccactcagcccagtggccctctgagctgttccttcttgaccggcacacacagctcgcttcttcactttcttttccatccactgccggacccaagccagccttccagggagcagccatgccttacctctaccgggccccagggcctcaggcacacccggttcccaaggacgcccggatcacccactcctcaggccagagctttgagcaaatgaggcaggagtgcctgcagagaggcaccctgtttgaggatgcagacttcccagccagcaattcctccctgttctacagtgagaggccgcagatcccctttgtgtggaaacgaccaggggtgagtggggygagcaggggaaggagcayagatgaggccgaggytcagcagcccccgcaggaagtggaaacaggggtgctggggaggggccggctacgctcagtgcaactgagktgcatcatcccagtctaccgtggaaagctttgcagtttggaggcagaaaataatgtacaggcctgggatgctctgcggtggggaccsggggcatctggttgtacccgctccccggctccaagctgtctgactccyaccgaggctgaggacctggagtcagagtgggtcttgtcagcaggtgataggcacgaatcaaaaccttatccacaaggacaggcccccaccctgtgtgtggtaacactgagatcacgttatgcacagtgttctgtggcttctggcccagagctgagggtgctcagtgtggatggatgtttggctcagcaaggtctcagcaaccgggtgacagatggaatacaagggaagcaggaatcttctcccragaaccatgcaccccccattcccagagatcagggtgaacagtgccccacctctgacagtctggaggtgtcgtcccaagaggcaccagctggtcactgggtcccaagaggtgctagcttgtgcctgggacgccatgtcaatatttgcggtgctggattagtcagggctctacctctgacccggcgccagctgggctggcttccattccctccaggtgkgtacgggcctgggagtggctcctgtggggtccggttgcttttgggcaaggaggggcagtacaagggatgctggtcctacaagtgagatcctgagtgccygtcttatcctgacaatttgtctcatgcatatagtcatatcacttcatttccctgagcctcagtctcctcacctgtaaaatgggaacaataatggctaaygcaggccaatgtctagcacacagaaggtttccagtacattacagctattgtcacattattactattactgatactattattatcatcattacaatgattattagctctgagtctcatcttacatatgagtagcaaaggactcatcataactacctcctcactatctcccaacattaaaataatgttgatgattaaaaacaattttttttaacgcacattcacaaaacttctgggctcttcaggggcagggccaaagtgaacctaagtgggtgtttccgaagtggtaagggttttattgctatttcctgcagtaggcagtgtggggtgtatgtgtgtgcacgcacttgtgtgtgtaggaatttgactgtgtatgtgcatgtgtgtgactgtgtgcacatgtgtgtggatatgcataggcgtgtatgtggggggtgggtgactgcatgcataggcacacaggtgctttgatcttcacctgccaggtaattgatcccacaaggtgccatgttcatggggaaatcacagtgagcattcagtggccctatcggagttggggtgaaagctcccaggcaccttcctcaccgaagccacgctgtgattgtttttggttctctgcatatggccaattgcagtgtgaggtcacggcactggcagatcacgtggggttgcactttacagacaggattagtaggtcatgctctgctaagtaagaaaaaggacatttccaaactaaaaaagcagaagttacaagacataaaagagtgaccctctgaggggcaccgcccacgaccattaggtctccctgggcttatttccggcctcggcgcatgaacaaatgggcgcgtgggcagctgcccaggctgcaggctgtgggtgcatttttaactgtgggcagagatttccctgcagttgatgtcaggagccctgggaaatagagttagagaaattgatttcctgggcccctggtgagcagagcccctggccagaagcagcggctctttctgtttgatccagggtttcatacagatgctcatgttctctacaggcacttgatatgaaaaggttggaagcactttttctcttccttaaaatggggacaataatgcaacttatggggtcctcatgagggtcagctgcgttaccatgagtagagcacttagcaaagagcctggtgtgtaaagaatcagtgctggtccttgttatttctactgctgtcattgtaacctaacaccatcgtctcctgactctaggagggcccccatccttgcagtctatattgacatcatctagtttaaagtgtaatctgtactctacaactcacttactttttgtcaaagttagaattctccragataaaagctggacgcacaaaccagcatggagggcatctttgtctcccccttcagaagtctyccctcctgggaccagggccaccaaggcctscccagcgactctagagtcccagatctctgctccaaggggctgtcttccttagtattatctcctctggcattgccccaaacgctgggtgaggccttcatccacaggccagggcccttgatacacacaagcccctgccaagatgcaccccgacctgccacccagcccatgcccctgtaccagccctctgtcccttcttcatcccactgtctccacctacggcagaccctttattgatcttaacccaggtctactgtgttgctgtcgttcccacagactcattttcagaatctgttctgccttttcctttgtctgcaactgaagattgtccctttggtctggtcctcattcycgtacccctatctgtttcttatttaggggagttaggagctttacatcatatcttacagatttctgtaaaatcaggaacaaaagggctgaggatgagcatggagactctttttgcagcatagagtcgcagggagccggggggtagcgggccatagggaaatcacaagcattgccaggttccctgcagacctctgtggcttgggcatcatttgcagtrggactcagcattacacggtgcacrtctcagcagcccgtgggaccgtggggctggacggccctcctcctcagcaccaccttcttgtcaaacacagctgtrcttggggagggtgggcagagcacaaagccaaggggacattggagggcagtggacagccaggcttgccctcaagggagcccagggcaaggagtgcactgagggtgactcagggaactggctgggaggggctgggaggcagagagggtgataggctcaacctggagagaaggtgagatcacccccaggtctcatgcaagggactgtggacctgagtggaagtgggtgcacagaaagaggaggagggagtatcgggtgaggtctcccagcctgatggggaacagccaccatgcagtccatccctccttgtctgcctgtacccatttatttttggccaggcaattcccccccaccaattctcagtgtaaatccaggacacctccccgaaagtgcccacacccctctagcccatgtgaacaacccctgtggcagacctgtgcacagcgtggcatgtgaccacagcctctcctgcacggtgagcttgccgttccctgtgctgctcccctgacccccaggaggggttgtcagttgttctgggacagccccaaaggccccatggcctccacagtgctgggcacatgacagggatcggcacatagctatgaacagcagcgtctggcatctccagaccttgctggaaatgtggcttttcttcactggaaggccatgtgaaagacagaatgaatgaaaaagaaagagagaaagaaagagaaaaagagagaaggagaggaagagagagagggaaagggaaggaagggaagggaggaagggaggaaggaaggaaagaaggaaggaaggagagaaagagaaagaaagatagaaaaaaagaaaggaagaagagaaagaaagaaagaagaaagaaacaaagaaagaaagaaagaaagaaagaaagaaagaaagaaagaaagaaagaaagaaagaaagagaaagaaagaagggtggcttttccctttgtgaattattcactgtgcttagtagaggaaagtgtgtcttcggctgagccccgatgatgtacaaggtaaacagaacagtccctgaaagcaaacattccagggtgcttggcccttagtgctccaggaaaaccacctggtggtagggctgtggggtgggggaggggagggggagggggaggggtctgcgtgcctccctcggggcttcaggcagcagtctaggttcacttcaggtttgtcaagacccctgcaattgagacacctctgatcgtcctatcacaggactgtagcttcaggtaaccccttcctcatggcctcccaagcaacatttcacaggaacaaatgtacatccaggatcgacacgcacatgcaggacactcacacgtagacaatgctcccaagtgcacatgcaaccagcatacatgtggagcatgcacaagcacacacgtgtaccacacctgggcacacacaacaaggcaagtcacaggcaccttgcacatgtgggcatgtgggccgtcagcatacacaccactcccaggcatctaacccaggcccaccgcctagctgccccttccacacatgcgtccgcagaaccccctgtgactggcacgtgtgcacaccaattmccagaarcactgacccacagaggagtcggtcacacatccagacacctccccaatttatacccgatggctaatttgtgtttacttggagagtttctgagttttttccttttgtatttttctcctcattgggtgcgatytggtttaaaacaaaaacaaaaacagacctctcctgaacaaaacaaccaattgcaagataggagctgggaggcggtggcagctgcaggcacagttggtacggttggcggggccaggcctgcagaaggctgggggaggggaggggcagggaggatgggaaggaggcgggcatccgggaacagccctgccccaggagctagcacagcctgctgggcagggatctgtggcttttggagtacattttatgtccacttgaggagtgagtagcattggcagtgggggcattgcttgccakggctatcccctggcaggggctgggcaatcaagacagggagggcttgggggactcctgggtttcccttcgggcaggcacattctgcarcaagcccagaatgtctaagctggtgacagatgaggatgcagccgtgagaagttaaatggcccaccctgaaccctactgctgagcsgggcaggctattcctgggactctattgaggcccactgacatggtcctggtttgcattgtccttctgggctcagctcagagccacctgcaaactcctgcgctagccaaggtggaggaggaagaagagcagtgtgcttcctacagatgagaggggtccgcacaggcaagccaagccaggaccccagaactgagcagctgccccccaccttcactccctttccagccaccacggagatcagagtcatttaatgaaatggcgccaaagctacctggagctgggggtgggaatgcaaagacgtgtgagacctggcagaggacaggccagcatttgggaggtccttacttctgccgggcctggggttttggcgcatctaaaaacaccccgtgttcttcagmaattctcctggccaagctttcttgagtattttagacactaatgccacacatagctctccctgggcaggcgcccctggtgtctgtcactcctccaggttgtcacatcctggggaatgcagagagagcaccagcatttgaagcttctgctcttggtcctgataatccccttgacttcaaagaaatctctgtcctgcctttgattctttgggacacaagatgagaggagaagcagggtgctgagaagcctgaggaagacaattcaaagcagaggtctctcggggaaggcggcgcagcttgagctccccacrtggcgtccgcccagacactgctggaaccttccacctccagcccaggcccctcctcagtcctggtgcctggaaaagtgggaagaggtgggaaaaatccttcactcctctgcaggccccggcccagttaactcaccacccctgcagggtgagccagaacgtgcctcgctgccacaggwttggctgttacctctcccgrgaccggcccggcttyctccctccctccctccctccctccctttgtttaggtctgtgctcctctgcttcccccagagacgcctcccctgctgactgctgtagctasccttgccccatcccaccccttccctctccatcctcgctcttttctctcctggtttatggtttgtctcttcctcaaatgcaatttgcaaaactctcctgaacgaaacaacagcttctgggaggtggtggcagctgcaggcacagtgggcgccgtgggtgaggccagggctgaggcaggctgggggaggggcggggcaggaggctgggaaggggcggggcttccgagagcaccgccctccgcgtccagggcagctccaccagggcaggggctttccctctctctttgttgtcgtccaatgtcaggaatggagcccagcaactcaaagagtggaagaatatatgcatatcataagattgctttctacacttttttgttcatgttttataaatacccctccatattgtatatgtatatattaatatgtattaatgattacattaatacacatagtgtatgtgcttatgtgtaatatagaataatatatatatataatgcacttcggtgaaacaatatgagagatgtgtgcatatctctctttatatggtatagatacatgaaattttacctaagtgcatctctgtaaaaagaaacactgagcagggtggcatgtgtctgtaacctcaataccttgggaatccaaggcgggaggatcacttgaggccaggagtttgagaccagcctgggcaacatagcgagacccccatctccacaaaaaaaaaaaaaaaaattaaaaagtggctgggcgtggtgactcacgtctgtagtcccagttacttgggaggctgaggtggraggattgcttgagcccagaaggtcaaggctgtagtgagctatgatcatgtcactgcactccagcctgggtgacacagcaagattctgtctctaaacctatatatatttggaatccactttgtgggggaaggattatataaagaaagaaatggagaagctgggtgggtagggagtatgtttagtccaaggccccagcctgtggtacatgcattactcagctccttgaagcccacagaggtcacagagctcacagctgggatagccctggactcctagcccagtgcctgagtgagcacaggaatcctcagtgtgtggctgatgtccagctttgtggccgggtgtggcctgtgtttctggccagagattggtgctgagtgcagctcaggaggcaggacctctccccggcggaggagatttaccaaagatgagcccagccttatccagagcatagagaggtggcagccttttacatccacgtggccctcctcagggaaaagaatcaagcacagggaaagccctctgccccaagaaagcagagagaccctgagcctaccctttcatagtggcttgcagcatggcaggcctcagcctaataacactctcattcctccaggaaatcgtgaaaaacccagaattcattcttggaggggccaccaggactgatatctgccagggagagctgggtgagtgtaagtggatggagcatggcraragggaggttgagtcactgggacaggcaagcaactgcagcatggggtccctgaggacccaagaggcayggggctgggggaacaacactgcttyggcctctgcttcctcactccctctgaatggagtccagtggcctcaagcccctgcacctcygttcctctagagtcagacatgcctgtgatgtggggctcacagccccggagtttacagaggaaagtgacacccagcagcgttggtcgggctctcctacaccaccacagtagctaacacctgcacacatgaactcagtcacctgcgaggtactctccccagcacacattgcctcattccatcttcacaacccaccctcctaacgtcacagatgaggaaatggaggctgaggaaggctaagtaacttgtccaaggtcacagaggtggtagacaggcaatcaggatttgaacccagacactccagcagcagagcccttactgctaaccattatacacaccctggggagccgctccccagcaatccagtctccctcctgcaatgaacctgagtgcacctcaagtcactcaaattgggtcctgcattttaggacttaatccaactgggctgggtttacctttgttctatctatgaaagacagagaragtgagagagcgagagactttcttttaaaaaataccagtgaaatcagcctagagaacaaaccactgcaagcttgtgtggaccctgacttatttctagctgaggttgtcactgtggtctattggttaagaaaggccatgctggaacctccatgctgagcaactgagctatcctaaacacaagatccaaagtcacaaacctagactgatgttagttaattagctagacagagagacaattgagagagagagagagagagagaagcaaatggatagatagatagaaacatagataataagtaatagatgataggtagaaaacggatgcataattagatagataaataggttgataggttgattgattgactgatagaccatacaaaataaatatataataatagatagatggtagtaaataatgataggaaggtaggtgggtaaatacatggatggatgggtatagatagatgatggatgatagacggaattacagttgaccctttaacaacatgagtttgaacagtgcaggaccacttctaagtggattttttttcaaccaaacacagacagaaaataccgtgttccaggctgagcgtgatggctcacacttgtaatcccagcactttgggaggccgaggcaggagaatcgcttgagccgaggagttcaagaccagtctgggcaacatagtgagggctcgcctctactaaaaattaaaattgaaaaattagccaggcttggtggtgcatgaccatagttccagctacttggtaggctgagatgggaggattgcttgagcctgggaagttgaggctgcagtgagctgagatcatgccactgcactccagcctggacaacagagtaagacactgtctcaaacaaacaaaaaggaaaaaaaggaaggaaagaaggaagggagagagggaggaagggagggagggaggatggaaggaaggaaggaaggaaggaaggaaggaaggaaggaaggaaggaaggaaggaarggagaaaatatactattccaggatttgaaacccgcatatacagagggctgacttggtataggcagattccacagggcttactgtgggacttgagtatgcacagattttggtatacacaggggtcctggaaccaatcccccatgtatgccatattctagatacaatgtagacttttcaaaaggtttacattcaggtggtccttctccaggagatcctccctgccgctgcccacctstccccctcttcctctgcctcccttcccctcgaccccgtagtcctccattgctatccaataggaaatcattctactggctcctttgtttttcaaagttttggtttgtcacattggcataaacatatatttggagttacaaccttatattttaccttagtggatggttgattctaaagattattttgtaacacttttactacaccaaagtactgtacatggcatatatatgttataaagaataacaagaaaatgaacagccgtgatctgttgccacccacaataagaactagaacatctggtcatgtagagtgctcacacctgtaatcrcagcgctttgggagggggaggtgggaagatctcttgagcccaggagttttagactagcctgggcaacatagcaagaccacatctctatcaaaaaaaaaaaaaaaactagaacacacttggaacagcatcaaggcatgctgttatctgcagggggtgggggtaggggtggagctgggtgagtgtgaggggatggagcatggcgagagggaggttggattgctggatcaagagcgactgcagtatggggtccctgagaacccaagaggcacagcgttccccctgcagtgagccgagatggtgccacttcactccagcctgctcctcccatagtgccctctgctctgcaccacccagatagccgagcaacacgctgacccacagagggcacttcttccaggcacagctgggtggccagccccatccatctgcccaggcccaagagagagaaaagcaatcttgttttggcttctcaatctccccgccaaaagctcagagcatttctggctgaaaacacgtgaggtgttgagttctcaggccggaaaacactcattttcctcaactgggcaaagttgaaacttggaggagagctgggaaaggtcagcccacagcagaggtcactctattagactcctgttggcctggccgccctgaagctgaaagcagacaccaagtctctccttatctttgcatcttctgcgtggcacaaggtctgccaccctagaggcacttggtaaagtttgctgaacaaacgatcctgcaggttccagccatgtcacttcctagtagcatctcccaaagctgacctgaggctcccaaagaccagcagatgcattagaaaccaatccttctgtgctccagctaaggctgggggtggcttgtactctgctggtgacacctctcagaaagccagaaccagggcgattcggaattagctttcccgatgttcrgccctggcgagtctctcttgcctgtgtcaaacagccagaaarggccatattacaatgtcccaagcccagtgacatacggtgctttccagaaatgtgaactcagaaactgccaagctgagtgtgatgggctyttakgttctgatgacgttgatgttgtctactgaaaacaagtgaatctggataaaggtgattcggataaatggatcctcccagatatctgcttacacaggcggcatctgagacactgtgaggcacacaccagacacagcccacactcagtgtgggcaaaggaatgcctccaggagtctggaacagcacagatagcacagataaaatcatgtttgatgtttgacttcactttttagttttcctccagatgtgtgttaacatgaagacacagctgggaagttcagtaggtcagtcaataaatcttgaaaatgcaagataatttaaagcaaatggagccaccacggagataccattatctgtaattaagctgwgtctgggttggggctgcagggagatttctaaccaccctcccaagtactgccgaaccacttgggtggcagctatgaaatgtctgctcgcccagcccrtgctgacactgatgtatgcagtcttggtcctctggaaagggagttgctggaattyacagagctgatgcatcaggcagccatatgtctgaaacccaagtaagcatgtcctataacagtgccaagaaggcaacagctgtttatgatagacgggcagagaagagcaggcaagggaggcagaaggggaggagagagttatttgttggtgtcctgtctgtttttaaacaggtagaaaagatgtggccacatctgaaactccccacatccccttctgacacagagttttcctatttgctgtgaaatagcaatgaaaattgtgatttatggcttccattttgcaggagactgctggctattagccgycatcgcctcccttacgcttaatcaaaaagcactggccagagtcatcccccaggaccaaagmtttggccctggttatgccgggatattccatttccaggtaagagggagccctgrgccagtgggtttacctctctggggcccrgcatgagggcaggtgcatttccacactgcctggtaaccctagaaaaaaatgtcatcagatctgtgtgacatatggtcctaaaccatgctaaagccacattttatcatggaataacagctaaatgcctcagaagaacattaacggcattgcacggtgaatccttatggagcatacatttaaaactataagtgatgttttggcaaatctggaggtccatctgttaagggttttattatttggaatttcttgtgctttaagcacaaattgactaaaccaattatacctccaggaaactggttgatttctcataaacagagaggttctctttatggaagaattgtaaatttggagatcttgagggattttaaaaaataaaaactgagaaaaatacagacaacatctgctggagtcccgtgtgacccgcagaccctcagccgaggtgcacatcaggagaggcttgcccccaggagatggtttcctgctgcttcacctcactttctatccctccagtctctcctccacccctgtccttatatagggttcgaccagatactgaaacttgccccttgttcttacttaggtgggtgacctcagacaattttcttagtgacattaaacctttctacactcgtctgaaaaaaggagagactgacagttccctgcaggcttccygtagagctaaatggcatcacacacaggagcyggcacagagccaggcaccgagtaggcattccttgaccttccaccccagacagtgtcaccttctcctgactcacaggccaccactcagggccagcccgtttcttctgtccctgargcctgcaatctgataagcagaggtactctcaagccctgtcaccaatagcacagaagtgtttcaaaggcaaagagagtgagcaggtcacatgtagctcagggagcatgcaattcccaggggtcaggcctcctgcgccggctggggacagagccactttgggtcccagggaaactctacccctgctctctcacagacctgccaccacctggctgtctcccttcccatcctgtgacttctgctgagaccacagtcttggtttgatggcgcccccaggagccggtctttccccagtcctcttaaacacaccagggtggcagtgttgggggtggttaagctcagaaaatccagcagaactactgcctctaaaccagaaccagaaccagcagaactactgcctctaaaccagaaccagaaccaccacctcttgggctcccaaaaggaacagtgttcttgtcccttgaatgtcacagctgggaggagccttggcaatcccctgacccagtcctctcattaactcccgaggacactgagtcccagggagtggaagtggttgatccagggtcacaaaacaataagtagccaagccagacctagaactcaggagttctggatccagcatccttttgtgctgccagggatcatgtgggggtggggagtgaccctgttgatgcctgtcagtcccgcaataacaatactccgcccgctcccctccttggccttctaggaagcagagctttggaaataaatccacctccttcacactcctcttccactcctcagccacagtgcaggtgtgcgtgctaggaagttagcagagctctctgggctggcagataatctctcctgactcacaggccccctgagccagcccctctgcaaggaaagccagccctgaggctcctccccactgctcccctgctcaggaaccccaaggcccaggcccgaactttaaacacctaacccaactgtgcctcagtcccacctgaagctgtggatagccccaaaagcgggaagccctggaggggaggtccagctggagcaggtgacaagaatcttccttaaaacacacacacacacacagacaccctcagccacatcgtggccaactcttctgattgggattgaatcactgatgcagcaagatgctcaggatgacacagcaaagctgtaaataaatggctcccaaaaccactgtgcctaccctcctctttcaacccttttcttyttactcttagaggttaccttaggatcgctctcaggccaactgaaccagaaggaacgggtaggaggtgggtcactgcaggatacacagagaaactaccatggtccttgactcgttccaacctcccttcctgttcccagcagaccacacacaagctcatacacatgcatacatgtgctcaaacacacacgtgtgtagaagcacttgcaaacacatgcrtgcacacatacatgcacacacatgcacacatgtgagcaaacacaygctttcacacatgcaatgtataaataaaccacaaacagtgcacatacctgtcatgcctgcctgtatgcacatgtatacacatgtgtgcgcacatgcattcacacacacccacactccactcatgtctcctcactggcacgcagggattactgagtccacctgcctcctatgtgaatggccaacaaatcagtcttaggggctccacttatgggcgaggagggagcaaggttaaggaaaattggagctagaccctgaaactggatgggagagaataacagagaactgggctacaaaacagcaaacccaaaccccacgttaccattctccctcccccacaaaaacaactttcttgtgaagaagaaaaactaattcagagcaccgtagagtgtctacttgtgagtcctgtcctgccccctgcatcgcctgcggctttgatgggttgaccctgagtctttcagctgatgtcaatggttagtgctgggtggaatactcagcttgtaacttggtggacaaagcccaggtgccctaccttggaacccgtgtgtgattttcaaagctgtctatgggtagcttggtcagaggggaaaaaagcaacaggatcaacatttacaaacagggcctggagctcccatgtagctgactcrcatcatttctgtctttttcctgggcaacagttctggcagcacagtgagtggctggacgtggtgatcgatgaccgcctgcccaccttcagggaccgcttggttttcctccactctgccgaccacaaygagttctggagcgccttgctggaaaaagcctacgccaagtgagtgacagcttccccagctcargcagcctcccgacaggagtctctayactagtctttgtagtgagcatctaagggctgggaaaaaatcagggctctgggtttgcaggtgaggctcggcaggacccaaccctctcagggctcaagcggggttggaggtggttttcctgtcgtagcctagatgtgcccatctttgggagcagtsgctacattcatgaccctttttctccctgggccatgaatctggcctttggaagagctgggaaggcaagcggaggggaattctggctgtgccgacagcacttagtgcttcacacttccctcggacactggcatggctcaaacatctgggctattacgcacgtkgatatagagacatcaattgtccgtcctacgggatgcttcttttttatttttaaaaartcgtatatgacatatcgataaataatcgtatatgataaaatgtatatgacataaattttaccatttttaagtgtkcagttgagtagcattaagtacatccatgttgttgtgcagctatcaccacgatctatctccagcactttttcatcttgcaaaactgaaattctgtccctattaacaaataacttcctattcctcccttcccccagcccctggcaacaccactctactttctgtttttatgatttatctagtctaggaacctcatataagtggaaccaagaaattcatttttaatcaccagccaaatggcctcagtttcctcaggctctcaatttccagcccactagctcgttagtgaaaggccacaacagcctgaatttgatccacagatgatggcagagctcctgggagccactttcaggttcagcctggatcttcaagccatgagaatactatccccagagacagaagcaaggatggtcttgcttctacctccaagtgggacataaaagtggcaaaatagaggggaggcatactgtggttaaattaatcctgaaatcagcaggacagaattaaagccatcaaataagaaccaaagatgcccacgcttgccctctgtcccacccaggtctgtgcaaacaccatcagtgccaccagacaggcttaaggggacaaagggcactgtttccaagtccagtgggtgggacccaagcccacctctgccccttggtgagtgccccccacatcaggatgcaagcaaggcaacagaaactgtgtgccatctagtttctaaacataaaaaagatttattggggtcacttaaaaaggccaaaaatggttggcagaacagctcaccaaaaaaaaactgtatagatggtgttatggttagttttatgtgtcaacttgattgggccaagggatgcccagatagctggtgaagcattatttctgggtgtgtctgtgagagtgtttctggagaaaatagcttttgaatcagtagactgagtaaagaggattgctgccaccaatgtggacgagcattattcagtttgctaaagatccaaataaaagaaaatgacaaaggaagggtgaattccctttccctacttgaactgggacatccatattcccctgctcttggacattggagctcctcgttctcaaacctttggactcaaacttggacttacatcatcaaccccccaattctcaggcctttggactcaaactgaatgataccaccagctttcctggttctccagtttgcaaatggcagattgtgagatttcttggcgtccgtaactatgagagccaatttcaaacgtatgaaataacctcattgaaggggttggagagaaaggtgctgacctaagtaactttggaaatcagtggagtctgtaagattaaaggcaaaagaaactgtacgtgagtgctatgctctagttgctaaaattgtttcttgtaggagtacaaatgaaaaattgatctaattatacatgtatattgagctgaacaatcgagtgaacggatggtggatggcgggagccgagtttctcactgttggattgagaggttacagataggcaaggggaggaggccagaatgatccatgcagattagagttggagattccagaatgaacttagatttagcttaacagagatggttatgtagagatacatggatctgtacatgggttatcatacacatatatattgatctatacttgggttatcatacacatatgtatttccttgctttgtcagtgagaggaactagaagcaatgacaatcctgtagcaacaagcacacctatgtctcaagtcttggtttctaagatcattcttcaatcaaaggaactggggcttcttggagataaggctgattctaggactggggcatacacacatacatacatatatatacacatacatatatacatacatacataaaatgaacctagatcatcttatagtgccagaaaatgagaacacatgcaagacacacacacacacacacacacacacacacacacacacacacacacaaatgaggttatgccaaaagggcacaagagcatactgaaggagctccaaacagccaaagctagaagaattcaaccaacgaaatagacaaagcagtactggattatgaacccaagtagaagctgggtgcagtgactcacacctgtaatcccagcactttgggaggccgaagtaggtggatcacctgaggtcaggagttcgagaccagcctggccaacatgatgaaactcagtctctactaaaaatacacaaattagccaggcatggtggtgcatgcttgtaatcccaactactcgggaggctaaggcagcagaaccacttgaacccaggaggtagaggttgcagtaagccgagatcatgccactgcactccagcctgggcaacagagcaagactccatctcaaaaacaaaaacaaaacaaaacaaaaaaacacaaaataaacccaagtagaaaataaatatcaatgggttcatactaatttgaataaatgattgtataaataaatgtggaagaaggaacatatatcctgtgtagaataattccaaataaattatgtttatattccatccttgaggaggtggagtataactccctgattttttcatgcggccttcacataatgattccttccaaagagttcagcatggaaaggggagagaaggagcaactttccagtggagacacctgactaacactaccttagccaggtgatcaaggccagcatcagctgtggtaaggcatgtggacggcaggtactcttgatatsatgagatgagagggsagctttacctctccggtcttccttccactaaccaatagccccactcttttttttattattatttacttttttttggagacagggtcttgctctctcacccagactagagtgcagtggcaccgtaatagctcactgcagcctgcaactcctgggctcaagtgattctcctgcctcagcctcccgaaatgctgggattacaggcaccaaccaccacacccagctatttttttaatttttaaaaaatgtttcattttttatttttatggatgcataatagtgcataatagtatacatattgatggggcacatttgatattctgattacaagcgcacaatgtgcgatgatcaaatcagggtaattgagatacttatcacctcaagcatttatcatttctttaatagccctagtcttaccaggagaaaaaacattagacaaattctaatcctgcagtatgcctgcccaggactcctcaaaaccgtcaaggtcatcaaaaacaaggacagtcttataaactgtcacagccacaaaaagcctaaggatatgtgaggactcagtgcagtgtggggtcctgggtgggattctggaacagaaaaaggacattaggtaaaaactaaagaagcccaaataagctattgtattaagtctgttttcacactgctgataaaaacataccctagactgggcaatttacaaaagaaagacattcaattggactcacagttccacgtggctgggaaggattcacaataatggcagaagacaaggaggagcaagtcacatcttacatggatggtggcaggcaaagagggcttgggcagggaaattcccatttttaaaaccatcagatctgatgagactcattcactatcacaagaacagtgcaggaaagacccgcctccataattcagtcacctcccaccagattctaaaattctaaattgaaaagcttatttaaaaatcaagcagagcacatatatgtaaaatgcatatgaataaaagagatgactatgacaaaaatggttaggagtatgtgagaccagagaagaagggaaagggcctctctctatccacatagccaggccccgttccatgggaggttagagagtgagacacacgatttgaacctcacagcagtcctagaagggagagcacaactctctcccccattttgcatataagaaaatgaaggcactagcgacttggtcattcagatggtaagtcgtagaaccaggatttgaacctgcggccactcaggcaccagagctgctgctctataccaccacaccacactgcctcccttgcaggaaggtcaggatctttggcttcctcgaagctccaaacaaaccctgataacttgcttcccgtcttccttccacaccacccagccagggcaagccctgggagatgcttcaggcttagttagaaaagctctgaaagcagggtgcccyrgtggcctccctaggtccctgactctctcctctctctcttgccacccttgcaggctaaatgggagctatgaagctctgaagggaggcagcgccatcgaggccatggaagacttcacygggggtgtggcagagaccttccaaactaaagaggcccccgagaacttctatgagattctagagaaggctttgaagagaggctccctgctgggctgcttcaytgatgtaagttgctcatgggctcccattccaggcactatgctgrggctgcatagtgcattccaggcactatgctggggctgtaccaggtaccccagccacacccaaggaggggcataactcttgggggcagtgtttattcctgctaattaaaacacaagttttggggggaggtgggagggatagcattaggagatatacctagtgctaaatgactagttaatgggtgcagcacaccaacatggcacaggtatacatatgtaacaaacctgcacgttgtgcacatgtaccctaaaacttaaagwataataaataaataaataaataaataaataaataaataaataaataaaaaataaaataaaataaaataaaaataaataaataaaacacaagttttaaccaagcatggtggtgtgtgtctggagtctgaggcaggaggatcccttgagcccaggagtttgaggccgcagtgaactatgatcgtgtcactgctctccaggctgggtgacagatcaagaccctgtctctaataaataaataacaaataaaacacaagtttttatttaatagtcgtcaaataacaaaggtaagatgtacttgctgtatcagatggaacaatcttgaggcccatacaggcgcatttttacctccctcccacccgtttctcagctgcctctgttctccagctccaccctgggactgggatcacctggcctgtatccttcccagctctctatctgctcgtacaaacaggcacacacttccacacacaaacatcaaggtcagttggtttgattttactgaaaygggatcttyctatctagttttctgaaatttgttttttttttttcatttcatgtactatgaaaaaaatagcagatagaagtctaatgatattttttaaaattttctctatgcatacaaacacacacacttataattttatctcatctttttaaaactttttgttgttttttatggactgctatgacactatgtattttttttaatcaattctagttttctgtttcctcttagattagccttggggtctgttttttgctaatgaattagccagttcctctgcactttcaggtttgtgacgcagagctgtgtgtcctgttgttatattcttcttttcgtctctgggatgtatgtgattgtgtcttctctctcacactatactacatgaaggtgacaagttgttctgtttggggacaaaatagtgaactgttctttggagtccacactggaagcgagcgcctccccatcctgggaagagactggaacttgcttcatgtcactgctaaacatcctaggggagccccgtgcatagcccacgcacatggcctgcacctggggcagcagaaggggctggaggttgtgacygggccaggcatgtagctgggtctgatccagcaggggaggcttgacttagacggtgggtgtgackctgctyttyccatgttttagaccagaagtrctgcagaatctgaggcccggacgccgtttggtcttattaagggtcatgcctacagtgtaacgggaattgaccaggtaggcgacttgaactccaactgcaggctatggggagacatgtgacaatgctaatcccttaggcatttattcagtgcattgcagtttaaatgtctgcctttcaggcatttcagagattatgtcacctaaagaggcaggctggaattcaaaacggcaagccaggaaagagagaaaccatgtgattccaccgcagcacaaaactcgtttagcagctgtaagcgcctggtctttgtttatttttaatttcctttctttcccaattctccttcagtcctgtgttagtcaggattcttcagagaaatagaatcactagggaaccaaatatatatacatacaattaaacacacacacacctatctatctatctatctatctatctatctatctatctatctatctatctatctatctatctacatcacacagttgacccttgagcaacacaggcttgaacttatatggggattttcttccatctctaccacccctgagacagcaagaccaactcctcctcctccttctcagcctactcaacrtgaagataataaggatgaagacctttacaatkacccagttccacttaataaatagtaaatgtatttcctcttccctatgattttcttgataacatttcttttctctggcttatttattgtaagaatacagtatataatataaataattataaaacatgttaattggttctttaygttatcgataagacttctggtcaatggtaggctattcggagttcagctttagggaatacaagattttttgacaatgcaggagggttggcaccccaacccctgacattgttccaggatcacctgtaatacgatttattgtaaggcattggctcatgcaattgtgaagagtaagaagtcccacgatctgctctctgcaaactggaggcccaagaaagccagtggtgtagttctggtctgagtctgaaaggaaggcctagccaccaggaacaccaatggtaaaagtcccagtctgagggcaggagagacggatgtcccagctcaggcacccaggaagagagagtgaattcccccttcctctgcctttttgttcwggtcaggtcttcacagatgagatgaggcccacctacactggggagggcaatctgttttactcaatcaacttaaatttcatgtcacccagaagcacccttgcagacacaaccagaataaccttaaagcaaatatctgggcaccccatggcccagtcaagttgacacataaaattaatcaccacgagtcccattcttgtagctgtagcccagggtggaactgatcctgggggacacccagactccacacagcaccaccctgacttcaagggagctgttggttaggaggagagatccttgaggggcacaaggggaagagaaagaaagaattgaatgaaagaggaggacaagaagccaaaggtatcactctgccagactcaagctcagcaaagcccagcagcctgccttgcccactccatgcctccctggaccagtctcaagcccagtacttagaaggtgcagatgcacctggtcttctgtagccacccaccttttgagtgacatcctctgaatgcgtggggagtaaagaacactgaagggagaccctgcccttcctcctcactggagccaaggtgtgagacgccgttggactctttgggattctttagaatgttagctatttgtgttggctcctttgtcctccttcaccatccatagatgacttgcagattgctcactcaagcrggcatgtgatgtttctaggttagatcttctacgtattccacgtaacaacagaaacctctcatcatcttggtttgcttgattttgcttcctctcccccctacaaggaactcacctgccctgaacctttcaaattaaatgagcccctttaatggtgagccacaagccacatcttggactcygaagagttgatgttacttgaatttttacacatccaaaatataatttatgccaaatgcatgaggataaaacattctgactgctacagtttctggttagtygataactagaagtcttttactttcactctctctcctctaaaacccttctcaaatgcattggcccttgtccctgctcccaggcagagcctgagggcacacaggctcaagggtgattgaggtgaacagcaggaatcctcacagacacctgaaataaggagaatattgggtctagaagacrtaaaagctgtttttgtttattgttgtgtttaaatccccaacatgtgcttattttcttatcattcatctgtgcatgggatgctaggatgaagaaagttcagtaatagttccatgagcacctttgaggactactctttaccattcaytctgctagatgctgaagatgcctaagacttggctcctgcctctagggagatccaagtctagagagaaacccatttttagattcatatggactaatttcttgttaattgcaattctactttacttcccagatgtggcataagcattttggtgcttaatataatatcattggcaatagtagcaattattcaataggaattagaaggttccaagggctggttaagaactggcgaacttctacataccttcagcagcattttaggcaagagactttcaacagaaccagttctggatggagctggtccacctggagctcatagatgaatgtggccaaacctccaccatatttatcatttcacacttccctcatgcttttcccttctaggtaagcttccgaggccagagaatcgagctcatccgaatccggaacccttggggccaggttgagtggaacgggtcrtggagcgacaggtcagtcaccctatcctgcctctctggctggttcccggggcgtgtggggccaragctggcttgtgcagacatgtgaaggagtggcctgtctactatcctcccgggctctgactcaggatcctgtccygattctgaggtgccccttcttcctcccctttcagccctcaggcccaccttgcatcaaggttgattctcaagaaagacttttacaacagcactctaactttcacgaattgtatttatgtcaatacataaatgtgttacctcccatggtgatgtttataacccagtgatatggtgaaaagctttatctgtagttgtgagtaactccagtaagcagtgtgcatatgcataartgcgtgtgtgtttgtgtgtgtgtgtgtatttggagtgtcggaatccctgaaatattacctagcatgtaactataggattctctctgatggtcactgaccatggcagaggcccaatagcccagcagagaaatagaagtgaggctgagcatggtggctcatgcctataattccaacacgtcagcaagccgaggtgggaggatcacttgagtatgagagattgaggctgcagggagctatgattgcaccactgcattccagcctgggcaacagagcatgttgaccccatctctttttttttttttttttaaaggaaaaaaaatagaggacatggaattggaattttatctattacagagctgttaaccagagttttggcccccagttatcaagaaaggtctgccttttctgtgtgtgtccccacagctcctccagctctggtcccttgggaagtggaccaggtgactaagaaccagggatgtttgtgtgggtgcgtggcagggcctgcctgargctgttgctcgtccgctgcttgttgggctcctgaagccctttcctgccacatccatggcccctgagcttctggggaaatctgaagctagtctagaacttggttaaaactgagccagtgtttgtcttcagtccagacacagctaccaggtcrccagacatggtgcagccgctgctgtattagccagaccccagcgtgagggcagggcacacaggcctgtgctttccaggctgtcatkgtccccatggaggctctcgtcccaccatcctctgctctggccttggctgccgccttctgagaaccaagaagcattggcagagatgagctgagatgggttgaggaggaaagagattggcctccctctcctggcagaaatggaaagcacagagaactactgaaaccaaaattagtgagactgcgtcacgttgtaagatgtgcagtgcccctcaactttgagatcgtagcctataaagggaaaatgggccattgtctcccattttctgggactcacagaggtagaaatcaagaaagtgactgagagccaaggctggaataaaatttgtcttccactcatgcagcctccatgggtgatgggaggggcaggcgccrtcccgaytccctgacttcgctgtgctgctggtgacatgtgagtagggttgaaggcaccgcatggccagcctgtcaggccaattatctgggtgtgagccacttaggataatggctccaaaagaaaataatggctgccagttccactcttctgaccctggcccgagcacctggagacaggtcccggctgatcctccccttggatcacctgagcactcccctgaggttgagttgagatcacaggatgagagggagctgccacgttggctgtagcaccgcaacagtggtgacctactttgaactatttggaggcggctgtgggagtcacagaaaatgcaatgaacttggagtcacaaatcctgagtttggagagtgacaggcagccattcctacccctactcttccctgagagtgtttccatgggcctacctgagccctcttatctgcaggacgggcacacctagctcacagaaccccacctggcttgccagcgaggtcacatacaaaaggtgccgggtacagacaacatcaagcatgggcaggtgtaaggcattatcacctttccaagtgtcagcttgtccattaaggaagggccaagtactgctccaggtcacatggcaagttggaggccaagcacgaaagtcagcagacttgtggcttccagccgggctcttctgctaccccacgggcatgcaatgccttgtgactatcccaagataatcttccatgtcggtggttcagatcatcctcaggggtattttatccatcagcaacacttggagatgtactttctgaccagccctcttatttgggggccagtggctcacctgccgctacatccctgggtgcatttttgggacccagtgagtagttactaagcaggtcttatttcctccataaccgcacactgtgggttccacatcaaggccattgttgctcttcatcatgacctctgcctgaacaccaattttgtttactcctagttctccggagtggcgttctgttggtccagctgagcagaarcgtctgtgtcacactgctctggatgatggggaattctggtaccgtgcttgttcctgtgttaactgcagatacgagcaagtcccatggccctggggcgtaaggagcactgtgcttctctctcgctttcctttttctttctttctttctttttttttttttttttttgagacggagttttgttcttattgcccaggctggagtgcagtggtgcgatctcgtctcactgcaacctctgcctcccaggttcaagtgatactcctgcytcagcctcccaagcagctgagagtacaggcatgcgccaccacgcccgactcattttgtatctttagtagagatggggtttcaccgtgttggccaggctagtctcgaacccctgacctcagagaaaccacccaccttggcctcccaaagtgctggaattacaggtatgagcyaccacgcccagccttctctctccatttttggcaaatcaaattcatctgtctcagactcctcatatacacccagattagagggaaatttaatctccctcctgtcttggtgggggctcaccccagctctcggtttgttgaagagtcttcagggggttcctgcaatccaatagaggaagagcctctggtctctagcctgacacacctccttggcactctttgtcatccaggtttacacagtgaatttgaagacaggcagccctactgctcacaggatccattccctccacacccatcttgatgagaggtacctttgaaggcagctgccctgagagcatctaaagatatcgacctacgtaggaagtaaacatttctactctggactttcccttggcctgaatctctttgtttaattgaacatttgtattgggccttcatctctagaatctttttcagtcttatttcttcctgtttgggttctagaagttggcccttctaaccctgtgagaccacaaatttctggtttctggctctattccctttcatgtgctccaaccaatcaagtcttgcctgagctcatctctttcttgtaacagcttttaaaatacaacagcagggcacggtggctcacgcctgtaatcccagcactttgggaggccaaggcgggtggatcacgaggtcaggagattgaaaccatcctggctaacacagtgaaaccccacccctgctaaaaatacaaaaaattagccaggggtggtggtgagtgcctatagtcccagctacttgggaggctgaggcaggagaatggcgtgaacccaggaggtggagcttgcagtgagccgagattgcatcactgcactctagcctggacaacagagtgatactccatctcaaaaaaaaaaaaaaaaaatactacaacccaaaaccatgactattccagcctttttcattcttttcccatagaacacagcctcagtagtgatttgttctgccttctgtatttttatagttgtcttagtctatttgggtggctataaaaaaataccatagactgagtggcttacaaagaacaggaatttatttctcacagttctagataccaggaagtccaagaagatgacacaggcagtacctgtatctgtggagggccctgtttctgatttatagatggatccttctcactctgtcctcacatggtagaaagagggcaaggcagctctctggggcctcttttataatggcactaaccccatccatgagggctccaccctcacaacctagtcacctcccaaaggccccacctcctgacactactacttcgagggttaggattcaacatatgaatttaggggagaccacaaacattcagtccataacaacatgcaacagatttacccaatgttttgccactgcataacatagataaccattttccagctcgaacagttccatgatccctcttgctcaactgctaacatattttagaatttcgttgtggcagttctgtaattcaaggcaccaatgactcaaggtaacactagctgcagtagtgaatagaccccaaatatataaaggctcaaacacagtaaagttttttcctcactcattatgacagtccagggaggatgttcatattctgtgggtggctctgttcatacagtgattcaggaacccaaacgccttctattgtgtggctctgccatcttctarggtcacgtcatcatctgcacatagccagcagaagagaagaataaaataaaacattgaaaaagacactctcactttctaaaaatcttgactcagaagtaaatgcgtcacggctcacattctactcccaaatggaaggagtggggtgcagtcttggtcctgtgctgatgactgccagccatctctgcctcgggaaccatgagggtttaggttccccagatttgtggaacacatgcagggtgcttgagagattcccaagctgtcaaattagaaattacagataaactttgaattttgaagtacaggggactttgagttagggggttacaagagaggagcaaaaactgcaggaagaaagctgagttctggaattagtaccatcacagtaattgctgcatatgagcaggaggtagaaaccagagtttgagaggctacctgaggtcaggctagtggaaagaaggtctggtgcagacggtgggagaagccgggcagaggaaactcggaaattcacagcaggargctccacaaagaagagcgtccatgtgagtgatccattgccctgcccctcttgaaggagcagccccaacaccwgggctgagcctgcccaaggtgatgggtggtgttaaatcatgcactctgtgcgtggagcccttcctcctggaatcctgactctgaagccctgtgtagcctctttccattcttcaccrgctctaggatgtacctcctgcaactctcttctctccccttacgtatgaattccccccttcttctgaatcattccccttagcactccaacactatcatttctcctacctgcaaagaaaaaaaaagcctctcttgacccactcaagtgaccaacccagctctctcctgtcctctacagcaagcccgccagttcctcttctcccttactctctcgactccactcagctatgagtgtgccccaccaccccactmaccctgatcttgccagggacgccaccgactctcactttgctcgatcagattatcttgatccatcaggagcccttgacgtgctggattgcgggggaccacacgccctggtggtcctcctcctacctgagctccttctcaacatcctgtcctggccccctctcatctccctaacctgttagcactgaggtgtcccaggaccccatccatggtccccctcctggctgtctattcccactctttaggcgtctcgtctggtctcttgactttaaaaactatctttacactaattctcaggtttctatcttcagctcctttccccaggattccagagtcacatattcaatggtctactttaacatctctccttgaatgtataatagacatctcacattcacgtgcccaaacctgacctcctgagcttctctctcaaactgccccaccacagccttccccatctccatccttccagtcactcaaatcaaacatcctgattcctttcattcgctccttccccacatccagtccattagcaaatcctataaaatttacctttggaatgtgtctcaaatctggccactgttcatcacctcccataccatcagcctggaccaagccacccttgtctctcacttggacaccggcactaacttcctagctgcctctctgcttccacttgtgtccccaaagtctgttctcaacacagcagccatggagcatgtgactcctctgtttactgccttctaaaagctctccatcttctcagagtcaaagccaaaatccctatacctatttgacgtactatgatctcttgatcttattccttacagacacctcgtgccttcctggtgttctgtgagcacctcaagcacctctctgcctcggggccttgctgtccatctgcctagacccccagagagctgccctgcccaggacctggtagttcaggtctccactcagaatgtgccccatcagtaagggcttctcttacctccctgtttaaaatagcatcccacccctacgctcccatccttcagcccaatttggtttttctctgtagcacttaacatctacaatcaatctatatttttagcctggtttttacctttttaacctttattttacttttaaaaaattttccatctccccacactttgcagtccccccactccttgcggacaggaacaagatgatttaatgaataagtgaatgatttaatgaatgagtgaatggatgatgccctcactcttgccctcctgtgcatcgtgtctctcmgctttgctgcaggatggcatttmaggacttcaaggcccamtttgataaagtggagatctgcaacctcactcccgatgccctgraggaagacgcgatccacaaatgggaggtgacggtccatcagggaagctgggttcgcggctccacggctgggggctgccgcaatttcctgggtaggtaggctgcctgtcactctctctgccactcccaagtgtcccttccaactcaggacaccaaaggataagggccgggtcctcagagaaagcctgaaacatagtaaggtttcaaaagtgactggggaaaaaaggctgcaaagatttagttggataagaattgtttggggaaacctcctttgttttaccacttaggttattttccattacaagtaatggaaagcatgactcatgccagtttagcaatagaaaggatttgttatctcacataattgaagagctcagaggaaaagtagggtgggcttcaggcacagttctatcagggccctggttccatttgcttgtaattcactgttctgccctcttttatgtgttgacttctttctctgtctggctttctttataatcacaggagggctggcagcagtatccagggcttcctgagccctcattcacacgaacagcaagagctcctgggggtatcaaaaaaaagccctcaacttccctctaattggaaattccttgaactaatattgtccagtgaatgctatgcattgattggctttgtccaatcctcggtggcaaaaaggactggcacagaccaatcagaattcatgctggagcagtgctcgaggtcaatcctactcaaacggcccaccatcaagtagatgccagggggacaaccagaagtccactgcactctcctttgaaatactaagtggaaaaaaaactgatagaacaagctttagcagactagacccagaagaatgtccttaagaaactgcataggaaatggttgaagagaaggtggaaatgaaagagaggatattttgcattcccgttggggattatcaaaagtagggtaggaggacttattgaacagggagagaaggtattactttctcatgtttggtaggacatataatgagggcagataggtgtatgtgcgtgtgtgtgtgtgtgtgtgtgtgtgtgtgtgtgtggtctttgtgggttgttttttaaaaggggaaaataatctacctctcccaaatgacagataccttttggaccaatccacaaataaaattgtctctgactgagaaagatgaggggcaggaggagtgtagtttccttgtagccctgatgcagaaagatagaaggaaactcaagagatttggtgccaatgtgctgacaatcggctatgccatttatgaggtaggtgggaaccacactgcatttcagagttctccatctgagttctaaattcgcggctcctcctcggtctcacacccgagactcaaccaagagtccatgaattgtgtccgaaaagccaagaggaacttccctaggaaacccctccctttcttgcccattgcagtgccctgacaaagaygaacacctgaacaaagacttcttcagataccacgcttctcgggccagaagcaagacgttcatcaacctgagagaagtctccgaccggttcaagctgccccctggggagtacatcckgattcccagcacttttgagccccaccaggaagctgatttctgtctgagaatcttttcagagaaaaaagccattacccggtgagtcagaggaacagcttccagaatcccacttcttttagtggtttattcacacagaagtcacctgggaactgctggagccaagactccattcttccctttcccatgtgtacctgagaaacaaggcaggatggtttctttcttttcttttatttattattaatttttttttttgaaatgaagtttcactcttgttgcccaggctggagtgcaatggtgccatctcagctcactgcaacctccacctcccaggttcaagcaattctcctggctcatcctcccgagtagcaaggattacaggcacccaccaccacacccggctaattttttttgtatttttagtagagacggggtttcaccatgttagccaggctggtctcgaactcctgaccttaggtgatccacccgcctcagcctcccaaagtgctgggattacaggagtgagccaccacgccaggctgcaggacactttcttagcttatctgcaaggcaaggcacatatcccttctagctctgctcctcgctccctcaagcaaaccattgaaaagttgctgttttctactggtcccagagtcatgctcacaagacattcttgggtggagaccttcatttttcagaccctattaccaagaagcttcttggataagagccacatgcagggatgctagacatttctgggcatgatgaagggggtggctattgcaaatttcaagaatgacatgttctttcagctccaatttaaataaatgttggcaaatctgcctctcattttacatacccaatattccaccacattttcctcacagtgtcttagcgaaattactttatatcagttacttctatggaaaatgtttcccattactgcccattcaccattggttgctctgtggcacagggggaaaaatggttcaagacagaggaatccatttcttttcccgatgacaatattctaaagattaaggagaacgctaaaatctgctaattctgtatttaagctagataagtctccaacaaaagatcaatctgcacagagttaacaagagagacagctgtgaatacatgactcactctagtttcatctttcgtttagtgagagagaattagattggtggcatgcattgaaaagactctcaattatgaagtctagtggggtttcccaagctgattacaaaaggcatggttctttctcttggctaaatagatgcagaaaagtctttaatttttaaacactctaccagagaatttttctccagccttctcccagatactagtacaagatggggatgaatatcctagtatctgttcacacaaaagtaccctgtatgagatccatgcagattgacatctcttatgggtggcaagaacaagagagacccaagttatgccaatgccatgcctcttgttctctatcttattagtggggtgagctcagagtcactgacatgcataaggtgacttgtacatggcaaaaaactccatactcaatcttgctctgaacaagattctttaatctgctatgatattgagtataagaatcagctctgtagcttggtaacaaaaattcacactgagctgtgttygcattggtttagctctcagacagactcctgattaaacaaacagaagttctgaaagggttatgttatggatgcccaggggatgaggaggaaagggaggactacccccaattgatgttaatgtttatttgtattccctttgactttgtatcagtttttctttgagagcccttcaagttttagtctatgagactgtattcttccaaatgtttttagcatcatcaaaagctgaagcctgctcctcctcttaatattactactatccaaatattacaagtccccctaaatatgtgaatagcaaaaaaacatgattgcatcatttttcctctttttccctaacataagcacagagacacccatccctccccaaccccaccagtggaatcaggaatttacatctgtgatgagaggcaggagttagggatgcagcttcaaaaggtgrtctttaggccaggcacggtggctcatgcctgtaatcccagcactttgggaggccgaggcaggaggatcacctgaagtcaggagtttgagaccagcctggccaacacagagaaaccctatctctactaaaaatacaaaattagctgggcatggtggcacgtgcctgtaatcccagctaattgggaggctgaggcaggagaatcacttaaaacccaggaggcagaggttgcagtgagccgagatcatgccattgcactccagcctgtgccacagagtgagactccgtctaaaaaaaawggtggtttttttggttctgattcaactttgtaatcttttaaaatgcaccccctccccagtgcctaccactcaataggctgaatggtctccaacagatatgtatctcctttgaagatgcaaagttcatggagagtgaatgtgtaatgcaactgcactgtttatgcgtctttggaggtgctgctattctacaaaacactttatcagttgcccttgttaaagtacattaaagaaataaggagtgactgctggcttaacttcttttagtttcataaatccagaattcacaagttcttggtgatggctgatttagtttgaatatgtgtccccatcaaatctgaagttgaattgtaatccccaatgttggaggtggagcctggtgggagatgtttgggtcatgggtgtggatccctcatggcttggtgctatcctcgtgatactgagtgaattcttgtgagatgtggttaatagtatgtggcacctgccccacccctgctcctgcttttgccatgtgacatgactcttcccccttctgccatgattgtagtttcctaggtctccctagaagtcaaggagttaagttaacttctagggaatacaccatgcttctttgtaaagccaattgaacctcttttctttgtaaattagtsttaggtatttctttatagcagtacaagaacagcctaatacagaaaattggtacagaagagtggggcattgttataaagataactgaaaatgtggaagtgactttggaagtagataacaggcagaggttggaagagtttgaaggcctcagaagaagacaggaagatgaggaaaagtttataacttcttagaggctggttaaatagttatggcctaactgttgacagtgatatgaacagtgaagttcaggctgccgaggtctcagatggaaaggaggaactcattgggaactgaagcaaaggttatgtgtgttatgccctagcaaagaacttggctgaattgtgtccatgccctagggatctgtggaagtttgaacgtcatagtgatgatttagggtatctggaagaagaaatgtctaagcagcaaagcattcaggatgtgacctggctgcttctaacaacctatactcagatatgggagcaaagatatgasttaaagctggaatatatacatttaaaagggaagcagggcataaaaatttggaaaatttgcagcctggctatatagcagagaaagaaaaagctttttcgagagaggaattcaagcaggctatggagcaaccacttgctagagatatttacataactaaaaagagccaagtgctataaccaagacaatggggaaaaggcctcaaaggcattttagagacctttgcagcagcacctcctcccatcacaggccgagaggcctaagaggaaaaaaatggcttcatgggccaggcctagggccccactgctctatgcagcctcaggacactgttacctgcatcccagctgctccagctccagtctctgctcaaaggcaccagatacagtttgggctactgcttcagagggtgcaagagtgcaagccataagccttgacagcttccatatggtgttaagcctgcaggcacacagagtgcaagactgaatgaggcttggcagcctccacctagatttcagaggatgtatggaaaagcctgcatgcctaggcaaaagcytgctgcagggacagagccctcacagagaacttctactagggctatgcagatggggaaatgtgaggttcaaggtctcgcacagagtccccactggggtactgcctagtggaactgtgggaaggcggycatcatcctccagacccaagaatggtggatccactggcagcttgcaccttgagcctggaaaagccacaggtactcaacaacccatgacagcagccaaagtcacagggacagagcttcccaaggccttgggatcccaccctttgtaccagtgttccctggatgtaggacatggagtcaaaggagatcactttggagctttaagatttaatgactgccctgctgggtttcaaacttgcatggggcctgtagcccctttcttttggccttttggaatgggaatgtttacccaatgcctatactcccattgtattttggaagtataaaatggaatttgtatatcttggaacttgattttgatttgacaggctcataggtgatgggacttgccttatctcagrtgagactttggactttggaattttgagttaatgctggaatgacttaagactttgggggttattgggaaggcataattatattttgcagtgtgagaaggacatgagatttgagggcccatagcagaatgatagagtttgaatatgtgtccccaccaaatctgatgttgaattgtaatccccagtgttaggggtggggcttgatgggaggtgtttgggtcatgggggcggatctctcatggcttggtgctgtcttcacgatagtgagtttgcacgagatctggttgtttaagggtatttggcaactcccccataccaccctgctcctgctttttccatgtgacttgcctgctcccccttcaccttctgcaataattgtaagtttcctgaggcctccttagaagcagaacggatgccagcactgtgctcctgtaaagcctgtagaaccatgagccaatcaaatctcttttctttataaattacctagtctctgttatttctctatagccatgcaagaatggtctaacacaatggctgtccctcttatttacattctgagcaaggtctgagtgactaagggtgggggtgtcaatgcatggggtctgcaaactctgtgaaatgtaaacagcactgaacaataagggattcaaagggacagaaccttcccaggctctgggctcttcagctctgcagatcccaatgggaagttaatccacaattgaggcagtgtgtttttctgcccctacagggatatggatggaaatgtagacattgaccttcctgaggtgagtcttctgatgttgctatggagtatgggattcaggtgatggttctggaaaccttccttctaatcacagcatcatgtaaaactctgcagttcagggatggttacatgcaatcaagtaagcatctatgattctaacctcctggagaccaagatgtgtgtgttctagtctgtgctcttctagtccacaaggacctggcatgggagtgaggtgggtgcttggtataaagttctgttcsatgtcatcttcctctgtgctactgtcaactgaaataacaaacacagagacactctctaaaagaaaagctatttatttagggataaagcactgcaatgggaaggtgcatgccatagtaaactatgcacctatttggggaggtaaaggaggacaaaggtttttaaagaaaaaatgagaaggattacataattgttttgaaataattatccttggctacaaagatcaataacaaaagtgaagccagtctgatgttggacaggcagttgctaggcagaggtagaagtatttttgtgtatggttgcgagggcctctgtgaaaggttgtgggttttgcagccttttgtgatatttttgttatcaggcaaataagcatgagaaccttctggccttcccgagctctatttgtcagggttttcttaacattagtgacttcattttgactcaataactttcacactaccaactccacctgagagaaggctgccgcttctgaagtgggtagacttttaattgtattttaagaaatctaatcaatgaaaagaaaaccagagaggcagggagatgttttttactgtggactcaggggaacayattacatctcccctatgttatgtggtgtggaaggggtgacatgggggtggctttaccctcgtccaagggctggaggactcgcaagaggccctgagatactatagctggaaatagtctgacacgtccagggacagcagagatctgcttttaggagggaatttgctgttccatgctggggcacagcttattaatggtgctaaaaaaccaaagaaaccaaaaatcacccaaaacatttactgagctctttctatataccaagcccagagcttagtggtagaaacagactcttgccttcaacgattttaccagctatcaaaacagatgatgaagtaagtcattccagtccagggtggtaagaagtaagccagaggaagggcaggaagcatgaaaatccaatggccaggacctaacttaggcacgggtcaaggtcctttggcctcctcgtctgtaaggcagaagggctccacaggtccagctaataaagtccttctagtctcaccttctaaaagagccttcatgagaaaatgttcctcacgctacaggacgcagcttgtgcacacygcctcaggagggtgacatggggctgggcacacaggstcctggcttctttcctgctatttttgtcatgtttcttttttgtggatcattttgtgcaagtttctttggctgttttttagcctccaaagccaactccacctgaccaggagacagaggaggagcagyggtttcgggctctgtttgaacaagtcgctggtgaggtaggacatgccccacttccatctccccaccagsctgagggcctggacctgcttcctagcaaagggttgcagtcgtggggttggtcagcaacgtcatcctgaggcatgatggagcttgttgcaaagtaagaccagcactgatcattcaaggcccaaagaccaccctgtttacaacatttacttacacagtctgcggctgtggatggggccagtgagcccaaagaagcttggaataggcccagacgctttgttttttagttctgttttgctttagacagagtctcactcttttaccctggctggagtgcagtggyataagcctagctcactgcagcctcaaactcatgggctcaagagatcctatcacctcagcttcctgagtagccgggactataggcacatgccatcatgcttagctaattaaaaaaataaataataaagagtcttgctatgttgcccaggctggtctcaaactcctaggctcaagcaatcctctggcctcagcctcccaaagtgctgggattacagtcatgagctaccacgcctggccccaggtgctttctttgggaggctagagcaagccttgaagaggtgactcctttgaactctgcctgaaaatcactgccattagaatactctgtttgctgtagtaaaggggatcatgttcaaggaggtccctattcaattgcaacttcctgtcccccaccctatcctagctctttccactgctcagcttcctttttagggacactggatggagcctcacacagatccaggctcttcctccacctgctggggtcaggggagggaagtctttctagaaactgccccagaggtgctctcttggagccataaatacaatgagctgatgaactaattcatgtcaaggtgctaatgactctattagcttcatgtgtttccccaaactggggttcctgaattatgaaaggggtcacctggaggggtgatatctaaacctaggggctgtctgatggtagtatattaggcactgcaataaacaggcaagrcagggagattaggggaccacaggatcggatggagaaaatgggggctcatgtgactgcttaaagcacagcaggaaggtggctgagcgcagccctgggcgggacagagcatggtgaggggggaaggcagtggtgacctccctgctccaggtgctatctggagcatgctgggtcagacccagcaagacaggctcagaggagttaaagaggttcatgcgggtgcgcagaagttgtcagatggagatccagagtttggaagggaagcggtgaatgttgcaggagtttcagtcgacctttattaacaaccaaaaagtacctctagagttcagccctccttgactcatgtcctgcttttcttccaagtagttggatgacttgggcacatggctccatttctctttcctcctctttcagtgggggcctggctggggcagtgctttcttaccaacaccaaacatcccaaacccccattccccaggcccagaggcttcaggacggacatgtgttagaagcactccacagcataacacacggctagcgcaaaaccctgactaaaatgaggtctatgtcagtgctactcaaacacacatgtgcataaagtcacctgggcatcctgggaaaaaaaacacagattcctcatcaataggtcaagagcatcctgggcaacatagggagagcccatctctgcaaaaataatcagcccagcatggtggtgcatgcctatagtcccagctacttgggaggctgaggtaggaggattgcttgagcatgggaaattgaggctgcagtcagctgtggtcacaccactaatactccaatctggatgacagagcaagaccctgtatcaaaaaaaaaaaaaaaaaaaaaaaaaaagcctgagtctcagggcaaggtctgagactctccatttctaaccagcttctggggtgggggctgctgagatttcctggagtgccttagatccatgattctgaaattcacccttattcttaattctaaatcaactcctaggtcttaaaaataggaccatattctcaggtcctctgatttcaagattccctggggtaagccccagatgcgggactattttaaagctctgcaggtggttctactgtacagaggaagactcagtctggttttcccaaactgcctccaacataggaatcatctgaggagcttaggacaattccaggagttggttctgaccctcagggaagctgggaaaccactgccttgccctgcccagcttttcatgcgctttcctgggttgggatgtctctcaagttaggctctctcctagttgggctggcatgyccctaaaacatgtgacatatgagacacatagctgcagctacacaggagataggtacatctgcccacagcagggtcctgaaggctggtctgtcactggagccaaatgaagctcagaactgatttaaaacaaaaataaactataaaagaaggtgccaagggctataamaaacaattgtctccacttcaacaggacatggaggtgacagcagaggaacttgagtatgttttaaatgctgtgctgcaaaagagtaagtgccaaccccatcrgggtcctggggcacctatggagggacaagcgaccacactgcctgggtcccctccctgctcctccgagccgcagatctgcttcccagggctgatttgtaggtagactttaaaaatagctttcattgtttgttttcctgattccaaaaacgatgcaggtttatagtagaaaattcttaaaaatgcagaaaagcctaatgacaaagatagtcacaaatgatctcaccaccataaataaccactcttaacatatgtgtatctgcatgtatgtacatgtgtgtcatatgcgtagacatataatgttagaatgtttcatcactccaacaagaaaccctttacccattaacagtgttaaccctgtacccatttcccccagccccaggcaaccactcatctaytttctctatagattctatttacatattctgaatattttatataaaaggaatcataggccgggtgyggtggctcacgcctgtaatcccagcactttgggaggccgagacaggcggatcacctaggtcaggagttcaagaccagcctggtcaacatggtgaaaccccatctctactaaaaataaacacacacacacacaatcagccaggtgtggttgtgggcacctgtaatcccagctgctcgggaagctgtggcaggagaattgcttaaacctgggaggtggagtttgcagtgaaccaagatcacaccgttgcactccaggctgggcaacagagcaatactccgtttcagggggaaaaaaaggaatcatacaatatgtggtcctttctgactggcttttctcacatggtgtgatgttttccaggtccatccatgctgtagcatgtatcaatgtctcattccttcttacagccagacaacattccatcgtatggatgggccctgttctgtttattcattcatctattggtggccacgtgggttgttaccggtttttggtcattatgaataatgcaactgtaaacactcctatacaagttttttgggtgggcatgtgtttttacttctcctgggtatatagttatgaggatggttccatcacaatgcaacagtctatggttacatggtggcataaccatcctcttaattatatgtttagttaagaggattgcttaactctatgtttaatgtttttaaaaactatccaactgttttctaaagtgactatttcacattttcaccagcagcagtatgggagtacaaatttctccaacaaatttaaatcctgccattaaatatgctgcaaaaacatgattcctaagggtcgtataatacttcattatatagacatagcctaaggtattgaccatgcctctctattggtcattatttcacttccaaatttttgccactataaataatatgatgacaaaaatcttcatatgtwattctttgctcggggttcttagaactagaataaatggatgaaggcgtattcccacttttattgcttttttcacatttagccaattttccttctgaaaggtcatgttaacttctactcctaccagcatcataagagagtagccacatcacagcccccaacagccctggatttagccacattattgggctttcagcagatgggtacataggtttatcttatcgggtcaactgaattcagctttcatgtgcaatttcagaaaaggacatcaaattcaagaagctaagcctgatctcctgtaaaaacatcatttccctgatggacgtatccttccaaatatttgagcagaaatagacatggatcctgggctttaagcacagtagagtaatcttcaatagtgcagactctccaagaacatgacatccttagccagcagaatagtcttcttcacagaaaataacccaaagctgggggacccccatgctgaaattggatcagaatcaagatgcacaagactgccyagtggtgggggtggggagcttttgaagggacttgggggtcttcttgccactttgggatcccatccaagggaacagagttctgtttttgtgaactttccrggaccacccccattccacttctgccgtttcccctcttcagagatttgtggtttaatcattaaaaccacttccccagggccccaaacctgtgcacccaggccagcccatcggccctccccctctgcagtcccagagctgaggtcccacgaggagcctcaggttgaaacactgctcatgtctcccttaacccacatggcacagaccagcggcaatgggaagctggagtttgatgaattcaaagtgttctgggacaagctgaagcagtggattgtatgtaacctggagcagggcttggcctctgggggacccagtgaacctagagcagaggggatttaaaatggtgcagcaggctgcaggctataggctagaggaattgtattyggacaggggagaagggaaaacagcatcatgctattccgatrcttacgggagtaccaccgtgcttccacccaagacgaaaaggaagacaaaagggagaccgacttcttttggaaggcccagtccaactgtggcctctgcggcccctagagggtagctcccccgggctggctgtcacccatttactgccaycagcgatgcctttcaggcacgctccttctcaaggcttctgctctccaccctttagaaccttttccttcggtttgatgctgacaagtccggcaccatrtctacctatgaactacggactgcactgaaagctgcaggtaaagaaaagactggagtacaggtggctgactgcatgccaggtactgcctgtgggcaacctgagcagatggcaggtcttctctctgctgcccaggaggtgggcctctgagcccagttggtgattcttaaggtcayggcccttggagtggtggcaccagggttcagacccaggactcacttcctgacaccagggccctcattttaaaccactgtgaacattggtagaaactttttaaatgtatctgctaaaaatgaacttggcctgccctctggaggcctcatagcctctgaccatgttttctggcccagtacttaacacatggctctttggtggcaagctgcagtgattccaaacttctcatttctgctctcagatggttgttatcgtggatgagacagagcatgcagcacccatggtttggggtccgcacgtccctctgccacctgtggccctgtcccgggttttatcagcatcagactctgaatccaaaatggatgactgcatcatagtttataccctgctcccttacccaaaggctgggctccaggtggcatttcccactcttgtccggtgctggatggctgtcggcatctctgtggtcccatgtcctgcacacacaaccgtagtttccacgagcgctctgcagacctcccgcctgccgggctgcctgcgcttctcaccaagcacacctcacagataggggcctcctgaaccttttaaagtggttccctcccagggaaagcaaaatctggaaacatgtccaggctcaggcctgataaaaggatgaagtatacacagccaggaccatctcgggtcctatgtgagggagaagaaaatcagatgatttataaatgagcaaagtgccaggctgagaaggggcgcctgattttcttaggggatgatgactctgtttccatggtaggaggaggaactgagcaggggacaaagggagcactcagagaggaggggcatggctgtgtctttcctaccctgacgtggtgtggggagaatcgcccctcatccccctcctctagccccaaacatcaggattctggccaaggctggcagccagcactgccgtgcaggctccagagactctgtgctctgtgtctgacctgcctgctcctctgctggaattaggaagaagcagaaagaccctgggtggatttctgaacaatcctgtgaacacctcctagaaagtgaacatgtagacaaaaatgaaagggggaaagaaatcacttctaagggcactaattagaaatcaaagcactggccaggtgtggtggctcacacctgtaatgctagcactttgggaggcctaggtgggtggatcatgaggtcaggagtttgagatcagcctggccaacatgatgaaaccccgcctctactaaaaatacaaaattaaccagttgtggtggcaggtgcctgtagtcccagctactcaggaggctgcagcagaagaatcacttgaaatcagaaggcagaagttgcactgagccgagattgcaccactgcactccagcctgggcaacaagagtgaaactccatctcaaaaaaaaaaatctaaatatcaaatccagaaggaagttcactttgtctaaactcctcatttgacaatgaggaaaccaaagcccagagaactgaacccatatgccacggctggagcagtgccagggctcagatccaagcctcctggctatagcctgtcattcttcccccatcgtggatgtgtaggaatgggccctggcagagtatcattctccgtgggcagcagcatcccctccaagaaactttctagggccacagctggaagtgacctgagacatagaacrcgaggggaggctggtgtaggaatgaacttggggctcagacaccacccagtgttaagttcccccaaacaaagcttcctgtaaagtcagcgagactctatgggtgatgttagcatcaaaattaagatcacaaactcgctaaactcagaagccattaaacacagaaagcacgcctgagagtcccccgcacactcgcccctgcaccacagattcacactctcacgctgcattcacaccaagggcagcagtcccactgggtctggggaccccmgctttgaggagtgaaacagtggcttcctcttctgagccctctcctcagctgcctgggagctccctcaaaggtgcagactcacctcggggctcggatacagcgagtcctgggtctcctcctttgtccccacaggctttcagctgagcagccacctcctgcagctgattgtgctcaggtatgcggatgaggagctccagctggacttcgatgacttcctcaactgcctggtccggctggagaatgcgagccgtaagtgtccagcgaggctgagggtgcacctcggggtggcatcttcagtcaccctccatgagcgcatgagaaacagcctggttaaagtaatggcaaagatagaccacagagagccatggtctgatgtgtgtggacccatgggcctgtgcggttagctaaggagcagaatgtgccagcctcccctgcagcaygtttcttagcatcgcctttctttatacattcacagtgcctctgtgggaggatgatgggctggggcaggtttgtgccttgtgtttgaggaaaggttcaattgcaggtcaaatcccatcatagcatatagaaacaggagagtctcagtcccccttcctccccccttccccgccctgtaagccctagacattgacccagttatctcaaataagatttgttacaccacaaatagagagggattatgtgcccgtgcgcttcagtgtttgcagtttattgtcatagccatcctgcccctcaaaggtggttttgaaggtgaggctgagtgaagcatgtccagggcctgtaactcagtactggagtggctatgaggacatgccctgtgtgcaggtgccaaaggacccgtgccctcaagggtgcctcgtgcttggtttaatgttctggcgtttccatcttgaaagtcttcacaacttaggagcagggggccccgcatttccattttgtcctgcttggtattttctaatctgtgttccataggccacttcgaggtatgaatacttgattaaaaaaaaaaaaaaggcagggggctgggcacagtggctcacgcctgtaatcccagcactttgggaggttgaggcagttggatcgtgaggtcaggagctcgagaccagctcatagcgaaactttgtctctackaaaaatacaaaaaattagtcaaatgtggtggtatgcacctgtaatcccagctactcgggaggctgaggcaggagaaccccttgaacctgggaggtggaggttgcagtgagctgagatttgccactgcactccagcctgggcaacagtgggagactccatctcaaaaatataaataaataaataaataaataaataaataaataaataaataataaaattaaattaaattaaaataaaaaggtgagggctgtgacccttggttatcagcatgatagctccctctgcttctttggtaatagaacactaattacttgcctgaagcacagcccctctagactctaagctccaggagagccgtaatttctggacaatcaatgagtatgtgttgattaaggaatgatgagagaaaatcagagacagaccagcaggccccaaagggtctagtatatcaagccaggaagccggctttccctaaggggttactggtagctagtgagaggtgcattctagaaagacccctcctgaaacagaatctgttattagacttacagggtggtcagagctgaccctagaaataatgagatttgctagtttctcttctctccattgctctttccctttctaaaccacccaggtgtaatccttcccagaacggggggtgggagtgcctcagcttttcttatagtagaggaatattagggtgaagaccctttaggcttaacaccatccactctggcatcctcacattagatttgcctggagaacttttagaattaccaaggatggagctttgctgcagtattattttaactttttattgtaagaatgtcaaccctccagttagatataaagaatcataataggttcccatgcactccacatcagcacttctcaaacttcgctgtacattacaatctccaggggtgcctaaagaaatgctgatgaccaggctgcacagttgaccaattctgttagaatctcaggggtggcacacagcattgggagttacgcaaattcgccaggtgtttccagacctttacacccaacctcaacaattaccatcttgctaacttttcccttgtgctcccgcaacacatacattttccccctaaataatttaatagcagatctcagaaactctgtccattcatctgagtatctccagctgatagacttgtttttagcatcatcttcataccatttgcacacctaacgaaattctcagcaaaccctcaacattctctagtgcccggttcatgcccaagtcttccaggccacctttttacagttgcttggttgactcaggatccacacaagacccagtcaccatgtttggttgttgggtctcttccatttcttgtgtccagtgatggtcccccaccccgctttgggttgtattattaaagctacccgagagattctcaagtgaagccagggctgattggctcgacctcgtcttctgaaggtgaggaggctgaggccccaagagggcagtgacttgctcaggtgcactcaggtcactacaccatgcggtagacccagcccccagctcagtgctggcacgctctcctgtgccactctgtcctctgacagcacccacggcaccttcctacaagggcgagactaacaactttcagattcatgcaaaactttacgtgcgtgtgctttttttctggggcctatggatttcaagggccctgtaccccccagaaggttaagataggggcgttgctttggctccaggagctgctggccggctgactggcttaggtgaccactggcttgctacaggactggatgcctccatccgttcagagaagttcaccttcagcccgcccttgatgagagtcccatcgccgcccttgatgaaagtccttgtttaccaccagatggagcagcttccccacaggctccactggaaggccctttggtcgctgggaaacaaacttggtaaaggaattgtctttaaaaggatgcctttcccccttctytcctatcaggggtgttccaggctctcagtacaaagaacaaggagttcattcatctcaatataaatgaggtatggccaatccagaccctctgctcagggacccagctggggcccagcagagtccacgctgcatagatgtttgccgaatgcttgatttcatgcaagggctgacatctagctgtgggagtgattataacaaaatagctaatatttttgagatactatttatcaagtaatcaattaagccattacaataattctgtgagctaagtaccaatagtatccccattttgcagggtggaaactgaggcatagagagattaatcaccttgacttgagtgagtgagcagactctgccttcttgtccttctcttccttctgtcatttgggtaacttagcctgcctgccttccagctgccagtttgctcactctcccttgctcatgttgtcccgtggttcccatgacactcccccagactccaataagtacaaaactggccagttaccggggccactgtagcaatgacgggggtgggagaccatgggtctgagtgtcagaggtatgggagaaggattccagggggtttcaatcaccctctccccagaggatcccagtggacccatctgctcacagggaggtccatgggccagcagcagcataggcatcacttaggagagagcgttggaaatgcagagtgccaggccctgccccagacctgctgaatggaagtcgtctttcacaggaccccactgattcctgtgcacatgaagcttgggaacgctcttgagacattctcctgcccaaaggcagaggggaaactgtggagcagtttccttcaatggttctgtaatttttatctcccttttccttctttccctccctgtatctttctttccaggtctgctttctcttctacctaacaactctgaagccaggcagcctgtggctcctccccagtctctggagtttctcctctccaccaatttccatactcacagtcacagccagctcatttccaaattcattagtaactttgggtttggataacatttaattgaatatttcaagatgaagaggttgatgacagtatgtgttttagaggattgtacctcctcccctcttttgtgctctgatttcgattaagcaggctgctcggtgcctcagtttaaccatttacagaaagagacataggccttaatattacacccaaagctttgctttataataatatcatataatttggcaattatgttgactcaccactaattttctcaagtgtgtatctcagatccctggacgcattattatttcattgagccaattacgtattattacggtgagccaaatggggatactattggtacttagctcacagaattattgtaatggcttaattgattacttcataaatagtakctcaaaaatattagctattttgttataatcactcccacagaaactaggcatttttcttctctagttttgtctttcaacttcagcatgtargacacatgtaataactatacctcctttgatcaatccaagattccaaagaaagatgtgcacacacaaattattcttttatgaaaataagaggaagctgggcatggtggtgtgcacctgcagtcccagctatttgggaggcctaggcgggaggattgcttgaggccaggggtttgagcatgcagtgagctatgatctcgccactgcactccagcctggaagagagtgatagcaagaccctgtctcttaaaaaagaaaggaatttgtaatcccagcactctgggaggctgaggcgggtgaatcacgaggtcaggagatcgagaccatcctggctaacacggtgaaaccccatctctactaaaaatacaaaaaattagcctggcatggtggcgggcgcctgtagtcccagctactcgggaggctgaggcaggagaatggcatgaacccgggaggtggagcttacagtgagccaagattgtgccactgcactccagcctgggcgacagagtgagactccatcaaaagaaagaaggaaagaaggaaaagaaagaaaagaaagaaaaatragaaagaaagaaraaagaaagaaagaaagaaagaaagaaagaaagaaagaaagaaagaaagaaagaaagaaagwaagaaagaaaggaaaaacaagagagacccctaggtccacctttatttatcatttactttaaggtaaatgataagtaatgtcactaaaaaacatgaggaagtgtgatggctgcccctggtccatggtggaaggagacagtgggaaggtttgttactcagcggccccctggctagtcaaaggctccagagcaccagcagtgtggaggaagtattccagtgctgcagcttcaaggtagaagtgtggacacctctaacgcaagtgtccacaggtgtaggggctggaataggctcctgccctgccccatatcatcaccctgcagtacaacagtgaaaaccattgcattctctccctctaaacctaccatctttacatctggctgcatgttagcatcacctggggagatttaaaaatcctgataccccagccactccctagatcaattaaatctgaatctctggaggtgaggcccaagcattgtttttctttaatccccttggtgagtccagtgtgcagccaggtctgaagtatccatgttttaaagtccctctccttttcccctgacccatcctaggaagcaacaggagattttcctggctgagttggcctcacctgcaatcactttcctaaaaaggcctgtgcacctttcattacagtagctctcatactatatacactgtgcccaggarggaggacagagaagggagaaaaaaaccatctcatataatcacgttgccccaagtcaccatgctgtaataaacaagctgttgggaaggaggaggcagggtggactcgggagagaaaatgaggaggaattccatgctacttctccttcagctcacttgtaacaccccccagctatggaacctgcttccacttcctgcagcccctccagggtggagggccacctctctcccaaaggtgagaggacccctcatcaacaaggaaaagtcacttaatactgccctgcccaagatgcttcagcgaggctgtcctcttaacagggagaaagcacattttcccgtctctgtcttaccaactgtgcttgatatgagctcacttggaaaggactcaggtcctccagaaaatgtcaagtgctgagaattcatttattttctttaaatggtttcctgctgagacagacatccaagttggcaggcaaaatgatcaaatagcagatctcctgtgatatcagcaaactggggccactcctgaggctgaggctggaagggacatggaaggacaacgacccctcatctctctctctctcttcccagttcatccatttgacaatgaacatctgaggctgccttgtagagatgcagcctgcccagctgaatcttggcttctggaccttgaccttcagaacttctcttggtgtggaaccattacgcccagggttcactcccctctcatcgtccggccttctcccttcatcttgatctgggaagaatgaaatgaactcagctacactctctgattttgtgctactcctttgtaaagtcactgccttaagggggctgatggcgccacctgtgccttacatccaggttcaggcatcactagctttcccacactctactttccttatttccttccattaagaattactcagagttctaacgcacagaatcctgacttccatgtagctccagtcattgtgatcagacatcctttataaaacatgtttttataaatgtgtatgtggaataagatgaggaggaaaaggagtgaggtcataatttagcatttctgcatcataagtgtgcttccttatcagggaagacatcaggtagttccgataattggacaagagtggatctccgataagagtggatcaaggtgacaatctctacctcctcctacgagaggtggtaactaaaacagtcactatccagtccagacattctttgtgtctgaagactttgggtcagaaaagctgaatgatattatttcttctcaaggagtccagattctggtgaggtttgatcttactcatccccaacatgatgggggataacagacccgagaatcctcattatagctcactagtgctgaacaggagtatccactgaactagaataatgggaggtaacatgagaagatactggctcaatacatgccaagccccacattcttactggtacacttgtggcagatgaggtggaggatgggagcgggagataccgagagggaaagagggagaatggctgggatgaagatcaagttagaagtggaggctgagcatggtggcttacacctgtaatcccagcactttgtgaggccaaggtgggaggatcacctgaggtcaggagttcaagaccagcctggccaacatggcaaaacccaatctctactaaaaatacaaaaattagctgggcgtggtggcgggtgcctgtaatcccagctactcaggatgccgaggcaggagaatcacttgaacccaggaggcagaggttgcagcctggcgacaagagcgagactcagtctcaaaaaaaaaagaagtggagcttcatcagaaccctgtccctgatcgtggccaaggtaccatgatcttctcctttaccttccagcccttccctgggttcacgcagcagtggatgcaggacaagagccctctctcaggagcaggcttaggaccaaggctctgtgctggggcacgccagtacaaccccagacatgccatctcctgtgctcggcctgtgcccactctcatcgatgcacactgctgccatattgtttgttagatgtcgtgaacactagccctgctcacaggtaaaacttggaaggggactcaccatatgagcttctttgtctagtgtcactcccacagggtgcctttaggcctttatgtccaggagcacataactgtctctcactgatttttcctctgcttgaaaggtacccaggaaatgaagtttatgaactgggcgtcctgttttctttccatccatatgtccctgggaaagttattaaactctctgagacttagtttcctccactcacaaggatggtaatttctgcctcactgagatcttatgatgaataaatgaaattgtaagtagaaggtgccaggcacagtacttgacacataacaggccctcagtgcaactaaggcccactgttgtgaaccagtgttttcttaaatgtctaaaagagttacatactatcacatgctttcggtttacctctgttcttcattgcaagaatccaagaattatagaaccagtcttgaaggagagttcaatagagctctacagactattatatgatcatgagttgagaacaaaaaaaagtgtatgaatttagcttctatttgtttctgaattacatggtctgatactgacacccagaaacaaaggaagatgtttcacatgcatgagtttgattaactataattaaagtgattttgtagcttataattcaaaccaacagcttttgagtgtgaaaggaataatattagttattacaccaggacaatagatgtaaactggagctgtcctaggaaaattgcgatttatggccattcacattatgtctatcaccacctgcataatatatgctttaggtcttggcaccaaaatattcgtgccctactacctttaaattaaacagtggctgggcatggtggctcgcgcctgtaatcccagcactttcagaggtcaaggcgagcagatcacgaggtcaggagttcgtgaccagcctggtcaatgtggtgaaaccccatctctgctaaaaatacaaaaatcagctgggtgtagtggtgcgtgcctgtagtcccagctactcaggaggctgaggcagaagaatcgcttgaacccaggaggtggaggttgcagtgagccaagatcgtgccactgctctccagcctgagggacagagcaagactccatctcaaaaaaataaaaaatacaaaaaaaaaaagagagagagaaaacaaaataactgggtgtggtggtgcatgcctgtaatcacagctactagggaggctgaagcaggataattgcttgaacccaggaggcggaggttgcagtgagccgagatcgtgccactgcactccagcctgggtgacagaacgagactttctcaaaaataaaaataaaaattaattaattaaacaatagtatacacgagctatctaacgctactgcttcacaccaaaatcacatgaaatacaaagagatacacacctagacacatcaaagtcaaactgttgggaaaaaaagagaaaatctgaaaagcagcttgagaaaaatgactcatcatgaacagggaacaatgcaattagcaactgacttctcatcagaaatgacagacgacagaaggcagtagaatgacattccaagtgccaaaggaaaaatctttcaatcaagaattctgtttttccactagaactgcaaaaatgaaagcacaataaagatattcccagttaaacaaagactgagagaattcattattagctgacctgccactggaaaaatattaaaggatgtatttcagggtgaaaggaaataaaactagatgagactgtggatctgtagaaagaaatgaagagcactcaaaaggatatctgtgggtaaatgtaaaagactatataaacgtgttatcttccattctaattttgtttgaagacattagattatataaagcattaattattgtactatgttgttggatttataacaatagagagatatattataaaggagagaggaagaaacaaagtattgtagcaatatttctatattttcttagaattaagtcagtattacctcaggtaatgatattagatattagatggttataaattaagatgcagattgtaatctacagagcaaccactaagaaaataactcaaaaatacagtaagatagcagaggaatcaaagcagaatacttaaaaaaaatgtttagcacaaaagccgtaagggaagaacagattttaaaaataagacatagaaacaaaatggcataccttaatccagccatgctgataataatattaaatatgaataaaaactacaatcaaaaggcagtgattgtcaaaatggataaaaaagcaagattcaattgtacactatctacaagagatacttcatacaaaaagacaaaagttggaagtaaaaggatgaaaaagagagtaccatgcaaatactggcaataagagagcttgagtgcctacatcaatatctgagaaaataaaatttaagacaagaaatattattagagagaagaaatgatattacagtatcataaagggtcaatacattaggaatatataataattacaagtgtgatggtacctaatagtagagtctcaaaattatgaagcaaaaattgatataattgaaagaagaaacagattattcagacttaacaattatagttagagagttcaataacccatttttaataactgataggacaactattcagaaaattaacaaggaaatagaagacatgaacaacactatcaaccaacttgactaactgacatttatagaatactttaccctcaagtaatgaatacacattttttcaaaagcacatggaactttctccaggttagaccatatactagaccataaaactaatttttaatatatttaaaagaatttaaatcactcagagtatgttctccagccacaaaggaattaaattagaaacaaaaataagtttgggaaatcctcaaattttagaaattaacacatttctaaataactatgagttgaagagaaaaattacaatggaaattagaaagattttgaactgaatgaaacaaaaataaactatgtatttacacatgtctatacacatccacattaaccggattaagctaaagcaggacctagaaaagtagagtgttctcaaaacaataatttaagcttccatcttaagaaattagagagagaggcaaattaaaccttaaaaggaaagaaataaagactaaagcagaaatcaattgactagcaaagagaaaaataatagagaacatcaaagaaacaaaaaggtgattcttaaaaaagattgcaaaattgataaacttttagctaaactgaccaagaaaaaagacagaaaacacaaattaacaatcaagaatctaagagcagccgtcattgctgacccatcagaaattaaaagaatgataagtgaatattttaaacaactttatgtcaacaaatcagacaacttagatggaatggaaaaaatcctagaaaaagataaattaccaaaactaccttcagagaatactgaaaatctgaatagacctatgcattagtccactgtcacagtctaataaagacatgcctgagactgggtaattgataaaggaaagagatttagttgacttacagttcagtatggctggggaggcctcaggaaacatataatcatggcggaaggtgaaggggaagcaagataccctcttcacaaagcggcaggaaggagaagtgccagcaggggaaatacaagacacttataaaaccatcagatctcatgagactcactcattttcatgacaacagcatgggggagactgcccccaagattcaattaacctccacttggtcctgcccttgacatatgaggagtataaggattaaattcaaagtgagatttgggtggggacacagagccaaaccatatcaacctacaacatgaaacatatcataccatatcaacctataatattttggtcctgagaccaaatcctttggacagtgcctggagagagcctcaggccacagtcatgtttatctgaaatacagggcctacctccaggctcctctccaccctgtcctgtgcagagctacgcagtgcgctgaggggccagggcttcagaaagcccagagcatgtgacctggttggcagaggtaccagggtcattggtgccagcccaattcagtgtactggatcattagtagaaacaaagcaccattctactgagagccaagaccgcctgccaagtaccagtgcgaaggctgcctcgtcaccacagctgtgaatcaagagtaggctgtgcttgctactgatgccagcctggggcattttcccagccccacagtgcctttctgaagtgggagaaggagaagcagagggttagactctccttggtgcctgaacagtgcctctgatggaagaacgtagctcagtgatattcccaaggaggtttattggttcattatcagtaggactctccaaggaaagggaacagctgaaccatatggagcaactgcaggctcatgtaatagaagcagcattgaacttagagtttgagtcctgtattctagtctagaacttacctccagctagctgtgtggacttaaccatatcactttacctctctgggctgccttgcaccttgaaattatgtgattccttctctcactctgggaactagaaggccaggtcagtgtggctcagtcctggtctaattggatggatggagagaaggtagcagaggtgggcccagcaagcctgagaattcatcttactccctgacagagctcagagttctgagaagaatgtggtcacgcagaagactctctgtaggccacatcaggaccaggcttcttggaaagctgtactcctcctgcctttcaacatcttaacacactcagctcctccattatacacacttacctgaacccagcttgtctgtatgggtttagcattctctcttgtccttcccagtctaccctctacattctaaaaagagagtctcccacccagacgatctccttgcagtcacttttcaatgcaccagaacagcttccttagttggaacagtgaacagtgtgttttcaaacaaaagggg

SEQ ID NO: 5711 - DNA, 48203 bp, Homo sapiens
ggatctccatatggaaaagagtgaagttggacccctacctcacaccatatacaaaaataacttaaaatgtatcacactaatatacaagaatttacttaaaactccaatagaaaaagtaaaactataaaactattaaaagaaaacataacagaaaatcttcatggcattggatttgggaattaggtatgatgccaaaagcataggtaataaaagaaaaaacagataaactggactctataaaaatttaaaagtgaatcaaagaacaatatcaaaaagtgaagaaaacccacaaaatgggagaaattatttgcaaatcatacacccaataagggtttaatattcagaatatataaagatctcccacaattcaacagaaaaaaaaactcaattaaaaaatgggcaaaggacttaatagacagttcccaaagaagacatataatggccaataagcacattaaaagatgctcaacatcattagtcattaaagaaatacaaaataaaaccacagtaagataccacttcccaccacctactaggatagctataatttttaaaaaaggaaattaagttttggtgagcatatggagaactggaacacttgtacactgctcccatggaaaaacagttttagcagttccttaaaaagctaaactaaaagcttaccatgtgatctagtaagtccacacgtaggtatattcccaaaagaattgaaaataggaactcaaacagattcttgtacaccaatgttaataacagcattattcacaatagccaaaaggtggaaacaacctaagtgtccatcaacatatgaataaataaatatggcatatatataatataaacaaatggaatattattcagccataaaaagaaatcgagttctgatacatgccacaacatgggtgaaccttgaaaacattatcctcacaaaagactctgaatagccaaagcaatgttgagctaaaagaacaaagctaggggcatcacactacctgacttcaaaatatactaaactctagtaattaaaacagcacggtactggcataaagagacacacagataatagaacagaacagagacccaagaaataaaaccacatatttatagccaactgatttttgacaaaagagccaagaacccacaatggggaaaggtcaggctcttcaataaacggtgttgggaaaactgataaccatatgcaaaagaatgaaagtagtcaattatctctcaccacatacagcatcaactcaaaatggactaaagacttaaatgtaagaccccaaaccatgaaaccacttgaagaaaacacaggaaaaaagctccctaacattggtcagggctagaggttcccaaccccagggccacagattagtaccagtccatggcctgttaggaaccaggccacaaagcagtaggtgagcagcaggcaagcaagcgaagcttcatttttctttacagctgctccccattcctcacgttaccacctgagctccacctcctgacacatcaacggtggcattagattctcatagcagcgcaaaacctactgtgaattgcgcatgcaagggatctaggttgtatgctccttagaagaacctaatgccttatgaactgtcactgtctcccatcactcccagataggaccctcaagtttcaggaaaacaagctcagggctcccagtgattctacattatggtgaattgtataattatttcactatatattacaatgtaataataatagaaacaaagtgcacaataaatgtaatgcgcttgaaatatcctgaaaccatcccctccctcctgtggatggaaaaattgtcttcgatgaaaccagtccttggtaccaaaaaggttggggactgctgatctgggcaatgattttttggatatgacttcaaaagcaaaggtaacaaaagcaaaaatagacaaagggattacatcaaaataaaatgcttctctgcacagcaaattcaacagactgaagacagaatctacagaatcggataaaatatttgcaaactatacatctaataagaggttaatttccaaaatgtttaaggatgtcaaacaactcaatagcaaaaaaataaaaaaattaaaaaaccatatttaaaaaatgagcaaaagacctgaatagacatttctcaaaaggagatatacaaataaccaacaagtatatgaaacattgctcatcaataaccatcagggaaatgtaaatcaaaatcacaatgagatatcacctcacacctgttagaatggctattaccaaaaagacaaaagataagtgttggcgaggatgtggagaaaagggaactccttcctcgctgttggtgggaatgtaaattattactaacattatggaaataactcaaaatattaaatgtagaactacaagcgggtccagcaaatccactacagggtatatattcaagggaaatgaaatcagtatgtcaaagagctatctgcacttccatgtttcctgcagcactattcaacaatagccagaatatggaatcaagctaactgtccatcaacagatgagtggataaagaaaatgtgatatacatatacaatggaatagtattaagccataataaagaatgaaatcctgtcatttgcagcaacatgaatggaactggaagacattctgttaagtgaaataaaccaggcagggaaagacaaatatcgcatgttctcacttatatgtgggagctaaaaaatttgatgtcattgaggtagtaagtagaatggtgattaccagaggctgggatggatgggtggtgggaatgaagagaggctgttaatgagtacaaaaatacagttagatagaaggaatatcatagggtttgagagctatatagagacaaaaaaataggtaagtgattgctaggaaagcgggtgggattgagtactaatggttatggagattctcttttgggtaatgaaaaagtcctaaaggtaattgtgataaaggttgtacaactctgaagacaaactaaaaaccattgtattgcacactttaaatgagtgaatcatatgatatattaattatatctcaataaagctgtttaaaaaagaattctgagtggaattggccagatacaaaaaagactaagatggcaaattttatgatatcttactccaattttttagaaacataattcagatcacgtttccctaacaactctccaacagcttcccatctccctcagaatgaaagccccaattttcaatatagcccataaagtcctacacattctggcccctttccctttctggcctgacctctgacctcctctccgctctgctccagctcactaggcctcttaagttgctctctgaacataaagaggcaggttcccccagggcctttgtactttcttctcctccagagaacgtcaaggtaagttctctcacttccttgagctctggactcaaaaattcccttctcagcgaggacgtccctgaccacttattgtaaaactgcagctccctacagccccccacccacaacacacacacacactcttcatccccctttcctttttaatctctattttcaccttctgtcatcctataattttactttttgcctgtctctttccactaaaatgtaagctccaaaaggagagagatgtttgtctgttttgttcattgttggtatctctagtgcctagagcagtccttaataaacatttgttggattaataaagggagaccactgtgggggaaaaaaaataaaagaaaataaaattttagctgaagaatgcaagcccctttaaattatcaggcccagagaggcattagaatgaaaaaacagtcccgtctcactcccggtctgagctggataattatctcttaaagcccacctgctatatgggctctagactggaaccaagaagccataaaatgccatatgctggacacgataactcataccctatgagttacagtgtacagccaatcactaagcaatggtatctctgtaaaccaataacaattcctgaccaactttgtctcagcccactcttccccttcgcctttaaaaacctgcttgtaaccaaggctgaaggagcactccccaaggcaactgggaaatgagtcctgggcagctgtcctcattttggctgaagtaaacactttaaattataattttgtgccccagcctcttccttttaggtagacaccactattcaatgacatcaagatctgaactgtcctacttatcccaatatcccacccctaaaaagaaatgtaccgaaccataaaaagcctgaagtactccgacttacagactcctgtattagcatcctaagaattatattaccctcttcaatagggagtagtatttttcatatcaaacctagcctgagaacaactgagattcaactaggaaaaaaagaaaagaaaatccattaaagactgagtgatttgaactcaaaaatatccatcatcacttgctaaatcatagacagcaggttatttccctcgactttgctgtgcagacctgtagtggctcaatttctgccataataaaggccgtactagaaagagcaatcctaactaagcgcgcaaggtaaacatcaagctggggccgtcaggggcggggaaacactttctgaatggcggaagctccgagagacgcctttcccagctgctccagaggggaaaggaaaagggagaaagtctgtttttccagaatctcccaaacacagcccaggggcctgctccgcgggcctaagcgcctccacgtgtctcagaagcctagcactatagataccccggggcacggagctgggaaaacgggaataggaagacactttaccccgagaagatccagtccaacaggtcttcttcagccggatgactgtggagcgccaccacaagcagggcctgcaacccaggcatccaggctagacaccaaatcagcaaactttattcccgcgctgccgagtacaagccggcgcctccccggcgcacacagtacacatcagctccgggagacctacccgacccgcccctccagcgccgtccccgcccccgttcctgccccacccctttccccgcccccggcccggctcgcctttctcgcggcgctgcaaccctcccaccacagcccatccagccccgcccagcgcgccgcggtgcgcatgcgtggaggccctcgctgccgctgagcacctcgggaagtgtagtctcttcgcaggtgcggctgggcagctagagtcctgcatcccggtggaatccggagaagtgagaacattcccgccgcccggtcctcattcccatcttcccacctgtccagtcccctcgcactcccgctgcaccccacgcgccgggcttcagtcagagagtgcactgaggaagagcggagaccccctcttcccctcagcaggctgtgccgggggaggcggggtccaccgcccgccccccgccgtcgctctccccgcctccccttccctcccctcctggcgggtgcggggccggtgtccgaagtcaggcggcggcccccgcagcggccgcaggaggggcggctgcggtgggcgccgcgggcgatgcccctgcccggctgctccggcggggggcagtgcgagcggcggcggcgggggaggaggcggggggcggcggctgcggcggctgcagcagaggggccgagagctggcggtggcggcggcggtggtcgtgaagggcatcggcggcggcggtgatggcagagatgatgtgagtgcccgccggctggagacctggggccgcggagcgcgggacgggcggcggcggcgtgcgggagcggccccgggggcggcggagggatgcggggagcgcgggcagagccggagcggcggccgccaaccggccggcagtggctggagccccgcgctgcggcgccgggggagccgggcccggcgtgggggtcgcgggcggcggcggggcggtcaggccgaggggcgtctgcgattgttctcaacacccctcccccaccccatcccgtgtgtctgtttgttacttgcagctgaagatggaaagagccaggcgaaggggaggcggcggcggccgcggccgcggaggcaagaatgtagggggctctggcctaagcaagagtagactctatccccaggcccagcactcccactacccccactacgcggcctcagccacccctaatcaggccgggggcgcagccgaaatccaggagctggcctccaaacgagtggacatccagaaaaagaggttttacctrgacgtgaagcaaagctcccggggccgcttcctaaagatagccgaagtctggatagggagaggccggcaggacaacatcagaaagagtaaactgaccctctccctgtctgtggcagcggagctgaaggactgtctaggggacttcatcgagcactatgcccacctgggcctgaaaggccaccggcaagagcatggccacagcaaagagcaaggctccagaaggaggcagaagcactcggcaccctccccaccagtctcggtggggtccgaagagcatcctcacagtgtcctgaaaacagactatatcgagagggacaataggaaatattacctagacctaaaggaaaatcagcggggtcgcttcctacggattagacaaaccatgatgcgggggactggcatgataggttattttggccacagtttgggccaagaacagactattgtcctcccagcacaaggaatgattgagtttcgtgatgccttggttcagctgattgaagactatggcgaaggagacatagaagaacgaagaggtggagacgatgacccgcttgaactcccagaggggacttctttcagagtggacaataaaaggttctactttgatgtgggctctaataaatatggaattttcctgaaggtaagtgaggtgagaccaccttaccgtaatactattactgttccattcaaagcttggacaaggtttggggagaattttatcaagtatgaagaagagatgaggaaaatttgcaacagccataaagaaaagagaatggatggcagaaaggccagtggtgaagaacaagaatgcctcgactagagtgaaattgaactccatcaggcaaaatttaaaatcacaaattggctaaaagtactgatccattatcctttgaagaagtttttcctcttttttggcccgttgttattagtaatacctctagtagttgatacttcaggaagtctgattctcatgttatgttacacatagatcactataattcttacgggaattccaaccttcccagagctaaatagtttagctgcttcaactgctccagactattgaagtatgcaaatcagcacaaaatgtgacattctgacattctaaataccataactaagatttacattgcactatgacataatcccgaaaaaagatacatatacttaaatagaagtgtgactttcccccaaaagtatttcaattctacttcattaaaagctgctaagcttacctgtagggcagttaccacagaaacagaaattgacctccggtatatataaatatttacttataaaagtacaagtagacgtatattgtccgttgaataactgaatataccatcaaaggatcaaatcttattacctaattaaaccttaaaaatataatgtcataatatttcttaagaatactatagtattctataatttcaaactttgtggtaaccctacattttatagttgccatatcaaagccatgggagagttttaattcgttattctaagtttagttacaatcccttctttacctctacttaatgttccatatatttttattgactttccaaagtttcaggaattacttttatgtcacattgagtgggaggcttcatccaatggctttgctatggaaatcttggtggtgtagcttttcatgctaatttaaagattgcaagaggtttcttccccaaaatatatcatggactcaaggtgttatactttatgcttcttctttaacactctttcagaagggttggtgtaccaattaactgatataaaaatatacctgtaataatatattttagtagcacttttgcaattgctacccttaaaaccatgtcaacacttccaatataatcctgwattttacaggtgttttaattctggagggggtggggattttttttttctaaaaataatttagaatacaaatttccagtctgagaaaaatattatttgaagattggttataaatatatttgaaaggaaaattcaggcattttccaaggtgctctttctgactttacacaagactcacccatttacctgtattaaaaattactttccaggaagtgccacagcaatttttcaacacctaagcaattttttaaayaagtggatatagtgttatatgtgtaccaacccatcctgtattaattgactgaaattacatctattcagctatattttcttctgaatgaaattattgtcttttatcttggctttattcacctcccacacaataagtccatctaatcatatttaagagccagaacactgatttyaacccccaaatatcactctcattgatgagagctggctgcatggattcaaatcagaatgtagctcttcttttatatgctaaaagtaatttaaaattatatcagcgatttttttcttccagagttttgtcccccaatacctttacgtgaggtcactaagaaaacttgatggtatgaattaaaaaaattaatttcattggtttatgttacttaagaacaagcaatcagtaaccccgacatatatactagtgttggtttgcagattgtatttcacatttcctctagtagcgtgaaggaatctcattagttcattataattgtggaccatctggatcactatggaacaactgaaggttaggagataatgttagtactagagctaatagcacatggtgggtgttgagactctaaaagtagcaaggatttttaaacagtcctaactgtaaaataactatgtaggcttgctaaaaaagtagtttttggtctatgaaggaatgatgtgcacttgaattactgtactactgattgttattgctgcccatcatagtgcctattaataataatcaacctgtcagattttggcaaactggagctgtgaatattctagtatttgattgttcctatcgctattgctatgagtgtatacactctcttaaagtcttcctttctaaaatatttatatccattaggtctaaatgatttccttttaccttttgggtctgataagatttgggtatgtgtctatatctatatatatacacacagacatatgtatatacatgtatacatatatatgtgtgtatacatacatacaataccatgtcagacttaaagataaatatctttaactcattgtatataaacattattaaatttagttttccattaattatttaagtaaagaattagttaagcagccagattttctactttgtatgtatacttcaaagtttttaccatctcaaagctgcagattaaatagatgcatatatactggcaattgagtatactctaaaattattaagccttctgccagtccttttgtttcatttttttcatagttaatcattcaaaaatgagatgatgctatgactttttgatacttaaaattcccaagaattcattagccgtaattaaatatgatccagttcaaaactctggtcttaggacatgtattgccatgtatcttataaaataagctactattcttatctgtgcaatatgcattttatttattgtcatttgtaacatacatggagctgcaagtgttcatggtatccttcaaaataacagaatccctgccttgaagacattaaactcttaaggcaactggaagttagaagttaaaaaatgagcatgaaagttagtaaccaaaagtactagttcactgtataattctaaaacactgatgatgtttgcacctaataatccaagcataatgtggtacaggctcaaactgtagtaatataagctaatagtatgaaatttggaaacgggttcctcttgatagttggcagtgtgctcctagcaatcgaaagcagcactaatctgttgctttatgcaaaagatgcaatgtattataaagatattaaagttcctctacattttataattttccttgttaaagccccagactgccatgtccctgaaacttgagtcaaacacaagcttatttgcactaaagagcatggccaaaaaaataaatgacagggtggaaaagctagttggaacctcttgaaataattggttctaatatgagaatttcacatttgtctatttgaaagctgtatggtccaggcagacaatctgtcagttcactaatttaataatgcactttaccttttgtatatagaagatgtacatttatgccacttgacaggtgggatgtgtttcaataactatgtagctagaatctataaggtgatcccgtgcatgcatatgtttgtgttggaactgttgttgtaacaggtttccattaaatcagtgtaatggagaagggtagaagatgcttttgaaacaaatcccagtatatttaacaaagaattttaaagtagagttcacatttgatgtcttaagaactagaataaataaaatactatttctaacccaaattcttattacagttgagactatatttagttgagattccccacagtgccctgacagttaatttggggaatttgtctagacaaaatttttttcaatcattgtttcattgttgatatgtgtttaagtaatgaataaatatgcagtacataatattatactcaaattaaaagtgtggttagctgatgtggcattatttaaagaacattcagactaaagaagtaaggtttcaagttaaggaaatgcaaggaacctatgaacagtcactaacacaaatatgatatctcagaattcacagaagtactaaccttccccaactaaaaagggtattgggggatttagtgkatccttccatcttaaaagcttcttaagatgtacatttgaaaactagataactgttgcttaataatactttactgagaaacactgtgtactaacaattcatcaagagtgtgctatatttactgagttcattttatatctatagataagaataaattatatagtcatcctaccttaatataatcatgtatttatattgtaattttgcaaatattttccataaaataaacatttatctgagctgcacaatttgaagaggatgaaactggaatataccctcagatgctcattttaaataagcagctaccattgaaagctgatgtatgtattatcattcctttaaatttgggtttatggtatattttaatatttaaatgaataggacttaatttgaattttaagtggttttctgaaaataattttttcataagtgtgagctttttttccttcttatctccaaatgtttttcattggaatatttatgaaatcctattcaaagcttkatgtaaggggtttgcttagtcaccacttagtttgaagtctgtctttactaaaacaccaaacatctttgacaacatacaaagaggagttaacattgattctatgcctacagaataatacaggtgtaatatttatcacggcctgaaaaggatcttaaatccttctgaaatttccttaaatatttcttgaatttcaaagagaaatggtggctaatggctagcccatcagagaaaaagaataagtatgttaacatgctgttgaaacaactcatagtccaccatactgtagcaatgaagttcagggaaaatgtgtttttcccaacttaatatcatgtgaaaattgggttttcagatcacagtaactctgtcgtaaagaaaatatacccaaatttagtaggtagagcttagaaaaataatataagtatatattttcatgtataatggaaaaaatccgtacttgttattaatttgacatgctattttaaatcatttaaatttattttggtaatgagattttaatcaatatttttgaatagggaaaaacatacatatagtacaaaatggaaacagtacagatgggtagagggtgaaaagtagcaaccaatgttagcaatttcttgtgtatccttctagagttactctgcatatacaagtatatgtgtatgtatrtatatatatatatatatatatattctttttaaaacatacagatgaaaacatattatatatactatcttgtacctagtagattcaatttcagatctgtcattttaagtgacttttttttaacttagatatcatacttgagctagttaacatatcacttaatttgaaatatattaactataccaaggaaatatcaaggaaattttgaatgaatcccattggtatttacttaaagtgcaaatatatgtgtattttaaatatacaaatattcagttcatcctactagtttcctttctctcttcctagccatcttgccttcctgtattcccctcacaaatatattggtctttttcctgaagtagtgcacttcaggagtgccaggatattaaataatttaaccaagtgttatcttaaaccgtattccctaatgaaaaacacccatatttaaaagctttaataaagtatcacgttcagtcaatttttactaattctgttactattatctttatccaaagaccttgcccttataagagcaaatgagtattagaactatagtaaaaaggtatatttctgttgaaatactttattagcatgaagcctttatctttatgagaaaggtataatgttcatttagcaacctcatcaaatccaagtttaagcaaataggtaactctagacccgattgtttaaagcattgatttttcactgaaggaccaagagtctgtcagtagtcttgggaccaaaggcagtgggatgatttggggaatgagtaaaaactggagtgctgtgaggttacaagtacagctaaactgtctctctggtggaagaatataaaatggtcaatataattttttaatgaagttagcattattactagtcctataaacataaacaaagctgccttaatagttttgtgagcacccgtccccaaaaatcataattctcttttcattcccatcaagagtgcattttgatatgacttttctattgaccaccaagaaaaaattatctgaaaaatgaaagatcccatacttgagtcctgaaagatgctatctaaytatgaattaaagcaaccagagtaaaagatccaatacaattgtaaatatctttaaaaatgtgggttgaggaagaagaattttttcatggattggtatccgtgaattttatgaacatgtcataaggtttaaaaatttaaagcattgctttaaactttagaataataactctatatttggtagcataatgtcctgtttacaaaatgaaagaggtgttgttaaaagataagatcctcttaaacatattttaaaagcataaaagtttgctccctttattttcatgctgaataattcattataaaattcattaaaaattcatctttaggaatgaattttgcttaaatttaggctaaagcatattaataatttcccatccttaattgaagagcttcccatgttggtgctttctggtaaattatatttttcaaactttatgttcttttgaatatttcttatgaaaaattacatatttttattgaggccagtgacatccaccagtaaataaaaacataatgaattagtgctgctatagtgaagttactttgtgatatgaatatgaagaaaaaaactcatttaaatggaatatatactttcctgtttaatattgtttacttatttctgattaagtagcagttctctgtcttcacattttaccctcttaaacttaatttttgcaaaaaatttttctattcggttttcattttcctagggaaagggaaaaattgtccctratgaaaagtgtttatagtatttaaaagagttgctcaaagtgtaagactggggaaaaaaagcttatgttgttttttttgtctttatcaaaataatggtataaatctgattatcttacttgatctgattaaagtcaggattacttttatcagaaacttttatattcaaaacatatttagtattttatttttcttaaagaaaatggttctcttggataatacagaaatcttcaggattttgttgtggattcaatgaggttgttgcctagaggtggcaaacagaaaagaaaaaatagaaaagagaaagacagtggctgattattttgcttgtctgtaacgaaattcatctaagagaaataagtcattctcaaaactcaacctctgtttaacctttaaaagagcatttgagaaagaataataagacgtaattctgccaaggtgcggcctgaccctgagtaaatcattcaacttctgttggatgatttcctcatgtgaaagatgaacagtattgtgctggaagctaaggttccctcctactctaaatgtttaaaattctgtatcagtggactgtgaaaggaaaaatagatggataataccagagttggaaagtgtgagagtttatctgtttacattaaaaacaactataatgatgcagcaacctgtgatgatacccaacggaacaatgcaaaaaaatgtcagttttataatatgtatgtatttctttagccacacaaaataaaattttgtttctagtccttattaagaccaagttgttgtatactaactacgtaactatcctaaactttaattttttaaaaggaatatttttaaatattgattatttcccatctccttattatatcaaatatctcattatttggaaggagcattgcttttttctgcatattctgtaatcattttttatattctgcatggcaaaggaattttacagattaatatcacttcctgaaatgccatttttcctaaaataaccatagatcacattgccaaataatactgcagctgtcatggtagtggtccctactgtcttcgattcctttttgttgatcctgtccaatatcctatgctagaaataatgatgtctgacaaagaccatcagaaaggatactgacctgtgaactgtatggttctgttttagaggacttgtaactactagggtatgcaaagattaaacatctaatggtttgggggttttttttagccttaagaaacgtcaaaggatggtgattggaaaagagaagaagcagcacacaagggttttgtcttagaagcatttattttatttatttatttattattacttttttttttttttgagatgcagtctcactctatcgcccaggctggaatgcagagaagcatgtatttaagcaccccagtcctcagctatgcagtgccccgccactgccagtgaagaggcttaaaaaagagtgacatgtttctccctagacctctcttttagtgcctatttgtttatcagagactccatttaagggtaactgaagtgtattttcaagtgcatatgcatgtgtattttgctaatttcaaaagtttctgtgcacataaattccattacggaaacattccatatgataactaatctttgccctggtggtggttcaaaatagcaatttggttggtctgttttcaacaaattctatagaatgaattggctgttgttagaaaatgttttctctcttttctcctccctcttctcaaaatagcagatacattttaaatccttgattgcttctttttcagtggtgtttgaaatctaagtgggatttgagagaatagtttagtttggcagttctttacccttgccattttgtagaaactttcctcagcttcccatcagatattctaagcaactttaccaaaagaagtcacctacgtgccaaaactgccgagcaaaataaaacaacagagccatagaaaatgatgtaggagtaaggataaagatatatacagacacccaaattcacaacattccttatcatttgctaatttacttcagagactgttgtattttatttcttggttcttcaaactagcaatgtggtttattccaatgatttgtcagtctagaatgtcaatagaacaaaatcttttgctgcttagtaaatgttccaaaaagggtatctcatgttataatcagttgtaaaaatagaattctaaaattccattcattataatcctctttccttcttccctcctgtacactgtaccctattggaagtgggtaagggcattaatttctttcactatcacatggacccactccatcctatttatttgttcagaagacaattgaaacataatagagaccagagctgctctttgaaaatctagaaattgccctgtgagcttgatctatagactgtaagaaagaagggttactacttcactgaactgttctccacgctcttgccagatttctatatgacagtttaggatgaatagaaaacagatttgacttgggatgacatgaactgaaaggtcagttcctccagcttttcaatacacagtgcatcttcagaaaatatttttgacgagcatgattgacaggtaatttcagaaatgaatttaggctgggtgtggtggctcatgcctgtaatcccagcactttgggaggccaaggcgggcggatcacttaagttcaggagttcaagaccagcctgaccaacatggttaaactccgtctctactaaaaataccaaaattagccaggcatggtggcacgctcctgtaatcccagctagtcagaaggctgaggcaggagaatcgcttgaacctaggaggcggaggttgcagtgagctgagatggcaccactgcactcctgcctgggcaacggagtgagacgccatctcaaaaaaaaaaaaaaaaagaaagaaatgaatttggtccctagagaagtttcaccatgaccattttaaaagagcaggtggtaagaaaaggaagagtcaattaagatttattagtagtaataactattgcttatggaccacccactgtatactagacatagctgggccccttatagctactattcctaatccttataacaaccctattatccccattttcatatgattttccagaggtttataaactggttcagaatatcagaactaatgtatttgaacccaaatttacaccaaagccaamgattgtgcccgttcagttaggccaaactgcctttcagatttcctatgaagctgatccttccaactctaataaagcacagtctacccccagccgccactatacatctgcctcagcttacttggaattattttatccaaaaccrtcccctatatgtgggactagtctcaccaaagagacacttggcttatatgaggattccattggttaaagttggtgctaataaatacaagttatttgatctttagtttacagataaaacctctaatcttgatcaactatttccaataaactttttaaagggatcataactttttaaagggatcagatcataagaatgtagaagagcttcacagtttcatccctaagggcagagaggagacaaattactattcaccatgggtctacaatttcattttcatgaaccaaaaacaactggttacgttatcttagtttcaaaataaatcttatcaatatttttggaagttttattgatttcttacaactttttcctgccatcttattgatgtctcacaacttttcctgccatactcctccctatatcattccactcattttcatatttaattaccaaatttcctcctctttctcttaattccagtacaataaacagataattctccatttacagatacatatttttccccattactatagggcactaattttcaaacttcagtgtgaatacaaatcatcttgatggtttgttaaaccacagattgctggccccagctcagagtttctgttcagtaggactggtgaggtggggagaagaccaagaatatgcatttctaacagtcctaaggagagtggatgctgtgatctagggggaccgcactttaagaaccacactgctgtcagctgatgagattttaccttagctacagaagatagtgatggaaaaactcggtcaaaacaactagggtatctgggtagaaagaagactgagagctactccttcttctgccttgacaagcttacaaatcttgaaacaagcaactttttaataagttgaccagagttttgtaaaaaattattttcttcccttttgaataacctttctgattccctctcatttttcaacagctatcttgagagaaatctgataggaattaacagttatgaagcctcatgtgaaaagcttagcttttaaatatatggagactgatgcatatttttaatttattttgtaattatagtatataaatcttggtaaagaaaagtgaacaatttctctacctaagaattattaatacaagtttaatgactattaaatattaggacttaaaagaccttggaattaatttaatcccttagttttccattttgtgacatacatcatgtagctcaaattgttcatagttactagaatacgctaagtaaacagaatttaaaggctagagcttaaattgctgattatctcaagatatataaatggtgagaaatatactaatttcttctaaaagcatatcgcatttttaccatcttcctgtatcctctctgtacgtatagaatggaggaactatatactgtactgtgtttatagtacctttttttgtcttcaaactctgcctcccaggttcaagcgattctccagcctcagcctcccgagtagctggaattacaggcgcgtgccaccacgcccagctaatttttgtattcttggtagaaacagggttttgccatgttggccaggctggtctcgaactcctgacctcaggtgatccacccgccttggcctcccaaagtggtgggattataggcatgagccaccacccccagcctacagtacttttctttagatcagcaattgaactcactgctttaaaattagagatattgggccagacatggtggctcacgcctgtactcccagcactttgggaggccgaggcgggtggatcacaaggtcaggtgttcgagaccagcctggctaacatagtgaaaccccatctctactaaaaatacaaaaaattagccaggcatggggatgacagagtgagactccatctcacaaaaaaaaaagaaaaaagagatattggctgggcatggtagctcacacctgtaatcccaacactttgggaggcagaggcaggcagatcatttgaggtcaggagttcaagatcagcttgacctacatagtgaaaccccgtctctactaaaatacaaaaattagccaggcgtgttggcaggctcctgtaatcccagcaacttggaaggctgaggcaggagaatcacttgaacacaggaagtggagattgcagtgagccaagattgagccactagactccagcctgggcaacagagcaagactccctctaaaaaaaaaaaaaaaaaaaaaaaaattagaggtgtttcacctgaacactcattgagcccattttctataactaacatatttttaaataatttattctatgcttgacaaccttgtagatattctgtactataattaatatgttgatcaaaattaaagccatatatatatatatatatatatatatatatatattttttttttttttttttttttttttttttttttttttgaaaaaaaatctccctctgtcacccaagctggagtgcaggggggcgaactcgggtcactggaaactccccctcccgggttcatgccattttcctgcctcaaccccccgagtaggtgggaatacaggggccccccccaacgcctaatttttttttttttttaaaaaaaacgggttttcccctgttagccaaaaagggcttgatctcctgacctcgtgatccgcccgcctcagcctcccaataataaaaccatattttatgtctaaatctatataatatctataactatatataaaccttaatgctgtcattctagtggattacattgtattgaagtattaaattaattcatacatagacatttggcagttctgcaagttcattgacttctcttaacagctactacctttgaatgattagcactccagaacactgaatgagttcctaattgtgaaaatgattaactaactgctgacataacagagatagtcacaaactcaaatggatcattacaggcaatgtaacttttttaaaaattctctattcatttgcattatggctacaagataaattttagatttaaaaaaattaagtgttagaattatactttgagtaggcttcaggcagaataaatttatagtagacttcagctcaacattagggcaaactttaaggattgcatgacttctctgctcctggaattaattatttaggcacgcactgaatgtgggatgcataaagggaattaataaatcagaaaaggtgaattgttatggctcagattcttctccactctgagggattcagaatttattggaaataatcattggaacttttgccttcaggccttctgttaatttactggtttggataaagaagtgtgatttcaaattttctaatattattgtgaaaacatataaagaaaagaaatccttcttcccatcctttgttattgcaaaacaacgtaagaactaggttttaaattttcatgaactttattaattaaatgactagttaaatagaatttatgaaatttattctgtaagattaagtctaccttttataatcttcaaagaaacttttcactttcaatctgttttcaaaaatatgaaggaataaatttagtatttatagtgctatttcaaaagtacctgctgtcggtttatttagaatgacacaagaggcaatagggtaaattggaaaaccaaattattggatattatcaaattttttctttataaaattcacattaaattctgtttaaaagtcgaaacatctataatatctttctccattttttcttgcactgctaattaaggtggaaagaagcaacatcgtttgctaatttcatcttaaattttttgttttagacaacaagtttccaagtaagttcattattgctacaaatgcaatcatatctaaattcaggacctagtgaattcatatgaaactcgattctgcctggtggtgtccacttttttcttgtcacttcttctaatcatctgtgctttcttgtgatactgtaacatttccagatttcaagtgggcaaatagtagcttttatggagagatctgagtgatttaaatgttatcacacaaacatctataaactatattgcacatttctaaatatttggctaagcaaattttattcctccagataaatattacataccctttatatataatagatagatatagatatagatatataatctcttatagagagtatgtgtaatatatattaaacatacatatattgcacatgcatatatatacaattttttacatatatatgtaaaaatttttaaaagagatcccaatcctrttcacctttttcttgtccctggagaagtagtggtaaatgggtttcatctcgcttgtatttgcaattgattggctgccctaaagtgctgtgtttgtatctacagggagagggaaaaaacagtgttcatgccaaatatttgctatttatcattcctgctttagagacataaaagttttcattgtagctctaaaaatttctagcttagccagatagctggcagttgcagcacaaactaccatgtgactcacctggaatgtgtctcttctaatatgtgaaagagattatttgaaatctctttccttttttcttttttcttttgatcatctctcctttaaaagagcagagcatctccactatgcctctgagaaactagaatgatggccatgatgatgtcatcaaagatactcttaagtattaaactctacatttgcttctaatgagttctaacccccattaaaatgacagcagttgcatcctttaaaatttagtccagtgattctcaaacacaagtgtgcaggtgtattaaataaaaatacaggtttggtccccatcctcagagattctgatttgattggttcaagagaggggttcagaaattggcatttttcatcgtcttactcattctgatacaagtggtctggaagccactctttgtcattcacttagactgtggacttgcgttctttctttttttttttttttttttttttttttttggttcttgttagacttgcattctttcttccatatcgtttttccagcacaaattgcttaagttttaaatactgtcagtcatgacaccatggaatgatgatttttttggttacaatattaataagtagtatccagggctcactttattttatttatttatttatctatctatgtatttatttatctatttatttatttatttttgagacagagtctcactctgttgcccaggctggggtgcagtggtgcgatctcagctcactgcaacctccacctcccaggttcaagtgattctcatgcctcggcctcctgagtagctgggactgcaggcatgtgccactgtgcctggctaatttttgtatttttgatagagacagggtttcaccatgttggccaggctggtgtcaaactcctagcctcagctgacctgcccgccttggcctcccaaagtgctggaattacaggtgtgagccactgtgcctggccttggtttgtttgtatgtttttgtcgttgtttgtttgtttgtttttgagacagggtcttgttctgtcacacaagctggagtgcagtgacccaatcacagctcactgcagcctcgacttggcaggcacaagcagtcctcccacctcagcctcccaagtagctgggaccataggtgcatgccaccatgcctggcgaatttttttttattttttgtaatgacagcatctctttatgttgacccagctggtgttaaagtcctgggctcaagcatttctcccacctcagccttccaaagtgctgggattacaggcatgaggcactgcacccggccagggctcactttaaacacagagaggctaaatgcataaatccaggtgtttaagattttgtatgctatcatattggccagctttctgggcagtgattactggaaatgccagtttctcacccgcctcctaaactcaagttctgtctgtctggtcttacttgacatcagtccactggtttcatactccctggatttcacaaccaaacattcagagtcttcagagccaagcgactggtctttcagtctcaaaagttgaccctttacgtctcaaatgacatttctcaacctcttttttttttaaaatatatatgcagtataaacctatcatttatcaggagtagaaaaaaattgccttagtcaatctagttaatctttgaatgcctcacttctggtggtggtgtgtttgtttgtttgtgtgtttgttttcaattgtggttaaaaaaatgcatagcataaaatttaccatcttaagcatttctaagtgttcagtaatgttgtgttcagtagcgttaagtatattcaccttgtcatgcaaccaatctccagaacttttttgtcctgcaaaactgaaaagctatatccattgaacaactccccatcttcctttcccccgcaagcctggcaactaccattacactttcttctcaaccttttctttaaaataagcaatatgttttcttaacctttctcccatccataatgggtttacagttattgctatttagctctccaagtataaagcttatctcctgtattgttagaattctcacatgcaaaaagatttacaattacaaagcaattgtgctaataagatatgcttataatctttgagtgaaggtattttatcctggaagcttttccactgatttacagggggaggtaagcctttattcctcttgagacctatggatctcactttatgcttcctggctggtttggtattttatttgtttgttgaaggtttaagtttagagttaccagggcaattaggcttaaatcctagaatttccttggctttttcctgtctacattctaagactgttttaccataacactttataacgtaagtagtagattggaagtttttctggaatttgacaaattagtgtttactaaatgatttaataatctttgcttattcagtataaaatggtttacctttaaacagctttaatagaaacacaatttgggaggaaataggtaaaaaataaaaatgtatttttctgcaaatgaactgtttcaaatgttattttcaaaatctttggcagtaagaaaatactcaacccgagaaataaattttttaaactcttattctgtaaaagtttttcttttgaaacatttctcttcctctgttattaaaatttttttaagaaatcaataaaagcttaaagtcttataagcaatacacatctaaataaccaaaaatgctataattatgagtatgctgcttatgatcctcccatagggaaaaacatctgtcttttcttggcctaaattatttcagagctagcacaaaaactgattgatcatgactcttggataatgataactaagtcttcgtttcatgaatttaacaatttgtatcagtgctaccttatgagtttttcagaaaaatgctatttgtattgaacyattttaaataattccataatctggaataattcagatttttttaatgatctgctgcaacatattggtattattgaatctcattttttctttgatttccattataaaattagaaatattttctgggagaaaaaatactccttgagttgaaaagatttagtgaaggagttgtgttgcagctgattcagtaatgttccaggcaattaacctttttttgttttcagcgctcctctcactctttaagatctttcctcattgatcatcataccaccccaaaatcacagaagtttatttaattccatgcgttcctcagagcacgtgatgtcagaacttaacctcccctcaattttcagcttctaacctaagctggacactaatattttgccagtaggaaccttttattttttgagacagtttcgctcttgttgcccaggctggagtgcagtggcgcgacctcggctcactgcaacctccgcctcctgggttcaagtgattctcctgcttcagcctcctgaataactgggattacaggcgcccgccaccatgcctggctaattttgtgtttttagtagagacggaagtttcaccatgttggccgggctagtctcgaactcctgcctcaggtaatcctcctgcctcgtgcttccaaagtgctgggattacaggcatgagccgccgcgcccggccaggaacctttatatggtacaatgaattccagcctgaaaattccccaagttctgagcctttacttcatacatatttaccaaatatatcaattattatattaaacttagaatgaagaatgactgtaagatttataatgactaaagttagtttgcattatttttcttcaagcgttattaaaccgtactcctctttaagcaagtttttgggtcactaggtaactatgtgatttggtttgttgatcaccatttattgtttgactcactttttcaaaggcccaaatattatatttaatgacataccaagctctaattcaagcagtgccctctgttaaggtgatttgcatctgacttgaagcatattaaataaaatctacattttatttgatgcaaatgttttatatttatataaaaaattaatcttgggtaaacacaacttgattcttaaattagattcttaataactcaattctaaatgattacttattaaatttgtcacaaaataactataaagtgaacgtgaatgctacattactcagtatatctatgctataattaataaactccaaaaattagttgtgtattatttggactactatttcaatcattcagaaatttgttttaaaaaatccttgcagtcttgctgctgacttcatagygtgcagtagtgtgatatggagatgatgcactgtctttcagaagccttggctctatgccttctagctgggcctggggcaagtcatttagcctctgtggaccccagcttgcttatccataaattgagggaattggatcagagtgatgatctctaagaaccccttcaatttctgtatccctgaagtcagtgaaacttctcttaaagttagtttctactttcttctttggccttttctcattttcttcccactccccttggtttcgtctctcatctgacatttattgaccatcctttccttcttggcatggttcatatttagttatggccactttacagtgttgcagtatgctgcttctctgcctaatttgcccagttcccatttttaccctgccattttaattttacatataaattatcttggaactaacacaaaaactagttgatcatgatatattatatatataatcaataagacttatcttttggccctgtacacaaaagttttaaagaggcaattcttccagttccaagagatttttttagacacacaacctaaaacttgttggagtatattttaaacttaagtttcccatttgaaaaatcctaactccttaacttgcatttaagtttaaaagcagagacagtttcttcctcttttgtattcccctctccaccttgcactgggctgattacttaaatcatctcttttcacttaatcaccagcattcctgttcctgttttgtctttgaaatcttgttgcttcagaatcacggtacttaacagacaaatctaaatggcgacaattgttaatgaaagcgatagttttaaaacctaaccaaaaatgctatgtcatctttatttcaaagatgactcacaattaaaggatgatttgttgcctgcacaccctaaattttatttcagaaatattctttcccttgcttaatggataagtgatgttgttcctctactcattcaatggacattgagtagctactttttgccaggttctgtgctagggtctagggatacaataacttaggaaagacaaatatttcactgccattagctttaagtgtgccatgtccaaagttatttgattcaaagcagcttttggagcctaattacagtatcattttgttcattcaacagatatttatttgattatctgccatgtgctagacagtttgttggtacatatggaagtgtatttaaagctatctagtataaaatgctatgcattatttttcccttatcaatttatcctttaaatatgattatctacatactgtcatagtgctcaaaatatatttcattgatgcagatttagagaaatacaatgatactattttaaacaataattctgtcttcctcattccaaatctgccttgatgtcctagggtgaaaataactattctgtttcatttcatgtgccattgtgttcaagtggtaatgactacctgagtcctaggttggagatgattgtgaagctccattcaggcccatggtaaaagactgcgatgatttctgtatgttgatggggcagttagatgaggaaagcaaggagtagctatatacatgtcacatgttagcccttcctgccccaggcttttgtattcatcatcactaattttatttcactctcattgcatattcagtatattcacaaattctttttctcctcatatgtttggattgacaaaaatccatcagtgttctcagctatgatgactatctcaccaatgtcttagccaaccaaatgagatttactaacacctctgtgtcagtaaatccacagttgtaataattttcactgtagagacattgcaatgaagacaattaatagataaattcagttaatcatgagtaccaaaaatttgtcctgaaagttttccataactggtcattaattatgaaatattttctaattcaattaaatataaaaagaatgtgtaattttaaattataataatttacatatacgttaaaatcattttccaagttcttttttctattatacctcattttaccctgatgaaactcctgatttagattagttcaatatcactgtccccacttaacagatgaagaaaaccaaagcccagcaggtgaaatggtttgctgtaatcacttagctgcctaataaaaataccagggttttaacaagcccactgctcattgaagccttttatattaataataacatagaaatttaaagaggtaaacttgaaatcaaaatttggcaaaattaagcatatatgtttatagctcatttaaagagtttttttgaaatgcattctaggtattttgttgctttcatcacatctttaggctcaattctgcactcagtaaactcttggttttggccctggcagaaggcctagcaactcattggtgctcatgtctgtgcaccagctgcttgccracctcagcctctgcctcaaactctgagcctttgtcctctgtgcttaagactccctgcctgagcttcccaccttagctaaccttccagaacttgacgtttcctcacctgttaacccaagtcttgtcatggcacctgctttgcagaatagccctctaaaagtgatatcgtttagaggatttaagatgtaaaactacatttgcataataagtttggttaattaaacagcgagtaaatcttttccctgcattccattttttattatttttttattttttattttttcaagacagggtcttgctttgtcacccaggccggagtgcagtggtgcagtgayggctcactgcagccttgacttctggggcttaagtgatcctcccgcctcagactcctgagtagctggtactacaggcatgcaccaccatgcccagctatttttcctattttttgtggacacagggtctcactatgttccctagactggttttccctctacatgcttatgaacaagagataaatgaccacatgataagttagaagcagactttttcagaaacctgtttgaaaggaatgatccaggttttatgaaatcaactcaagaacccactgttcttcatctgcatcagtaccatsattacagttgttgacagtgaaggccctagagcactgcagtattctcatttgtgcatgcaaaatttaatcacatttattatgttgtatttattaaagcagaaaatcgaaataatacatgttagaaatatttccatttcaataggattaaaagcatactgttagctaggaattgctgttaagtaaatgacttcgctccctgacattcccagttaaccatggttttgtagcatcactgaggaactggcaggctaaattctgaattcttacatgcagactgaattattctggtggtttttgttgttttgttttgttttgttttgttttgagacagagtcttactctgtcacccaggctagagtgcagtgrmacgatctcagctcactgcaacctccacctcccgggttcaagtacttctcccaccctagccccccgagtagctgggactacaggtgtatgtcaccacgcccagctaatttttgtattctttggaagagwtggggtttcactgtgttggccagactggtcttgaactcctgacctcaagtgatccacccattttgacctcccaaagtgctgggattacaagtgtgagccactgcacctgtccgaattattctgtttstgtatttatggccacagaagtttcatattggctaaatctgcacaaattatcatatagttataaatataaaagtcagatcaatatggctaagattatcacagaggagcttaataggagttccacacttgccttttgccgggagaagaaaacaacaatgactttaatccacttcctctacccccttaagcaatggcagtaatttcagctctatttttaggtattggatcccctaaagttatcaggcaatctcagtggcctagtataaagtgcaaacagaacagaccttggtgtcagccagtcctgggttcaagtccaaattctgtcatttattgtgaaatttggagcagtttatgtaactgtatagagttgtgagaattcattcatcatttattgtatattcatcaatcacctactatgtgctggtcaatctttaaagttcagggaattatattgataacaaaacataaagttccctgccctcacagaacctagagtaaaccagaattctcttaaaaaagttaaatgcaaccaggtgcagtggctcacgcctgtaatcccagcactttgggaggccttggtgggcctcacttgaggtcaggcattcaagaccagcctggccaacatggtgaaaccccatctttactaaaaatacaaaaattaaccaggcgkggtggcacgcagctgtaatcccagctactcgggaggctgagtcaggagaatcgcttgaacccaggaggcggaggttgcagtggcagcgagccgagatcatgccactgcactccaggctgggcaacagagcaagattccatctcaaaaaacagaaagttaaatgccttcaggtacataaggctgttaacgaaatgtcacataatcaaagcatttaacaaatattagttaacatcattattaaktcttcccaacccacgaaatggatggttccctggaaagtataacaacattatgcaaagttcaaagggagcctccttttaccataggaacctttaggtgtagcagctgcaagggaattgggctgcttataatctcataaaactgttttcagtcaaatataaaagtgcacaattgtgcaggcaaaaatttcttgcacaggaaacaaaaagcactaactataagagaaaaaaacaatacattagactccatcaaaattaaaatttcctactcatccaaagacaccattaagaaaatgaataaactatccacagactggaaaataattgaagcatagatttattcctggaggaaatcagaacagctttgtttttttctttttttaaaaaaagagaatcattaggctgtttgcatgattgagggaccaattgctgcagcgctaaaagtattacattcacctacttcctagtacctacagtttttctcatctagatctaccatcgattttgatggttttttgcctgaaggtgtctttgggggtaatatgacaccctcattttacaagagataggaaaaatatttgtatgactttgacatcatttaactagtctttcagaacttgaactatattaagtggtacttccactgttcagtgtctgtttttcttattacactgattttgcttcagaatcagtgagattatatagacgtcattcagaatatttgtttttatccttcaactcgaagagttttctcacctctttattttcaagttgaaaacattattataagaktatgttagcgggtcatttgactctgaaaaaaatagctttttaaaggttgatcacactttaatcttcaatttcaggatagtaaagaaccattataatttaggccccagtgactgtcataaaacagcttttaccagaccaccatcttaatactgatattttcctctttcatatttgaactatatttttttctataatctagctcttagaactctattttcctttgatactaatgattcctcttgccctcagaaatgtttacatgaaacagcacrtgactgtcctttttgttgatcccaaaactttttattgttcattctagagaggcaaataatgtccttcagtgtcactaattgagtttttaaaaggaagatttgatagctaagaatctgttgtcttgtatcaatttatcatttttacaattgggtcaagatatatttatgcaatttttatgttaatagcataatagcagtagcaatataatgtgtggcttgggagtttcagagctttttaaaaaaaactaagtatgtgcctatgcttttcctttttaaccatattgaatgtgtaatgttgagttagaagacactgtgtgaggtaagaaatggcarttcaaggggaacaagaacattcgtttattcagtcaacmaatatggattgagttcctcccataggcccagcattgtactagggaaattgctcactatttttatttttcccctctaacctaaggtggagatgataatgaatagtaaaattacatgttttagatgtctttgtatgttataggtggatttgggacagcaaaagcctttggtgtgtttcacttggaattacaaaaagaagtaaattagagaaataattgtctgacttctgatgatagggtgtttttgtttttgtttttgtttttgttttgagacggagctattctcttgcctcagtctcccgagtagccgggaccacaggcgcccaccaccacgcctygctaatttttatatttytagtagagacrgggtttcaccatgttggccatggctcgtctcaatctcctgaccttgtgatccaccctcctcgccctctcaaagtgctgggattacagccgtgagctaccacacccagccttctgatgacagttttaattttgtagatgaatttggcatgacgtggatgaattctgtcaaggtcattattgttttcttctcaaaaccaatagaattttctcacttayttatttttagaattgtcaggtagtgtaataaagttatttctgtaggaaactgggaattcattggctatttgactctgaatgtaacctctttaaagctgatgaacgagtggccccttakatttgaagtggtaaggtagtcataagttaggctcccagacactggcattcaacgtgattttgaagtgtgatagaccatgtatacacttgattgtgcaccaagaggcataaggtaaaatcttgtttccttcccacctgtaagtgttaagtgcatcagtctcctttctctactggtggtgtcctgttgctccactagtagcccctgatataaaacccgtgtcctccatagataattagtcatgaatccctttccagggcgtgttgttctctatgtggtgatttgaagggagaagttttgaaatgaaaaaaaaaagaaaaaagaaaaatgctaagcaatttctgatgctttagaaggaatgtcgtgtttcattacaatgcattttaacatttttattaagatataatttaataaaatgctcagatcttagcatgtcattcagtcagatttgatgaatatgaagacacatttctgtcaccccagaaagttcccatgtacccctcctcagtcaacactcccccgaccctgacttccaaaagcaaccactgatcagatgtctatcaccacagattagttttgtgtattctggaatcccctgttaattgcatgtatttttcttttcttttcttttcttttctttttttttttgttttggtgacaggatctcactctgttacccaggctggagtgcagtgtcacaatctcagctcgctgcaacccccacctcccagctttaagcaattctcatgcctcagcctcccaagtagctgggactacaggcacatgccaccacgcccagctaacttttgtattttttgtagagatggggtttcaccatgttgcccaggctggtctcaaactcctgagatcaggtgatctgcccatctcagcctcccaaagtgctaggattatgggcataagccactatgcctggtctgcgtgtatttttctctgtttggcttatttcactcaacataataattttgagattgtccatgtttttgagtctgtcagtagagtgtttcttttattgcctgatgatacttttttaaaacaggcaagaaataagcagatcgtcactgaatatcttgattgacacataactactattaaaatcatggcagcaaacctgtagtaagaatgcagggggagaaaataccctcttatattaatattaagtgacagtacttctaacatccaaacaactctcccaccttaattagcgttatatgcatcaagagctactcttttggaagactctaaattactaaaaacagaacctgagttcgcatcaggaattgtaatagccgtaaacctatgactgtttccatcgctttatagttctgctttgacttcagaaactagtttgaaaaataatcccatttaaggatattcttttgttttgtttttttttgagacagagtcttgctctgttgcccagtctggagtgcagtggcacaatcttggctcactgtaactgcaacctctgcctccctggttcaagcaattctcttgcctcagcctccctagtagctggcacctgccaccatgcccagctaatttgggtttcaccatgttagccaggctggtctcgaactcctgacctcaagtgatccacccacctcgggcttccaaagttctgggattacctgcrtgagccactgtgccyagccaaggatatttttcttgtagtatctccattatcaaaacgtgctggaaaggatgttttacttgtttatcaatatggtgatgcctcaggagcttttaagccctcttaaaattatgtaatatagacctgatgaactcagttttattattagaaactcattttgatctgtaattccaagcaaatattatataaatgaaacaagagtagatacagtaagagcagcatccagattgcatttttcttcttttgaaagtcctaattaaattgtttgccatgttatgcaaagattcattgagattctggggagtggcagtaaatttaagcaargattatactgtgattctggggagccatagtaaattgtgtatcaacaaatctaaagggtgaayttttactttctgcttattgtctttttcaagaaaattctatagttaccaaaaaggtggctgaattttgacataataaaggagaaggttgagctggcctttggctagtccacccctattcttaccatctccaccttcaagactgaaataaggagctgcaggagcacaaagagatcccaaaacattgtcacataccaatagccactttcttacttttacaaaaagttagtatggtgttttttttgtttttttgttttttggtttttttttgagatggagtcttgctctgtcacccaggytggattgcagtggggcgatctcgggtcattgcaacctccacttcccaggttcaagcgattcttttgcctcagcctcccaagtacctgggattacaagtgggcaccaccatgcccagctaatttttgtatttttagtagagatagggttttgccatgttggccaggctggtctcaaactcctgatgtcaagtgatctgcccactgtggcctcccaaagtgctgggatgacaggtgtgaggcactgtgcccagccagttttctgtatttgtacaattattcagccagaaaaaaagtagccatatagtactataatgcttatatcacttcagtgggaaaaaaaaaataatggtacccaaaagaaataagaaatatagcctgattagtgagagaacactgataaagtttcagattattcccgttcttgaaatatttctcattcgcttttcttatttctttcacctacgactaaaatacacgtgctttccttttcccctatcatacttacttttttgttcaggttcctaagttgttttaccatcttcatatttcattctgataattccaaaaatactgaaatgaatcctccctttcacatgacctactttagtgtagaatttggcctaagtcatttctcatacaaaagcagttacatttgaattaccaagagaatcttgttggtataatttaacccagaagggcaactcacagtgctgtcatactaagcctcaaggatatatcttctcaagattgataagtgcttttgagcaatcgctcaaaagtatgaattgaagtctctaaacagttcattatcgttttggttgtagtaattaattttaattaaactgccgataatgtttgttccagatgaaaaaatgaggatatggtctttgttcccacttgaatatgaacactgctatccatttaatgttagaaagataaaagagatctcggccgggcacggtggctcacgcctgtaatcctagcactttgggaggccgaggcaagtggatcacctgaggtcatcagttcgagaccagcccggccaacgtggtgaaacaccatctctacgaaaaatacaaaaattagccaggtgtggtggtgagttcctgtaatcccagctacttgggaggctgagccaggagaatcacttgaacccaggagacagaggttgcagtgagccgagatcatgccattgcaccccagcctgggcttcagagagagaccctgtctcaagaaaaataaaaataaagtaaaatattttacatggtatcattgcaaaagaaggagtaatggtggtttaaagaaaacgtttaatacagttattcaagagttccaacacatcaaacttttgggatttaactatccttttttaaaagaaaatatattttgaatactgtacagattcccatcttatcagaggaagaaccagttagcataacatagaattttagggctagaagagactttcaacatcatcaagtcttacctckcggtattcaatagttcaatataattattatctttttacaggtcttagctttcctgccctaatttccaaaacaatgaagaactagtagtccccagatcccctttgtatatatgtataactgccttttcattccctctgatagtctccatattcatgttaatgattgcagctatgaggattatttccttgattcattatgcctgaattagcttaagaaaagaatagtctaccagaagcacaacttttaatttaaatgtttggcaaaggtaaagatgagtaattcagagttttagaagtagttgtagtaatagtcaattgtgtcattggttctctggaaaacacatcatatggattttgccatagcgattcaggcgtgagtaatactaccctattcaagagtaatactacccgattcaagagtaccacttcaagagtgagtaatactaccctattctttaagacaagtaatactacctaccacattgtatgggtgaagcaaaagtggaccagcacagctttttgtgggggttagtggtaggagagtgttatagtgaagttctttgttctgttttctcagtctcatttctcattsattcattaaatcaatagatatttattttgcctgtggtatgagctaaccatttctctgggtctggataatatagcagacaacaagatccagtctttggccccaaagagcatacagtacrggtactcacaacatggacaatgctagataactgcccagagagcagagaagctacatgagatcattataaacctgtgcacctgaaccactgcacaagcaatgcattaactttgccttgctcattgggatatggtgagaaataactgttataattagttgtgaagcactttggaaatgaaaagagctacaaagcaactgaatgaaagaaaacaatattaaattatagggtagaaatgattctcataggtatgttcagtatttatgtcaacgatataggactattaccagggaaaagctattttaggtaaatacaattgcctagcttttacaaagtcaagaaaatacgtgtgtgtattaacaagataaattgtggaatgttgtattattttgggtattatgtgagctaaatatagttggaatatcacacatactatgaagtttctataaatctgcagcttctattaagaatttctgtatttcaatgtttatcggaagtatttctccaatatttaaatgctgaaactatccaagactattattcacaaacaacggattatattttaatactcagaaactgtaggaaggtttgttaaataagatgaatatcctgtgattaacttgccagtatgttgggttcagtgatttattatgcctggtcttttctgattttagttaatgtttttaaagtttgttaattctctcagaagatgaggatgccaatttatatcccattatacaccctcaaaagatgaatttatagaatgggccatgtctttaacatgcttctatatagtcattcttatacctaagattcagatgctcaaggaagggacccatttagacagttatttaatgttctttgactatgaactaatcctaattttaattttagtacttttatgttcttaccagctttcaccctaattaaatggggcactacaccgcagagtttagcctgtggtgtagcagagcccaggtcatctgtcacagagaatcrtaatcttacattctctctctcctctgaacaatagaattttgaggtgggggagaatcttagtttataatgaggcaactctagttttatcacactcagaaacaacaaaaatattcaaaatttaactttctgtgcattccatttatttgcaaatatatatcagtatgattattacatgagtaagagatcttcattttttactgtcatccctgatttgccaaatttgatggagaacctccacagagttgcatattattttatttgttccacatgttggtgctttgttctctactgtccttttgtcattatattatctctgaacatttccatttagtgtttctatttagagtaaagaaatagaagcatgaaaattaataacccatgcatcatattttttgctggactttataggaatgaccagctaaggctagaaacctcagtgtttaatactgttttcaaaatttgattgttacatatattgtcatttcagtgactggagacaagatgtatatgtagacaaatagataaaaacagggtaattaaaccagtgtggtttttttttattttaaaggaaaacacatacgacttatgtacattgcatggcagagtattactaaaattcgcctaaacaaaccrtcacgatgttttcaggttttatggtaatgctttgactatatagtatttggatttgaatcctcataatcacaaagtctcttagttgtttaaaacaaaaaacaaagactatactgattctagaaagtatcatctccttgattatatttgtgctaagtgtatgaatctgtgctataccagtatgaaaaaggtaaaactgtatatatatttacattttgaaaagtagcattgtgcattttagaaaaatatttgtcaacttgtggcactttggcaaaggaatgtgcaattataaaggttaatgccactttatttttttctaattcccagtaattattcttactaggctttagagtcaaaatcaaacccaattttaagactagcacttttttcctactggtaattcctgtttttctaattacacaaaatgtttaacttaaactattctttgcaatgagttttagctttcctcctctatcctaayttcaaaacctttaatttaagaaccatttaaaattaatccagtggtaaccagaagaatattttaggtatcatgaccacttaatcttgtgcctgattttagtaattttctgataaaaataactgaattcctgaaaaagaatattcaaactttttaattagttttcattggtcataaataattgagtagttgatgtccatatagtcataatttatctaaactctggagctgccaagacaactaagtacacagaagtgcttaaaacacacccatatcccctaaagagaaatgacaagacttggaagcatcagaattctgtattattatgagtatcacatatatatatgctattttatatatacatatatacccatacacatacattctgttaggttaccagtattttactgtcatgcacccatgggtagtagaaacaaaataaaaataaatataaatgtttaactttaggtgttggcaccaayatagattatgcataaactgttgcaataaaagatactcattgtgcctgtacctgaaaaatttaccttaggttttctctggccttttttgtttaggcctgcatgatcattttaaatgtaaagatagcaggatatatgaatgaatggataaaatgatggccctgtttgccatgggattaactattctgttgaattttctgaggggcattggctgctgtatattacgccataaactatattgttcagaagcaacatgagtgtatcacagcatttagaaattatacatccttcgctttccccacaaaatgaattcagaatcgacattcaagtttataattttaagctgctaattataaaaatatattaataccttakggattgaagattacatgaaataagaactacaaaagaatgctaattaataacataactccatatgctatcaaacttctgatagcactgagtttcttataaagccttaaaatattttaatgataaattaattacctggaaaagaaggcactttattaccttgaactagctattcgtctgtatagaatatgtcaaaaatcccttaaattattctttatccttttataaatttatcctagttacatgtttttctgaagcctcttatggtataatgtgttaattcaaaaactattgtaacttaacagaaaaattgttaccaatataaccaatgaacaatacagaaataaaactcaagaataacaaaagtatatgtgataacaagactgttagtctaagttagtctacaatcatttgagattttaaaatgttgtaaaatttgaaggctttttcattgaacaatttttggacagtttttatttttaaatctcacttttaattggtactgccttgtcttgaaatgttgatcaaatgtaaaggcaatcataattattaagccagtccattataattcaattttgttttagttgagattttttagtgtaattctaaaacattaaaacatctgtttgtttcttttttgctcaagtcagccatgcctggtgaactatcaaatttaaatcatcaacatggatgtgctgctgtgtatagctgtttcctcttcagaaaattagtgcttgatttatacaaggaatttagttcagcagaaaaagcataggataattttttcaaaagggttcaaccctctcaagtgaaaccttaacatctttctgacattcataaggataggcttttatccaagaaattttttcaacagaaaattatttcaaagtggacaaactccactttcttttttgcttgaggggcagtacacttttacaaaaacacatttttctgtaagtttacttatctttaagtcattctctgtggtggccatttttccatctctaattttaaatgttttactaaatgtacgtgcagtttcatagacagtctgatcattacatgattacagaaaggagtcaagtttatcagaggtctatccttgtgaaggggagaccaaacacaaattccatgtcagttgtttggtttggttctttgttttcttttaaaaacaagatatattaacccaaaggtgtgttaatgtcatggcatgaacaatcttcaatgtagacctattgagtattttgtgatgctgagtaacagacgtttctcaactctctgtgatgctaaatattttccttaggaagttttgtttaatgttagattgttgttctgaaagatgttggtcctagtgggatttttttaaacttggaaaacaaataaacgcatgtattacaaatatagaaatggtgaattgtaaacttaccatatagtactgatttctattttcaaaaatgttttgctgttaaatatatacaacataaaattgctgccgtactgtaattgagtactttttcctaaacgaccctgttatcactattccagaattagaaggtgggcagatacatgattgattcatgtgtctgcatagatgcttcaaggtatattcttctcttggtgagtaaaattatattttccttggcatcaatgcattgagatctgaatatacctgtatctatcaatccttattacacatttcttaygcagtagcttcaaataggccaaaattggcctagacacaactaaaaattgagggtttgttacatgctttctaacagaaaggttttcaacgagattaattatgggtttgtactgtgaaaatagtggaactcccttgaaaacttcatgtttgctaaattcaaattaatattttttctttagctcacaaattaccccaaatccagagagaatatcaacctttttcactgttgtcaaatcaagcataaggaacagccccatgatactacaaaaacagttgaggaataaggaataaatctcttatgttacacctcagaataaaggcattcggtgaaagaaatgaactgaagttcatcatgaatgcaaggcctcagtacttgacattcctccacggaagggaagacaagtatcaacaccactggcatcatttccaaactgatcttatgttgaataatttccaccacattgaagtacctttcgactctatccagtttttgggttttgttttttttaattcatcaagcctttcgttttcaaaccaccatttgtcagccttgaggtagagagacatatagatttgaaaatactttcttaagagatcatgtaactatataactctgaatttaaaaattgaggggggagggataatttcaacccactgcctcttaccagaaacatttttttaaatctgtaactgctttagtgttaacagggtgcaaggtggtttttgtcccgtattgttcttaaaaggttctcatttattgtgattgtattgtactgtatgagaacaaatcataaattgccttgtattgtttataatagaccataccacgtactacttcagtttttatgttccaagtttttcagtgatgcatgttaacagttaggtcctaaaattctgtggtgctaattctcccatacccaatggtgcttttgtggatgctaactgcacacatgctgaacaaagcttgaagtttaaaactttcctcccttcctctgtttatatgaagtaaaatgaaataacttgaatttgtctcaaagtatcactgacaatctaataaacttgtttatatgtgtgattagtttggattcttaattattttaaggaaagcatctcagctctattgggccccaaaagttgattttgtgtttatttcattatgtcatttgtgcccccaaattcgtggtatctttataaatttcaatgcagtttgtctggcttccaaaatcatgtttaggtaggatctatagaaactagacctatcagaactggaaataagtaagttgagaagatcaaaaatgtgccaatccagtctattacagtgcctttattgtaatttattaataaggttttatcacctggttgagccgggagataacacttgcacgaaagcaagtatgccttcaaaacctttattgcaactcacatgacattgaaaaggccatttctatatgctgatattaaaagttccacttctcatatatgaaaatagggacaaaaaaattaattttgaattttccaggacaaactgacatcatatgccagaatgtcatagtagataaactcatggcaatggttttattggatttttatcttctgcatctatattaaatcacaacagaaggccaagtgaacctgctaatatcttcatgagggcagagggctgtttcttccaagccagggataaattcaatataaaggcactatgtaaatttgcattccgaccttggtactttgcctaactcaagggtaatgttaaaatttgaaaagaaaaaatcgaaacaaatgtattaaatctccttgagcaacaatcattgaccataaatagaagatgatcaaacctatatcagtcaaagaatctagcaggtatgatgactgaaatgatattcccataccactatggttctttattatataaagagtttcaggcccagtaaatttttgcctcaaatagctattaaattgtgtctaacttctaacatcagaaaatgaagtttagagaatagtgccagtgtgaaccctaagcttgcttctgtgactatctgaaataaatgcaatatttactaaatcacagcctctcaccaaagatatttctacaatatatttttgtaactaccttaactgtattccattttatgaaaactggtaaataataaatgtactacaaattaattgcacattttcttttggaagaaaaatctgtttaatctacatgaaaatatctctaattttacacccacagtcaaccagatttctgtattaattttcatcattgtcccatcaaaaagattatcctgaaaaatgcatatcagctttcgttggtagtggtgaaattttttaaaaaacttatcagccttaaataacatgaatatattttgtaagttttgttcctctataaaaataatgtagtccctctctaagtgaaaccattttttaaattacgtaattatatccattttcattgcattattagcattatttaggtaagttgtcttttctgttcctaaaacagtaattttcccttagagaccttatgctcaaggtgttttccctaaatccttatgggaaagcattttcaaaaacagacccaaatgttctctttccagtaaggaaaatctttcgtaataaattccatgtacactaaaagcataacagtacttgtattagggaagtaatttttctcatcagaaattgctttgagtttgaaaatggccaataataataaaaagccaatctgcagtctacataatttcagatttgtcttcatgcgatctttttaaaaaactgttgaagtaggtgcatactgacttgcactaggactaaagttatttttcttacctcctactttatcctttatccttggcagggattcaagagaggtgaaaagacttttggaaaataactaaaaagtagtacaacacacacaaaataagggagtggtagttcataggactgaataaatcatgaaattcagtgaattcagcactacacatattatgccaaattgttctcctcttacacttttcgcgaagcaaatttcccatcataaaagacttaacaaaacactggaacatgaagatcaaaaggactgaatgaaaaggctggccctcagttttgtgcatttggaagttcaggtttttttttagctaagaagactttgatgaaggaagaagtaaaaaagaaaaagaaaaaaagaaactcggttttgttagttcattctgagtgaattcacaagagattccttttaaacaaggtcataaagaaaacatcttgaatatcagatattcaatggagaaaccaattaacttacaacaaaaaataaattggtacacccagggagtggattggaaagaagctgtgcatgagaagtgaactttgaagtttgcttttatactttttgaatattatttcatgataagcttgtattattttataatttataaagtacttttttttttaaaggaaagaaatcaaatgctagactgactagaatacctatatcaactggtcagcacattctctttccagtaggaaaatctgccttttctttctttttttgagacagcgtctgactttgtcgctcaggctgcagtgcaatggcaggatcacagctcactgcagcctcaacctcccaggctcaagcaatcctcccacctcaacctcccaagtagctgagaccacaggcacgtgccactatgactggctaattttttattttttgtagagacagcatttccctatattgcccagcctggtcttaaagtcttgggcttgagcaatccttccaaagtactgggattacaggcattgaaccactgcacccagctggaaaatctacttctaaaacctgcttaatgtcagaacattgattggcaagcataaaatcaggtaaaggggaatgactaatattcatgaatggcatcatgttatgatgggcttcatgatacagacctgccaagaaacaggaataaccacatcagcatattggctcagagcacagtcaccccaagtcagggatggaaaccactaacaaatccttatgctttaaatctttttttctagattccatgtgacccaccatctttcagtgtgaaaattattgcttatatgattaagccacatattatcttgcatttagtatcactttaggattttcaatgatagaatactgttttataaatatcattcatcattaagcattaacattaatcatattacataatcatatcattacattaatgtataatcattgttattattttgcttgtttgtttgtttttgagaaatagagtctcagtctatctcccaggctggagtgcagtggcatcatcatggctcaccgcagcctcaaactcctggcctcaggcaatcctcctgccttggcctcccaaagtgctaggattacaggcataagccactgtgcctggcctgttattttttataatcatcattaatcattaagtatcattaatcattcactcttattataaatatcattcatcattaacaaaagttttacatacaatagctctctgaccatgacccttcttaatagagatttagggaacatccaaattcagcagaagtgactaatgaaagatcaagatgttcctcctttaaccctcatggtagaccttgccaataaacgatagcaactgggagcagctcacacctgtaatcccagcattttaggaggccgaagcaggcggattgcttgagcccaggagttagagaccagcctaggcaacatggtgaaaccccatctctagaaaaaatacaaaaattagctgggcttggtggcatgcacctgtagtcccagctactcaggacgctgaggctggaggatcacttgagcccaggaggtcgaggcttcagtgggctgtgatcatgctactgcactccagcctgggcgacagagcaagaccctgtcttaaaaaaaaaaaaataggccatagtatttatttcaaatggccagatacagctctagagtctttctcaactcagcactctcctggcagctgctcccagttgactacacttagcatgcaagattgacatagttgcctttctaccttagacacccaccagcacatatacatgccatctgtgttagtctgggtcctccaagaagcagattccaaggtggaattagatgtgcaagagatttattaaaggaaatgccagtgagggaaaatggagaaggagctggtggaggagacatcagactcagatgcaagtctgcccctgtgaggaagagaggaggaaagaggagggaggtagaaaggaagttacttcttagactgcagcacaattataagcaagtttcagccaggcctagggggagtccttgagccaaagtcactcttcagaagaggccagcatcttgagggttcagcctgcttaatatccctgtcacacccagttattggctgggagcagcctaggagaagcccacctgcagggcaaacgtgacgatagatttcagagcaccacagctggatctgtgggccagttgggtggagacttagagctgttcagtgcccataggagtctgtggtggctatgaaaatgcatctctcaaatttccttctaccgggagcataactgactcacgagctatttctgtattctgtgatgctagtctttggatggtgtggttttcatgttctacttacaccatccacctcctttgctgtgaagtggtcccttagttggatgcctctgtctctgctgccatggccactctattgctgtgcccatcctgccaattctgaggtggccaatggcagtctgattcaggtcaactgtccgagtcactttgtcaacttggttgttcagtgcctctcccatgatggatggcttctggtggacattaacatgtgatacaaaactcttcacagtctgggctgggtgtggtggctcacatctgtaatcatagcactttgggaggccaaggcaggtggatcacttgaggctgggagttggagaccagcctgggcaacatggtaaaaccccatctctactaaaaatacaacaacaaaaattagccaggcgtggtggcgcatgtctgtaatcccagctacttgggaggctgaggcaagagaatcgcttgaatccaagaggcagaggttgcagtgaatcaagattgcaccactgcactccagcctgggttacagagtaagactccatctcaaaaaaaaaaaaaagttttcacagtctgtgcctgctcccatatgtgcacccacaagcttctaccccaggcctcttcgaccctgtcttccagtc
